United States Patent Application Publication US 2003/0099974 A1 - sequence listing, part 4

SEQ ID NO: 8604 - DNA, 493 bp, Homo sapiens
gggccctctagatgcatgctcgagcggccgccagtgtgatggatatctgcagaattcgcccttgcggccgcccgggcaggtactgcacgggcgtcaattccatgccagagggaggatgaattagggatgaaaaggaggagataaggaagagttacaaggtgggcaaacccagggtctagtatcgtttctcaggggaaattcgctgtcggggaaaatggagcactcccacatctattagaaaatgaagaaatcctggggtgcatcttgctctctgtaggactggcctcatgtgaattcccaggaagctgtgtttccagaggcatgctctttccaaacccatcctgctgctctcagtgttctcctgcttcgcctaatgtggacagatctcacggatgccacgttggaagtcggaagtgatagtgggcttgccgggggtgcccgggggaggtgctgggtatagagaagactaagtgaaatgctggttggggaaaat

SEQ ID NO: 8605 - DNA, 606 bp, Homo sapiens
  misc_feature 15, 16, 17, 27, 83: n = A,T,C or G
cgggccccccctcgnnntacttctagnaattaattaacgcgggggggggttgtggagtggatgctttggcaagatggcggggnagcggcgtccgccaagttacttctaccgccagcaccttcgtgaagcccattttcagtcgggacatgaacgaggccaagcggagggtgcgcgagctctaccgcgcctggtatcgggaggtgccgaacactgtgcaccaattccagctggacatcactgtgaaaatgggacgggataaagtccgagaaatgtttatgaagaatgcccatgtcacagaccccagggtggttgatcttctggtcattaagggaaagatcgaactggaagaaacaattaaagtatggaagcagcggacacatgttatgcggttcttccatgaaacagaagcgccaaggccaaaggatttcctatccaagttctatgttggccacgatccatgaagtcattcagtggaaagatgcacgttgatactattttagagcacaaataaactcactatacaatggtcactttgtgatagaattccattgatgaaccaattttctgcagcctctttttgcctgagcaagtgggaccttggtatac

SEQ ID NO: 8606 - DNA, 494 bp, Homo sapiens
  misc_feature 2, 3, 4, 5, 7, 469: n = A,T,C or G
gnnnngngccgcgtatcactactatagggcgaattggagctccccgcggtggcggccgaggtacgcgggctctcacatcccacactggtctctgcaccacccctctggttcacaccgcaccctgcactcacccacagcagctccatccactgggaaaactggggtttgcatcactccactgcacagtgttagtgggacctgggggcaagtcccttgacttctctgagcctcagtttccttatgtgaaagttgctggaaccaaaatggagtcacttataccaaactctaataaaatggagtcggggggccacatagaagccctcacacacacatgcccgtaacaggatttatcacaagacacgcctgcatgtagaccagacacagggcgtatggaaagcacgtcctcaagactgtagtattccagatgagctgcagatgcttacctaccacggccgctctagaactagtnggatcccccgggctgcaggaattcg

SEQ ID NO: 8607 - DNA, 703 bp, Homo sapiens
  misc_feature 92, 152, 164, 324, 343, 373, 383, 410, 414, 426, 439, 448,467, 478, 479, 481, 493, 496, 508, 510, 542, 543, 544, 549,553, 556, 558, 564, 565, 575, 581, 583, 595, 596, 597, 598,621, 624, 625, 628, 632, 636, 637, 639, 640, 643, 646: n = A,T,C or G
  misc_feature 650, 651, 652, 658, 660, 662, 667, 669, 676, 679, 681, 683,687, 689, 691, 698, 699, 702: n = A,T,C or G
cctcactaaagggaacaaaagctgggtaccgggccccccctcgggtcgacggtatcgataagcttgatatcgaattcctgcagcccgggggnatccactagttctagagcggccgaggtactttttttttttttttttttttttttttcgangttgttgtctanacttctatgtagttttaagactgctaatatgtatttaatttccaggtttttttagttttctatttcttttcacataacgtttcttcttgcttcagtcatataatatcctgggtttctgaatattaatcttcattggtttggaacattttttttttcttancaaaatgaagaggctgatngatttggaagtttttcctggacaggggaanatacatgaanctttttttttaaaaaaagaaacctggntggnttttaggggggnagccttttttttntttttgaangtaattaaaatacccccanaaaatgggttnntnctaagtggttcnttntaaaaagaggtntnaggaactggccgggccccccccttaaaaattnnnacttnaagngananaggggnnagagggttcncccaancncctttcaagggnnnntaagggcgtttaaccccctttcnagnnagncaangcanncnnganaangggnnngcgtgngngngcttncnaaaaaanagntntncccngngngagaaanngang

SEQ ID NO: 8608 - DNA, 455 bp, Homo sapiens
  misc_feature 370, 387: n = A,T,C or G
ggagtcgccccgcgtccggcccgttagtgcgcccggccgagacacgccgccgccatgtcccgctacctgcgtccccccaacacgtctctgttcgtcaggaacgtggccgacgacaccaggtctgaagacttgcggcgtgaatttggtcgttatggtcctatagttgatgtgtatgttccacttgatttctacactcgccgtccaagaggatttgcttatgttcaatatcctttcttcagatggctgattagtgaggggtgttgaagtttgaaattcaagtttatagaatgtaaagctgtacagttatggcgaccccaaagagaaagcatgaaagaacctttagagtagagttcaacacttaaggcaagtngacaagccaaagacctnttaaggatcagggctttgaagagaaggggagagtttgggaaaaagaaaaaattaaaggaaaagctgga

SEQ ID NO: 8609 - DNA, 498 bp, Homo sapiens
atacgactactatagggcgaattggagctccaccgcggtggcggccgcccgggcaggtacgcgggggacaccctagatcccaagatctccaaggatttggtggcatacccactccagcacacagaagcatgaggttcatgactctcctcttcctgacagctctggcaggagccctggtctgtgcctatgatccagaggccgcctctgccccaggatcggggaacccttgccatgaagcatcagcagctcaaaaggaaaatgcaggtgaagacccagggttagccagacaggcaccaaagccaaggaagcagagatccagccttctggaaaaaggcctagacggagcaaaaaaagctgtggggggactcggaaaactaggaaaagatgcagtcgaagatctagaaagcgtgggtaaaggagccgtccatgacgttaaagacgtccttgactcagtacctcggccgctctagaactagtggatcccccgggctgcaggaa

SEQ ID NO: 8610 - DNA, 448 bp, Homo sapiens
  misc_feature 333, 339, 345, 363, 427, 428, 432, 433, 442, 448: n = A,T,C or G
cttgcgtccgagatgcaggattataataaagatgatatgtcgtatcgaaggatttcggctgttgagccaaagactgcgttacccttcaatcgttttttacccaacaaaagtagacagccatcctatgtaccagcacctctgagaaagaaaaagccagacaaacatgaggataacagaagaagttgggcaagcccggtttatacagaagcagatggaacattttcaagactctttcaaaagatttatggtgagaatgggagtaagtccatgagtgatgtcagcgcagaagatgttcaaaacttgcgtcagctgcgttacgaggagatgcagaanataaantcacanttaaaagaacaagatcanaaatggcaggatgaccttgcagaatggaaagatcgtcgaaaaagtcacacttcaaatcttcagnngaannaagaagagngagaan

SEQ ID NO: 8611 - DNA, 800 bp, Homo sapiens
  misc_feature 540, 644, 647, 662, 677, 730, 731, 743, 747, 751, 754, 756,762, 768, 769, 776, 777, 789: n = A,T,C or G
cgcgcgtaatacgactcactatagggcgaattggagctccaccgcggtggcggcccgcccgggcaggtactaaaggcttttgcatgaattaggaaggagagtcttggggcagaagcaataggggacaactgtgctggtgctgtcttttgcaggatgtgtttaccaaaacatctaatgcaactattttcagactttacagtttgtagtgttaacctctttagaaaaagagcagccatccttttttaggaagaactgtaaccatccccagttgatgaggagaagctcttctgtagagaagaatgacagctgtgctggggcaagcgattgacatactgtagcggacgcaagtacctcggcccgctctagaactagtggatcccccgggctgcaggaattcgatatcaagcttatcgataccgtcgacctcgagggggggcccggtacccagcttttgttccctttagtgagggttaattgcgcgcttggcgtaatcatggtcatagctgtttcctgtgtgaaattgttatccgctcacaattncacacaacataccagccgggagcataaagtgtaaaacctggggtgcctaatgagtgagctacttacattaattgcgtttgcgctcactggccgcttttcaatcnggnaaaccttcgtgccanctgcattaatgaatnggccaacccccgggagaagccgtttgcctatttgggggctttttccgtttctnnttaattgactcnttgncctnggncnttcggnttcggnnagccggnnttaacttaattnaaaggggggat

SEQ ID NO: 8612 - DNA, 666 bp, Homo sapiens
  misc_feature 362, 367, 368, 370, 371, 372, 373, 374, 375, 376, 377, 378,379, 380, 382, 383, 384, 385, 429, 445, 468, 521, 525, 526,527, 528, 531, 549, 551, 553, 557, 562, 571, 576, 594, 602,608, 609, 612, 618, 625, 626, 627, 641, 642, 648, 653: n = A,T,C or G
  misc_feature 656, 663, 664, 665: n = A,T,C or G
ctcactaaagggaacaaaagctgggtaccgggccccccctcgggtcgacggtatcgataagcttgatatcgaattcctgcagcccgggggatccactagttctagagcggccgaggtacttgggcatctcatccttcattattctctgcattccttccggggggagcctgtcctcagaggggacaacctgtgacaccctgagtccaaacccttgtgcctcccagttcttccaagtgtctaactagtcttcgctgcagcgtcagccaaagctggcccctgaaccactgtgtgcccatttcctagggaaggggaaggagaataaacagaatatttattacaaaaaaaaaaaaaaaaaaaaaaanaaaannannnnnnnnnnnannnnggtacctgcccgggcggccgccaccgcgggggagctccaattcnccctatagtgagtcgnattacgcgcgctcactggccgtngttttacaacggtcggactgggaaaccctggcgttacccaacttaatcgcctngcannnnatncccctttcgccagctggngntnatanaaaanaggcccgcnccgantcgcccttcccacattgnccatcctnaatggnnaangggacnccccctnnnaccggccataaacnngggggngtggnggnacccccnnng

SEQ ID NO: 8613 - DNA, 661 bp, Homo sapiens
  misc_feature 4, 20, 23, 640: n = A,T,C or G
cgcntttttccctcactaanggnaacaaagctgggtaccgggccccccctcgggtcgacggtatcgataagcttgatatcgaattcctgcagcccgggggatccactagttctagagcggccgaggtaccaaatggacaagcctgcagaagcaagtcaggcaactggctcaattttgtattcagctcagagtcatttttttgacctgaataaagaaaatcctgtatcccaaaaagaaattcaaagccttgtgaaactccactgacactaattagtggcggacgaggggacagagtttgttcaactagtggaacacaagcatatatcatgtcattcttcagaaaagcaacaactggccagagttcttcacctcctatcaggagtccataaatggatgttttattgatgcgtgaacagctatcacgactctcaacgaagtctttatcatcatccaataatctaagttcaaagagcagtgctttaagaaagggaccatcttcaggaacaggcacataacttgctccattgaagactctggctcgtttttcaacagttggataccgtctggagaatctcacggtgccacaaagtggagttcccggttcgtggcttatgagccacactgcccgctgcaccatggntaagtcagtaaagcattagct

SEQ ID NO: 8614 - DNA, 663 bp, Homo sapiens
  misc_feature 1, 5, 26, 29, 372, 396, 420, 448, 471, 490, 516, 522, 543,563, 567, 590, 619, 629, 642, 644, 656: n = A,T,C or G
nccancgcgcattaaccctcactaanggnaacaaagctgggtaccgggccccccctcgggtcgacggtatcgataagcttgatatcgaattcctgcagcccgggggatccactagttctagagcggccgaggtactctttttttttttttttttttttttgcagactttggcaacatattgagagcctgaattaacactgaatcctatgaaaacagttttgtaattataatgctgaatcagtcttatgtgtaattacaccaatatgctactctgtgaaacatttcttaagggaaatgttcgtggtatattttgtatttatgccactgtcttttataaaaggtctcattatttcatgaacttcaatttaccangccaagtcctaactgtaggcttangcaagggccagcaatgcacgtatntttcaaggagcttcgtctgtgctctganaactgggtcttgcacaggtgganaaacaggtaggcagttcanttctgctcatggccatttagggaggnggttcnatacctaaaggggcctactgntccaaaagcaaccccatttnagcntgttcagacggttccaaggtccntggaaataaaattttccgttttgggttanaccccactanctttgttttgccngnccttggaaacgntttggtt

SEQ ID NO: 8615 - DNA, 427 bp, Homo sapiens
  misc_feature 4, 427: n = A,T,C or G
ctancactacttagggcgaattggagctccaccgcggtggcggccgcccgggcaggtacgcggggcgcaatcccgatggaataaatctagcacccctgatggtgtgcccacactttgctgccgaaacgaagccagacaacagatttccatcagcaggatgtgggggctcaaggttctgctgctacctgtggtgagctttgctctgtacctcggccgctctagaactagtggatcccccgggctgcaggaattcgatatcaagcttatcgataccgtcgacctcgagggggggcccggtacccagcttttgttccctttagtgagggttaattgcgcgcttggcgtaatcatggtcatagctgtttcctgtgtgaaattgttatccgctcacaattccacacaacatacgagccgggagcataaagtn

SEQ ID NO: 8616 - DNA, 601 bp, Homo sapiens
  misc_feature 22, 31, 33, 41, 76, 93: n = A,T,C or G
gccccgcgtccgggcccacagnaacacccangnccaaaagnatagaaagtttagaaagggcagttatctcaacagnaccgatgctcgcaaagnaggccgctgttctctgcagcaaagagcctcatacattcgcaagggattttttcatccttaggagacctgagtcctcaagaaaaccctcttctggaagtagttgctccttcagaacgttttacagaaaacactaatgtaaaagacacaactaatgtaaaagacacaaaagagatgtgttcaaagacacatctctgaaaacacaaactacaatcatcctcctgaggcagtttccgctgggactgcattcaacttagaaccaactgttaaacaaactgagacaaaatgggaatacaacaatgtgggcattgacttgtcccctgagcccaaaagcttcaattacccattgctctcgtccccaggtgatcagcttgaaattcagctaaccgagcagctacggtccctcatccccaacgaggatgtgagaaagttcatgtctcatgttatctggaccttgaaaatggaatgttcagaaacacatgtgcaagggagctgtgccaagctcatgtca

SEQ ID NO: 8617 - DNA, 465 bp, Homo sapiens
  misc_feature 2, 3, 35, 234, 257, 272: n = A,T,C or G
gnnagctatcactacttagggcgaattggagctcnccgcggtggcggccgtcgctcccctgctcctccttggtggctctgtttggagacagggcaggtgaatgctccctggatctgttgctctttttccttcagccttcgggctgacactgactccagctttaattcataaagtaaatatccccgcgttctgcccgggcggccgctttaaaaactagtggatcccccgggctgnaggaattcgatatcaagcttatngataccgtcgacctngagggggggcccggtacccagcttttgttccctttagtgagggttaattgcgcgcttggcgtaatcatggtcatagctgtttcctgtgtgaaattgttatccgctcacaattccacacaacatacgagccgggagcataaagtgtaaagcctggggtgcctaatgagtgagcctaactcacattaatttgcgt

SEQ ID NO: 8618 - DNA, 676 bp, Homo sapiens
  misc_feature 1, 2, 3, 4, 5, 6, 7, 9, 10, 14, 19, 21, 25, 29, 33, 34, 35,57, 65, 138, 391, 446, 460, 473, 475, 504, 506, 513, 515,530, 534, 554, 557, 562, 564, 566, 568, 580, 584, 585, 588,589, 601, 602, 607, 614, 619, 624, 626, 627, 634, 643: n = A,T,C or G
  misc_feature 650, 652, 653, 655, 660, 668, 674, 675: n = A,T,C or G
nnnnnnncnnactncactntnaggncgantggnnnctccaccgcggtggcggccgcngcacagantagtgccttgtgcaggtaaatttctcatcccagcactctgcagtggtatttttttcactgagggagagcaagnaaagccaggctaggcgtccccgcgtacctgcccgggcggccgctctaggaactagtggatcccccgggctgcaggaattcgatatcaagcttatcgataccgtcgacctcgagggggggcccggtacccagcttttgttccctttagtgagggttaattgcgcgcttggcgtaatcatggtcatagctgtttcctgtgtgaaattgttatccgctcacaattccacacaacatacgagccgggagcataaagngtaaagcctggggtgcctaatgagtgagctaactcacattaattgcgttgcgctnactgcccgcttttncagtcggggaaancntgtccgtgccagctgaattaatgaaatcngncaacgcncngggagaggcggtttngggntattgggcacctttttcccnttncctcngntnantgacttcgttgncctnnggnncgttcgggttgnngggangcggganttaanctaantnnaatgggngaaaataanggttatncnntnaatcnggggggtnaccgcnng

SEQ ID NO: 8619 - DNA, 361 bp, Homo sapiens
  misc_feature 15, 21, 25, 26, 29, 30, 33, 58, 59, 242, 243, 245, 247, 249,266, 268, 279, 281, 282, 283, 285, 286, 287, 289, 290, 296,297, 311, 312, 313, 324, 325, 326, 329, 331, 343, 344, 351,352, 353, 361: n = A,T,C or G
accgtataacctacntcactntganngtnnacnttgggccctctaattgcatgctcgnnccggccgccagtgtgatggatatctgcagaattcggcttctaatacgactcactatagggctcgagcggccgcccgggcaggtaccttttttttttttttttttttttttttttttttttttttttttttttttttttttttttttttttttttttttttttttttttttttttttttttttnnanananaaaaaattttttttttnanaaaaaaaaaanannntnnntnncccccnnaaaaaaaaaaaaannnttttttttttnnnccncngggggggggggnnttttttnnnaaaaaaan

SEQ ID NO: 8620 - DNA, 794 bp, Homo sapiens
  misc_feature 653, 674, 687, 717, 721, 729, 730, 731, 732, 733, 734, 735,736, 737, 738, 739, 740, 741, 742, 743, 744, 745, 746, 747,748, 749, 750, 751, 752, 753, 754, 755, 756, 773: n = A,T,C or G
gctatcgactactatagggcgaattggagctccccgcggtggcggccgcccgggcaggtacgcgggatggaaactggggaaacatgcataagtgccaatcctttgaatgttccacggaaacactggtggacagattctagtgctgagaagaaacacgtttggtttggagagtccatggatggtggttttcagtttagctacggcaatcctgaacttcctgaagatgtccttgatgtgcagctggcattccttcgacttctctccagccgagcttcccagaacatcacatatcactgcaaaaatagcattgcatacatggatcaggccagtggaaatgtaaagaaggccctgaagctgatggggtcaaatgaaggtgaattcaaggctgaaggaaatagcaaattcacctacacagttctggaggatggttgcacgaaacacactggggaatggagcaaaacagtctttgaatatcgaacacgcaaggctgtgagactacctattgtagatattgcaccctatgacattggtggtcctgatcaagaatttggtgtggacgttggccctgtttgctttttataaaccaaactctatctgaaatcccaacaaaaaaatttaactccatatgtgttcctcttggtctaatcttgtcnaccagtgcaagtgacccgacnaaaattccagttnttattttccaaatgttttgggaaaccagtnttantttgcccnnnnnnnnnnnnnnnnnnnnnnnnnnnnggtcccttgggccggtntaaaactaagtggatccccct

SEQ ID NO: 8621 - DNA, 669 bp, Homo sapiens
  misc_feature 3, 5, 13, 20, 25, 247, 293, 294, 295, 296, 297, 298, 299,300, 301, 302, 303, 304, 305, 306, 307, 308, 309, 310, 311,312, 313, 314, 315, 316, 317, 318, 320, 323, 324, 326, 328,329, 330, 331, 332, 333, 334, 335, 336, 337, 338, 339: n = A,T,C or G
  misc_feature 340, 341, 342, 344, 346, 347, 348, 350, 351, 352, 353, 354,355, 356, 357, 358, 359, 360, 361, 362, 363, 364, 365, 366,368, 369, 372, 373, 374, 376, 377, 378, 379, 380, 381, 382,383, 385, 388, 389, 390, 391, 392, 393, 396, 398, 401: n = A,T,C or G
  misc_feature 403, 405, 411, 412, 414, 415, 416, 418, 420, 422, 423, 424,425, 432, 433, 436, 440, 441, 442, 443, 444, 445, 446, 448,451, 457, 458, 460, 461, 462, 463, 464, 466, 467, 468, 469,470, 475, 477, 480, 481, 482, 483, 484, 485, 486, 487: n = A,T,C or G
  misc_feature 488, 489, 491, 492, 494, 495, 496, 497, 499, 501, 502, 503,504, 505, 506, 511, 512, 514, 517, 518, 519, 520, 523, 524,526, 527, 529, 530, 531, 532, 534, 535, 542, 545, 550, 552,553, 556, 558, 561, 565, 566, 570, 571, 572, 574, 575: n = A,T,C or G
  misc_feature 576, 578, 579, 582, 586, 588, 589, 590, 591, 594, 597, 598,600, 601, 605, 608, 611, 612, 613, 614, 615, 619, 621, 622,625, 626, 628, 629, 630, 631, 635, 636, 638, 645, 646, 650,651, 652, 654, 655, 657, 660, 661, 663, 664, 667, 668: n = A,T,C or G
gtnanacgcactncactctnagggncgaaattggaatctccaccgcggtggcggccgcagtactttttttttttttttttttttttttttttggttttttacatcaccatgcaggttacattcatcttccactgggaatgactagagccctccaggtagtagcctgactacagaagaacacaggactggctcctgggggcaaacaggctctcttgcttctcctcattggccatgccttagcatgggntcctccctatctcctactcaagcaggtcctcagtacctgcccgggnnnnnnnnnnnnnnnnnnnnnnnnnngnggnngngnnnnnnnnnnnnnnngnannngnnnnnnnnnnnnnnnnngnnggnnngnnnnnnnngntgnnnnnnggntnggngnangggggnnannngngngnnnnttttttnnttngttnnnnnnntngtngggaanntnnnnngnnnnntttgntnagnnnnnnnnnngnngnnnngngnnnnnnggtgnngnggnnnnacnngnntnnnngnntgtgttntcnagggngnntgngnttngtgnncttnnngnnnanngangggngnnnngantgnngnngggnggngtnnnnngagntnnagnngnnnnggtnngngggtggnncgtnnntnngngtnntnngtnng

SEQ ID NO: 8622 - DNA, 552 bp, Homo sapiens
  misc_feature 3, 4, 7, 82, 97, 112, 273, 287, 295, 299, 376, 426, 440,444, 448, 491, 502, 505, 506, 509, 521, 523, 526, 532, 535,536, 537, 542: n = A,T,C or G
gcnnganccatcccgaatccggcgaattgggccctctagatgcatgctcgagcggccgccagtgtgatggatatctgcaganttcggctttcgtggncgcggccgaggtttnttttttttttttgctctagagggggtagagggggtgctatagggtaaataccgggccctatttcaaagatttttaggggaattaattctaggacgatgggcatgaaactgtggtttgctccacagatttcagagcattgaccgtagtatacccccggtcgngtagcggtgaaagnggtttggnttangaccgtccgggaattgcatctgtttttaagcctaatggggggacagctcatgagtgcaaagaccgtcttggggatgnaattattataccaatgggggcttcaatcgggaagtactactcgattgtcnaccgcaaaggagcnccanggcnccccggttctaagaataatgggggaaggatgtaaggaatttgnaaaaaataagnccnnccnaaatccgggggncnccnaagggntcnnnacccnttgggggcct

SEQ ID NO: 8623 - DNA, 631 bp, Homo sapiens
  misc_feature 5, 7, 12, 13, 17, 27, 79, 92, 383, 557, 625: n = A,T,C or G
tgtgnanaaaannaaanctgaataagnataagctccttccctacattatatttgcagacgggaaataaacaggcctagnaaattacacaagnagcacaaatgaagaggaagggaagtcacaagagaagaaggatgcggtcacaaacttaaccagtgctcttatttttcccttctcagggaaaaacaccagaagaagctggggttttatattcattggatggaaacagatatttctcctgggaattctcccaaccaaatagcccttttctattaggctgtgtctgcacatccacaagaggaaagtctataggactgattagttttcacaatcccaaaaaaaaaaaaaaaaaaaaaaaaagtacctgcccgggcggccgctctanaactagtggatcccccgggctgcaggaattcgatatcaagcttatcgataccgtcgacctcgagggggggcccggtacccagcttttgttccctttagtgagggttaattgcgcgcttggcgtaatcatggtcatagctgtttcctgggtgaaattgttatccgctcacaattnccacacaacatacgagccgggagcataaagtgtaaagcctgggggtgcctaatgagtgagctacctcncttaac

SEQ ID NO: 8624 - DNA, 639 bp, Homo sapiens
  misc_feature 2, 3, 4, 5, 6, 7, 9, 10, 13, 17, 19, 20, 23, 27, 31, 32,52, 62, 79, 84, 94, 123, 138, 148, 569: n = A,T,C or G
cnnnnnncnnatncatntnnggncgantggnnctccccgcggtggcggccgnggtacttcgncaacttgggtgtaaagnagggnaaaaactggnaacagcaaccaagcaaccgacataatggnaaacatcagggtggnaagtccatgnattcagtctcaccctcatttagtagcagaagcctttcgagcactagcatctgcacagtgtccacagtttggcattccacgcaaacggctaaaacagtcctgaaatcttccatgaacagttgaaaaatggaattgactttcactcctccaggtccagaaggattctaatacacaaaccataagcaagagttgtttctgttattttgtccacagaacagaagctgaaaaagcatattgcttgcatttcaggtggataatttatggtttattcttcagctttaaattagactgattaattcacttcaaggccttaaattatcttcaatgacttctcttgttcatataatactttaatttttttttattgtgccttgtcattttgaccaaggctatgcaggattgcactagctccataatgcagnaatattgataactgaagatactaagtttcaaaaggatcttccattattttgcaaaaaaaaaaaaaaaaac

SEQ ID NO: 8625 - DNA, 402 bp, Homo sapiens
  misc_feature 4: n = A,T,C or G
actncttagggcgaattggagctccccgcggtggcggccgcccgggcaggtacgcggggagtcctgaaagggtgggcaaatgtgcagctctccctcagggtcgtgggatctgggtccaacagtctggcctttcagccttcaggctgttttaggcttgaagtttcgtgtggctgatcaaagaaagaaggcatacgcagatttctacagaaactacgatgtcatgaaagattttgaggagatgaggaaggctggtatctttcagagtgtaaagtaatcttggaatataaagaatttcttcaggttgaattacctagaagtttgtcactgacttgtgttcctgaactatgacacatgaatatgtgggctaagaaatagttcctcttgataaataaacaattaact

SEQ ID NO: 8626 - DNA, 887 bp, Homo sapiens
  misc_feature 2, 9, 12, 516, 536, 565, 583, 597, 685, 693, 702, 707, 724,726, 727, 740, 748, 752, 755, 756, 761, 764, 769, 774, 786,789, 792, 793, 794, 795, 796, 798, 801, 805, 810, 811, 813,814, 817, 818, 819, 828, 829, 830, 832, 833, 834, 835: n = A,T,C or G
  misc_feature 843, 845, 846, 849, 850, 851, 852, 853, 854, 856, 857, 859,861, 863, 864, 865, 868, 876, 885, 886: n = A,T,C or G
angccgtangcncgtaatacgactactatagggcgaattggagctccccgcggtggcggccgaggtactttttttttttttttttttttttttaggaaagagacagggtctcgcaatgttgtccaggctggtcttgaacaatcctcccacctctgcctgccaagtaactgggattataggaatgagccatcatgcctggctcaaatatactccattataatcatatgggaccctgtcctatatggggtctgtcactaactgaatcatcgttatgcagcacatgactgctatgtgtatatatgtatttatttataagaaataaatattacataccagaattttacagttttgtcctctaactctttggaatgctaaaggacagacacttgtctttttaaatacccccattgtacctgcccgggcggccgctctagaactagtggatcccccgggctgcaggaattcgatatcaagcttatcgataccgtcgacctcgagggggggcccggtacccancttttgttccctttagtgangggttaattgcgcgcttggcgtaatcatnggcatagcttgtttctgngtgaaattgttatnccgttaacaatttcacacaacataccaaccgggaagcattaaagttgtaaaaaccctgggggtgcctaaatgaggtgaagctaactcncattaaantgccgttgnccctnactgccccgctttccantnngggaaacctgtcngccaactncatnaannaaatncgnccaanccccngggaaaggccgnttnccnnnnngngcncttnttacnntnnttnnnaattgactnnntnnnntagccatntnnttnnnnnnanngnantnnnttnatttcaangcggaatannc

SEQ ID NO: 8627 - DNA, 606 bp, Homo sapiens
  misc_feature 3, 10, 19, 73, 581: n = A,T,C or G
ggngttaagnaggatctgnagtcgctgcctggctctgtgggcggcccctttagactcaggtgagctcagccgncccgctgcgccaggcttgaatcaaaggtgtcagcaagctagatgtcaaaacatttcgagagagaggcagcttgcagaaaagcagaaaggttgaattcaggggtcagcaaactatggcatgtggccccgtgagctaggaatggtttttcctctttaagacagggcctggctctgtcacctaggctggagtacagtagtgcaatcatgactcactgcagcatcaacctccctggctcaagcgatggcttttacctttttaaggagttgtaaaaaaaaaaaaaaagggcggccgctagactagtctagagaaaaaacctcccacacctccccctgaacctgaaacataaaatgaatgcaattgttgttgttaacttgtttattgcagcttataatggttacaaataaagcaatagcatcacaaatttcacaaataaagcatttttttcactgcattctagttgtgggtttgtccaaactcatcaatgtatcttatcatgtctggatccccnggtaccgagctcgaattaattccta

SEQ ID NO: 8628 - DNA, 905 bp, Homo sapiens
  misc_feature 459, 462, 475, 498, 530, 538, 545, 549, 555, 556, 558, 559,561, 563, 565, 572, 576, 583, 586, 590, 591, 595, 602, 608,621, 633, 634, 635, 638, 639, 642, 643, 645, 648, 649, 651,661, 668, 671, 672, 673, 677, 680, 683, 687, 691, 692: n = A,T,C or G
  misc_feature 695, 697, 704, 705, 706, 707, 708, 710, 715, 719, 726, 730,734, 735, 742, 744, 747, 749, 751, 764, 765, 769, 771, 772,776, 784, 793, 794, 795, 802, 807, 808, 811, 812, 813, 814,817, 820, 825, 828, 840, 842, 844, 846, 848, 850, 852: n = A,T,C or G
  misc_feature 853, 855, 856, 857, 863, 867, 868, 870, 874, 879, 880, 882,883, 896, 897, 901: n = A,T,C or G
tataggggcgaattggagctccacccgcggtggcggcccgtaatctcgcagaagcatcatcccgccaggtttcagaagcctgctcagcctgttgatagccttctgcatcttgtctggaacaattgctgaaagaacaaatatgagaatgataatatcaagactgcccttgggcactgggtaactcttctcttcatcacacaggtcgtgaacaaaggcaaaacaccgagaaggatcatattctgaatttgtctggaccagttctatagctgtggaagaaaaatcacagcaataaacaaagagtcctgggtcattgttcgtttgtaaaattggaaagactgtgtttcccacaccacagccaacctccagtacctcggccgctctagaactagtggatccccccgggctgcaggaattcgatatcaagcttatcgataccgtcgacctcgagggggggccccngtncccagctttgttncctttagtgaaggggttaattgncgcgccttggcggtaattcaagggccatagcnggttttcntggtgtngaanttggtnntnncncntnacaaatncccncacaagnttnccgnncccnggaagcntaaagntgggaaaaccctngggggtgccctnnnaanncgnntnctnncncccctttaanatggggncgnnncccnctnggncccntttnnagncnggagaannnnntngtggncacnctgcctntatnaganntgccaancnacncngngagaaggcgagtnnggcntnntganaacccttntcccctttnnngtttacntgacnngtnnnngcncangagtntangtgatgtggtgngntntnantngnntnnnagtagncagnngnctgncttcnncnnttcagaagagagnngagnacac

SEQ ID NO: 8629 - DNA, 658 bp, Homo sapiens
  misc_feature 395, 399, 403, 405, 406, 408, 410, 415, 417, 422, 432, 433,434, 436, 443, 445, 451, 455, 456, 460, 461, 464, 465, 467,469, 471, 473, 492, 502, 510, 512, 520, 527, 535, 538, 541,546, 547, 550, 567, 572, 573, 596, 598, 599, 603, 617: n = A,T,C or G
  misc_feature 629, 647, 655, 656: n = A,T,C or G
tatagggcgaattggagctccaccgcggtggcggccgcccgggcaggtactagaggtaaatttttaataacatactaatgtgaaatggtatctggtttttattcagactttttgtgagcatattcttatagacactagaaataaatacatagaaggagactttgagcacaagggagaagagagttattagcactcctgaggcctctggaatgctgcttttctatccaggtatcttgcttgctaccagcagaattgactggtattggttctcactggccagggagcctctgctctgttcctggaatataaggcttttattcaggagcaaatcattgatagtaactttgctttatctagccattgacttcagcaaaaaaaaaaaaaaaaaaaaaagnaccntggncnntntnaaacnangggancccccgggcnnnangaattcnanatcaancttnncgannccnncnancntnagggggggcccgggacccnacttttggtncctttaangnggggtaantggcgcncctggcgnaancangggcnnagntggttcctgggggaaantggtnntcgctcacaaattccaacaacanannaagnccgggagcctaaangggtaaagcctnggggggcctatgaggganctaactcnnat

SEQ ID NO: 8630 - DNA, 716 bp, Homo sapiens
  misc_feature 3, 5, 8, 10, 11, 13, 16, 549, 617, 648, 654, 665, 670, 703,711: n = A,T,C or G
ggncnatngnntntcnacgccccgatcagagaggggtgcaagatcctgatttttcaggagttcaagcgacaatggcagcccaatacggcagtatgagcttcaaccccagcacaccaggggccagttatgggcctggaaggcaagagcccagaaattcccaattgagaattgtgttagtgggtaaaaccggagcaggaaaaagtgcaacaggaaacagcatccttggccggaaagtgtttcattctggcactgcagcaaaatccattaccaagaagtgtgagaaacgcagcagctcatggaaggaaacagaacttgtcgtagttgacacaccaggcattttcgacacagaggtgcccaatgctgaaacgtccaaggagattattcgctgcattcttctgacctccccagggcctcatgctctgcttctggtggttccactgggccgttacactgaggaagagcacaaagccacagagaagatcctgaaaatgtttggagagagggctagaagtttcatgattctcatattcacccggaaagatgacttangtgacaccaatttgcatgactacttaagggaagctccagaagacattcaagacttgatggacattttnggtgacccgctactgtgcgttaaacaacaangaacangcgctgagcangaagnccaaaggcacagttgctgggcctgatcccagcncgtggganggaga

SEQ ID NO: 8631 - DNA, 644 bp, Homo sapiens
  misc_feature 5: n = A,T,C or G
tttancctcctaagggaacaaagctgggtaccgggccccccctcgggtcgacggtatcgataagcttgatatcgaattcctgcagcccgggggatccactagttctagagcggccgaggtactttttctgacatgatgaggcagagaaaggtgaggtgggcgcatcctgtgcatatgattttctcaggtgatgggaatatggtcggctcttgcctaatgggatatattttctctttgagtgatttggcaagatatcagatgagagaagttgaataaatgttagaagaacatagaaaaaataggttatacacgttgggtttctgaagaaatgatgtctttggagaaacaaaacttttattgatttctggaaacatttagggccaattttttatgtaaataatttgaatttatgatgatatctctgaccactttttgatttttttttctggttcaggtgagtggtgtcattgagcaaacacgaagtcgggctcatccaaggatgagattttgccagagaaaggacgagcagcaagtcagggagcttaaggatggagtcttgctctgttgtccaggcaggagtgccatggcacgatcttggctcactgcagtctctgcctcttgagttccagtaattctcctgcctc

SEQ ID NO: 8632 - DNA, 641 bp, Homo sapiens
  misc_feature 22, 351, 405, 479, 609, 624: n = A,T,C or G
gactcctatagggcgaattggngctccaccgcggtggcggccgaggtactttttttttttttttttttttttttctcacgtcttggaatatcttgaatttaaactagtaattcagctcctcttcagcactcacaatatagtctgttgccaatgcctgatgagacacatagcttatgaccattgcacttctctttttttccatggtttgcatttaggaggtaattttcttcagctactagaggatatccttcctcatcaatttagagaaatatttggtcaaatgatttttaaataaaaaacggttcttaccttctaattttccatttattttatctatttctttttgatgcncagccttgggtaaacacacatccttctgtgaaacagtctcacagagactctcanaatcccaagaactttcttcatagtccttttgtttggattctgatgggagtatctcatctgctctcaatgtttgntcattcttcaattccaaggctttatttggaacagacttttgcatttcaatggcaggctcgaaggcagatggcttctcgggaggctctgctttgaaaggttgcatgtccatcaattctaaggctttagttnggaatagaaactttnattccgcagttgccctc

SEQ ID NO: 8633 - DNA, 616 bp, Homo sapiens
  misc_feature 457, 476, 477, 484, 491, 501, 512, 533, 545, 561, 562, 563,578, 579, 588, 591, 597, 598, 599, 611, 615: n = A,T,C or G
cctcctaagggaacaaaagctgggtaccgggccccccctcgggtcgacggtatcgataagcttgatatcgaattcctgcagcccgggggatccactagttctagagcggccgcccgggcaggtactacatcaacagtgactatgtcaacatccagtgttactagcagcagcaatgtagctacagcaacaatagttttatcagttggtcaatctttaagtaacactttaaccaccagcctcacatcaacttccagtgagagtgacacaggtcaggaagcagaatattccttatatggtaagttgtaatttaaaatgaaagtatttagatactttcataatgatgcttttattatgttttctcctgatattttaaactttggttttaagagaattattctctcttcttataaatatgaaatcttcggccaggcacagtagctacacctgtattccagcntttgggaggcccaggcagnnggatcanttgaggncaggaattcngaccagcctgnccacatggtaaaacccctttntccttaaattcnaagaaaatttttcggnnnggggggccccccctnnattccgctnccngggggnnnggcaaaaaattntttng

SEQ ID NO: 8634 - DNA, 911 bp, Homo sapiens
  misc_feature 608, 686, 695, 715, 727, 735, 761, 805, 845, 858, 865, 867,872, 882, 883, 888, 892, 910: n = A,T,C or G
cgcgtatacgactcactataggggcgaattggagctccaccgcggtggcggcccgcccgggcaggtaccaaagagggcataataatcagtctcacagtagggttcaccatcctccaagtgaaaaacattgttccgaatgggctttccacaggctacacacacaaaacaggaaacatgccaagtttgtttcaacgcattgatgacttctccaaggatcttcctttggcatcgaccacattcaggggcaaagaatttctcatagcacagctcacaatacagggctcctttctcctctacaaatccaatgtaggccattgtatttttgcagtgagcgcagttgaattcttctgggtgccaagatttccccagtgccactaagaatggtcctctgacagaagaaaaagaggccaactaagtttgagaataaaatttctagagttagcctggatatggacctcttttatgcaatgtccaaccaattaaatacttgctcaattttccttcttaaggactgaactcatgggtgttgggtgttgtaaattcacagagggactctgcattcccgcgtacctcggccgctctagaactagtggatcccccggctgcangaattcgatatcaagcttatcgataccggcgacctcgaagggggggccccggtcccaacttttggttcctttaatgangggtaaatngcccccttggcgtaatcatnggccatagctgntttcctgnggggaaaatggtatccgttacaattncccacaacatacaaccgggaaccttaaagtgtaaagcccggggngccttaatgagtgggctaacctcccattaaatgggttggngcctactggcccnttttcangnggggnaaacctggcnngccancttnattaatgaaatcggccant

SEQ ID NO: 8635 - DNA, 751 bp, Homo sapiens
  misc_feature 625, 631, 666, 687, 705, 735, 737, 745, 747, 750: n = A,T,C or G
gctgcagcagtgagcccaaggacagaccctccttccaggaatgcctaccaaaaactgatgaagtcttccagatggtggagaacaatatgaatgctgctgtctccacggtaaaggatttcctgtctcagctcaggagcagcaataggagattttctatcccagagtcaggccaaggagggacagaaatggatggctttaggagaaccatagaaaaccagcactctcgtaatgatgtcatggtttctgagtggctaaacaaactgaatctagaggagcctcccagctctgttcctaaaaaatgcccgagccttaccaagaggagcagggcacaagaggagcaggttccacaagcctggacagcaggcacatcttcagattcgatggcccaacctccccagactccagagacctcaactttcagaaaccagatgcccagccctacctcaactggaacaccaagtcctggaccccgagggaatcagggggctgagagacaaggcatgaactggtcctgcaggaccccggagccaaatccagtaacagggcgaccgctcgttaacatatacaactgctctggggtgcaagttggagacaacaactacttgactatgcaacagacaactgnctttgnccacatggggctttggcaccttcgggcaaggggangggcttgcaagcaccccccancagtaggttcgcaagaanggccttaaagatcctgaagccttgaagcangncacaaggntngtnt

SEQ ID NO: 8636 - DNA, 463 bp, Homo sapiens
  misc_feature 3, 387, 397, 425, 427, 438, 447, 452, 453: n = A,T,C or G
ggnggcccgtatcactacttagggcgaattggagctccccgcggtggcggccgaggtacaagttcctaggcaggtcccagcacactcataataagtgtgatacaacagggttttagtcatgatgttccccgaccacgtagtgtgggtgcagtggaggcatccctcccagggttctccttttaacatggataaggggagtagcaagaacaaagtgatgagtagcatgttcatacccagcatggacagaaaaggctttttcctggggggagaaggctaagcaaagtgacagcttaatagcaaagtaattaatatgacaaggaaaattactggacttcagatttctaaccacatttacttccctgatgatgactcaagcttcggccgctntaaaactagnggatcccccgggctgcaggaattcgatntnaaagcttatcnataccgtcnacctnngagggggggc

SEQ ID NO: 8637 - DNA, 862 bp, Homo sapiens
  misc_feature 3, 5, 6, 7, 13, 15, 634, 765, 785, 788, 842: n = A,T,C or G
atntnnnggagtnantgtatacgactcctatagggcgaattgggccctctagatgcatgctcgagcggccgccagtgtgatggatatctgcagaattcgccctttcgagcggccgcccgggcaggtacgcggggaggcattgaggcagccagcgcaggggcttctgctgagggggcaggcggagcttgaggaaaccgcagataagtttttttctctttgaaagatagagattaatacaactacttaaaaaatatagtcaataggttactaagatattgcttagcgttaagtttttaacgtaattttaatagcttaagattttaagagaaaatatgaagacttagaagagtagcatgaggaaggaaaagataaaaggtttctaaaacatgacggaggttgagatgaagcttcttcatggagtaaaaaatgtatttaaaagaaaattgagagaaaggactacagagccccgaattaataccaatagaagggcaatgcttttagattaaaatgaaggtgacttaaacagcttaaagtttagtttaaaagttgtaggtgattaaaataatttgaaggcgatcttttaaaaagagattaaaccgaaggtgattaaaagaccttgaaatccatgacgcanggagaattgcgtcatttaaagcctagttaacgcatttactaaacgccagacgaaaatggaaagattaattgggagtggtaggatgaaacaatttggagaagatagaaagtttgaagtggaaaactgggaanacagaagtacctttggccgngancacgcttaagggcgaattccacacactgggcggccgttactaatggatccgaanctcggtaccaaagcttggct

SEQ ID NO: 8638 - DNA, 492 bp, Homo sapiens
  misc_feature 3, 6, 489: n = A,T,C or G
ggngantcggtgcgccccgcgtccgcaaacagacatctttgaaggtagtgggtcagtaaccagcacaacattaatagaaattttaagtgacactggagcagaaggacccacggtggcacctctccctttctccacggacatcggacatcctcaaaatcagactgtcaggtgggcagaagaaatccagactagtagaccacaaaccataactgaacaagactctaacaagaattcttcaacagcagaaattaacgaaacaacaacctcatctactgattttctggctagagcttatggttttgaaatggccaaagaatttgttacatcagcaccaaaaccatctgacttgtattatgaaccttctggagaaggatctggagaagtggatattgttgattcatttcacacttctgcaactactcaggcaaccaggacaaggaaagcagcaccaccatttgttttctgatggggtcccttggaaaaaacatnctg

SEQ ID NO: 8639 - DNA, 684 bp, Homo sapiens
  misc_feature 19, 416, 434, 449, 459, 475, 486, 508, 510, 517, 531, 532,537, 539, 543, 561, 575, 588, 590, 596, 601, 603, 610, 617,620, 622, 624, 625, 630, 636, 640, 642, 644, 652, 654, 656,659, 663, 664, 669, 670, 677, 680: n = A,T,C or G
cactatagggcgaattggngctccaccgcggtggcggccgaggtactttttttttttttttttttttttggaatgtaaatcttttattaaaacagttgtctttccacggtagtaaagctttggcacatacagtataaaaaataatcacccaccataattataccaaattcctcttatcaactgcatactaagtgttttcaatacaattttttccgtataaaaatactgggaaaaattgataaataacaggtaagagaaagatatttctaggcaattactaggatcatttggaaaaagtgagtactgtggatatttaaaatatcacagtaacaagatcatgcttgttcctacagtattgcgggccagacacttaagtgaaagcagaagtgtttggggtgacttttcctacttaaaanttttgggcatccccgcgnaccttgggccggttntagaactagngggatcccccggcttnaggaattcganttaaagcttattcaaacccgcnancctcganggggggggccgggnncccancntttnggttcccttttagggggngggtaaattgggcnccttggggggaancnatgggnaaagncnggtttcntgggggnaantngnnttccnttccantttncnanaaaaaaancnanccngggnnaaaannggttaanccngggg

SEQ ID NO: 8640 - DNA, 515 bp, Homo sapiens
  misc_feature 3, 7, 15, 44, 509: n = A,T,C or G
ggngttngaaccggntgtcgaccccgcgtccgggtccccttccncgtctccatttctttatgcctggctttgcccctctcaccagccgtggaagccagcagtatcgagctctcacagtgccggaactcacccagcaggtcttcgatgccaagaacatgatggctgcctgtgacccccgccacggccgatacctcaccgtggctgctgtcttccgtggtcggatgtccatgaaggaggtcgatgagcagatgcttaacgtgcagaacaagaacagcagctactttgtggaatggatccccaacaatgtcaagacagccgtctgtgacatcccacctcgtggcctcaagatggcagtcaccttcattggcaatagcacagccatccaggagctcttcaagcgcatctcggaagcagttcactgccatgttccgcggaaggccttcctcactggtacacagggcgagggcatggacgaatggagttcaccgaggctgagagcaacatgaacncctcgt

SEQ ID NO: 8641 - DNA, 487 bp, Homo sapiens
  misc_feature 2, 240, 286: n = A,T,C or G
gncgcgtatcatacttagggcgaattggagctccccgcggtggcggccgaggtacacgggaggtgtgctgtgtgtgaggcgcctgccatggtgatggccgtgcacagccagaccattcagatcccaccgtgccccagcgggtggtcctcgctgtggatcggctactcttttgtgatgcacaccagcgctggtgcagaaggctctggccaaagcccctggccgtcccccggctcctgcccnggaggaagttttagaaagtgcgccattcatcgagtgtcacggccgntctagaactagtggatcccccgggctgcaggaattcgatatcaagcttatcgataccgtcgacctcgagggggggcccggtacccagcttttgttccctttagtgagggttaattgcgcgcttggcgtaatcatggtcatagctgtttccttgtgtgaaattgttatcccgctcacaattccacacaacatacgagccggg

SEQ ID NO: 8642 - DNA, 719 bp, Homo sapiens
  misc_feature 20, 113, 262, 270, 276, 279, 285, 286, 289, 290, 295, 297,303, 311, 320, 325, 329, 337, 348, 356, 357, 358, 367, 369,371, 374, 375, 377, 378, 379, 384, 394, 403, 410, 414, 416,417, 426, 431, 432, 434, 435, 437, 439, 440, 442, 443: n = A,T,C or G
  misc_feature 445, 447, 448, 450, 451, 452, 461, 463, 464, 466, 467, 472,473, 474, 475, 481, 483, 484, 489, 490, 491, 493, 497, 500,502, 503, 504, 509, 511, 516, 517, 518, 519, 525, 526, 530,534, 535, 537, 538, 544, 545, 548, 549, 552, 553, 556: n = A,T,C or G
  misc_feature 559, 560, 561, 562, 563, 569, 572, 575, 578, 579, 582, 587,591, 593, 596, 600, 604, 606, 607, 608, 609, 610, 618, 622,624, 628, 629, 630, 631, 634, 635, 636, 640, 641, 644, 646,653, 654, 656, 660, 670, 671, 672, 684, 685, 686, 688: n = A,T,C or G
  misc_feature 691, 693, 694, 697, 700, 701, 702, 705, 707, 709, 710, 712,713, 718: n = A,T,C or G
tcactatagggcgaattggnactccaccgcggtggcggccgagtacttttttttttttttttttttttttggctgcaaagaagctttaaaaatatattgttttagtccaaagnatacccctggcacaagcgacaataatattacaggggacattaaattaaggaaagaaccaactgatatgtgtctatgagagaagagctacagggtgaggaactgggaacaaaggaggaagacactattagcaagcactggggccctcctngattgacntggggnaanatgagnncanncgggngngatatnggggtggnagtggggcnggagnaagncagggggntggcgtagggnaggggagnnnggaggaagngngnggnngnnnggagntgggggcggnggcggccgngcggggnggcnannaggggggcngggcnnanncncnncnnancnnannngctacgttncnncnncggannnngcgggncnnagcgnnngncggntgnannnggtgngncgtcnnnngacctnngggntggnngnnggggcnnganngannatnttnnnnntggccnggnggngtnnggnggccnggangnatngcangggntnnnnntcatttgnggtnanaccnnnngtnnnacannggngnggtgccnngngcanatagacccgnnngagatatcaccnnnangcngnncgngtnnnagngngnngnnggtgng

SEQ ID NO: 8643 - DNA, 608 bp, Homo sapiens
  misc_feature 29, 490, 491, 492, 493, 494, 498, 500, 503, 504, 505, 506,507, 508, 509, 510, 511, 512, 513, 514, 515, 516, 517, 518,519, 520, 521, 522, 523, 524, 525, 526, 527, 528, 529, 530,531, 532, 533, 534, 535, 536, 537, 538, 539, 540, 541: n = A,T,C or G
  misc_feature 542, 543, 544, 545, 546, 548, 549, 550, 551, 553, 554, 555,557, 558, 559, 560, 584, 601: n = A,T,C or G
gccccgcgtccggccgcaccataatgagnatgtgagccttgtgcatgtgggggaggagggagagagatgtactttttaaatcatgttccccctaaacatggctgttaacccactgcatgcagaaacttggatgtcactgcctgacattcacttccagagaggacctatcccaaatgtggaattgactgcctatgccaagtccctggaaaaggagcttcagtattgtggggctcataaaacatgaatcaagcaatccagcctcatgggaagtcctggcacagtttttgtaaagcccttgcacagctggagaaatggcatcattataagctatgagttgaaatgttctgtcaaatgtgtctcacatctacacgtggcttggaggcttttatggggccctgtccaggtagaaaagaaatggtatgtagagcttagatttccctattgtgacagagccatggtgtgtttgtaataataaaaccaaagaaacatnnnnnaaananaannnnnnnnnnnnnnnnnnnnnnnnnnnnnnnnnnnnnnnnnnnnannnnannnannnnggggcggccgctaaactattctanaaaaaaaacctcccccnccttccc

SEQ ID NO: 8644 - DNA, 1044 bp, Homo sapiens
  misc_feature 245, 254, 272, 281, 287, 340, 342, 365, 368, 370, 371, 374,387, 390, 396, 403, 406, 416, 417, 419, 423, 425, 430, 431,432, 433, 463, 466, 477, 478, 480, 482, 483, 484, 485, 491,494, 496, 499, 501, 506, 517, 521, 532, 533, 535, 552: n = A,T,C or G
  misc_feature 553, 554, 556, 558, 562, 563, 564, 565, 568, 580, 581, 584,590, 593, 595, 598, 600, 603, 611, 613, 614, 624, 631, 632,647, 654, 660, 662, 666, 696, 725, 730, 740, 743, 748, 750,761, 762, 771, 773, 774, 776, 777, 784, 786, 788, 809: n = A,T,C or G
  misc_feature 810, 813, 827, 829, 830, 835, 841, 849, 853, 861, 863, 864,877, 886, 887, 890, 901, 908, 910, 911, 917, 927, 928, 933,940, 942, 954, 955, 957, 969, 973, 979, 1004, 1009, 1012,1018, 1019, 1026, 1028, 1031, 1033, 1044: n = A,T,C or G
actcatatagggcgattgggccctctagatgcatgctcgagcggccgccagtgtgatggatatctgcagaattcggctttcgagcggccgcccgggcaggtacagaggggtctgtttctaagtctggaacctcaacacgaggctgggatgcttcacaacgtgctctctcccactgtccagccatctttggtggtcttcccacagtgctttcccccatcctctcacactcctgtggagggaccatngggacgggncaagaggaaactgggatnatctgacanggaacngacaagcacaatgccaagagccagttgctcttggctcagtcttccaatgttantntcaaggttaaaaaagaaactggnaancnncanaatctgtggggcnggnaaaaanccccccnggnggtttttttnntngggntnaaaannnnaaaaaaaatttttttgggggtttttttttnaangggaaattttnntncnnnnccccanacngnaananccccntttaaaaaacnaaanttttttttttnngncttcaaacccccggggnnnantncaannnnaanttttccaagccnnggngtgggnccncnaantncanttgggaangnnttggccaaanagggaannctgggtggggcaaanatttccnaagttntntgcngggcccggaaaggagcttttcaaagggttntggctttggggccagggccaaaaattttngcggnagagaaattnctntccgncntaatgcccccnncaagttctnannannggggggntncncgggaaccccagggggggggnnaantttgggaaaggccngnnaaaancccccnttgggggncccnttgaaaancnnaaggggccccttngcaaggggnnttnaaaaagggggnttttccnannggcaanggcatgggcnngggcntggggantnggcccggtcccnnangggcccccaaangggnggttangcaaccaaccccccccccttccaanggggnccntttttnnaaaaaancnggnancccaaaaaaan

SEQ ID NO: 8645 - DNA, 648 bp, Homo sapiens
  misc_feature 18, 45, 46, 510, 608, 618, 631, 644: n = A,T,C or G
ccatttttcctcactaanggaacaaagctgggtaccgggcccccnntcgggtcgacggtatcgataagcttgatatcgaattcctgcagcccgggggatccactagttctagagcggccgaggtactgtgtgaagctttgtatgggtgacgagagactttgggtctgtggtgctctgtggtccgggataaagttgcgtgtagatgagtcgtttctgtgcttctctgtaaatgaacatctggctcacatattgattccatgtgtgaaaatgagatcagcccatataatgaccagaatcaatcaggcttcagccgaggagtaacatacactggtcttgatttgttagacaaccagaattggcagcaccttgcataatttggcaccaattgacaaagattaggctgtttggggaccctgaatggttattaatttgaaaaccccttatatattttgcagagtaaaatcagccgtaacttatttgttccagcccccttcttctcgtacctgcccnggcggccgccaccgcggtggagctccaattcgccctatagtgagtcgtattacgcgcgctcactggccgtcgttttacaacgtcgtgactgggaaaancctggcgttnccaacttaatcgncttgcagcacatnccct

SEQ ID NO: 8646 - DNA, 438 bp, Homo sapiens
  misc_feature 290, 418, 435, 437: n = A,T,C or G
ggcgaattggagctccaccgcggtggcggccgtgggacctgcaattactacgcaaacgcttacagcttttggctcgccaccatagagaggagcgagatgttcaagaagcctacgccgtccaccttgaaggcaggggagctgcgcacgcacgtcagccgctgccaagtctgtatgagaagaacataatgaagcctgactcagctaatgtcacaacatggtgctacttcttcttctttttgttaacagcaacgaaccctagaaatatatcctgtgtacctgcccgggcggcncgctctagaactagtggatcccccgggctgcaggaattcgatatcaaagcttatcgaataccgtcgacctcgagggggggcccggtacccagctttttgttcccttttagtggagggttaaattgcgncgctttgggccgtaaantna

SEQ ID NO: 8647 - DNA, 634 bp, Homo sapiens
  misc_feature 508, 535, 583, 590, 600, 634: n = A,T,C or G
tatagggcgaattggagctccaccgcggtggcggccgaggtacatttgcattgctataaaataatacctaaggcttggtaatttataaagaaaagaggtttatttggctcatggttctacaggctatatatgaagcataatgctgacatctgcttctgatgaggacatcaggaagcttaaaatcatgttggaggtttaaggggagccagcatatatcacggtgagaaaggagcaagagacagaggggcataccacactctttaaacaaccagattttgcttgaattcagagcaagaactcactcactaccaccaaaacagcatgaatccattcatgaagtatcttcttgcatgactcaaacacctcccatcagcttccaccttcaacaatgggggtcacatttcaacatgagatttggaagggtcaaatatctaaactacatcattcccctccagcccccaacattgcatgctcttctcacattacaaaatataatcatctcttttcnatagtccccaaaagtcttaatttattncagccctccactggaaagtcctaagtcccagtctcatctgaaactcangcaggtncttctacctntgagactgtaaaaaaaaaaaaaaaaaaaaaaaan

SEQ ID NO: 8648 - DNA, 466 bp, Homo sapiens
  misc_feature 1, 14: n = A,T,C or G
nagcctatcgactncttagggcgaattggagctccccgcggtggccggccgcccgggcaggtaccattttatttagtgttgtaggaaatgttgggttacttcttaaaaacgaaaccaaagaaattcaaaagtcccaaagaaagaaagcaggaaataataattctataatccaaaaacgttgggcgatccttcagttggaggaagagggtgtcagttaagtagctcacacagtagatatggagacaccatatggagatacggagttaagtttggtggatactaggaattaagttctccacctaaggcaattaatttttcagccttgagagataattagtagttctagaaaaagaaaaaaagttgactgggagaagggtgggagggagggatggtgccgtcatttaacattaaattgcctctctctacagtatgtggctgagcatcatggaccttcctccctctgccc

SEQ ID NO: 8649 - DNA, 423 bp, Homo sapiens
  misc_feature 4: n = A,T,C or G
ctancactactatagggcgaattggagctccaccgcggtggcggccgcccgggcaggtacttttcccaaaatgctatattgcaattggactggaggctataagtggtctacggctctggctctaagcatcaccctcggtgggtttggagcagaccgtttctacctgggccagtggcgggaaggcctcggtaagctcttcagcttcggtggcctgggaatatggacgctgatagacgtcctgctcattggagttggctatgttggaccagcagatggctctttgtacctcggccgctctagaactagttggatcccccgggctgcaggaattcgatatcaagcttatcgataccgtcgacctcgagggggggcccggtacccagcttttgttccctttagtggagggttaattgcgcgcttggc

SEQ ID NO: 8650 - DNA, 630 bp, Homo sapiens
  misc_feature 8, 21, 123, 172, 216, 259, 264, 298, 315, 338, 342, 353,359, 360, 371, 372, 379, 380, 381, 382, 385, 388, 389, 390,391, 392, 394, 395, 399, 400, 401, 402, 403, 404, 405, 406,407, 408, 409, 410, 411, 412, 413, 414, 416, 417, 418: n = A,T,C or G
  misc_feature 419, 421, 422, 423, 424, 425, 426, 427, 429, 430, 431, 432,433, 434, 436, 437, 439, 440, 441, 442, 443, 444, 445, 446,447, 448, 449, 451, 452, 453, 454, 456, 457, 458, 459, 461,462, 463, 464, 465, 466, 467, 468, 471, 472, 473, 474: n = A,T,C or G
  misc_feature 475, 476, 477, 478, 479, 480, 481, 482, 483, 485, 486, 487,488, 489, 490, 491, 492, 493, 494, 495, 497, 499, 500, 501,502, 503, 504, 505, 506, 508, 509, 510, 511, 512, 513, 514,515, 516, 517, 519, 520, 522, 523, 524, 525, 527, 528: n = A,T,C or G
  misc_feature 530, 531, 532, 534, 535, 536, 537, 539, 540, 542, 543, 544,545, 546, 547, 549, 550, 551, 553, 554, 555, 556, 557, 559,560, 561, 562, 564, 565, 566, 567, 568, 570, 571, 572, 574,575, 578, 579, 581, 582, 586, 587, 588, 589, 590, 591: n = A,T,C or G
  misc_feature 592, 593, 594, 595, 598, 599, 601, 602, 603, 604, 605, 606,608, 610, 611, 612, 614, 615, 616, 619, 620, 624: n = A,T,C or G
tcactctnagggcgaattggnagctccaccgcggtggcggccgcccgggcaggtacttttttttttttttttttttttttttttacagcctcataggtagaaggaacttgccttgagtctcanatgagacttgggacttaggacttttcagtggaggctggaatgaattaanacttttggggactattggaaagagatgattatattttgtaatgngagaagagcatgcaatgttgggggctggaggggaatgatgtantttanatatttgacccttccaaatctcatgttgaaatgngacccccattgttgaangtggaagctgatgggaggtgttngagncatgcaagaanattctnnatgaatggatnntgcatgnnnnggnggnnnnnanngaannnnnnnnnnnnnnnnannnnannnnnnntnnnnnnannannnnnnnnnnncnnnngnnnnannnnnnnntannnnnnnnnnnnngnnnnnnnnnnngngnnnnnnnngnnnnnnnnnngnngnnnngnngnnngnnnngnngnnnnnngnnngnnnnngnnnngnnnnngnnngnnggnngnnatgnnnnnnnnnnaannannnnnngngnnngnnnagnnggangggaag

SEQ ID NO: 8651 - DNA, 644 bp, Homo sapiens
  misc_feature 23, 53, 564, 639: n = A,T,C or G
gcgcattaaccctcactaagggnaacaaagctgggtaccgggccccccctcgnggtcgacggtatcgataagcttgatatcgaattcctgcagcccgggggatccactagttctagagcggccgaggtacgatttttaaaatctagcacatttaaaacactgttagttcaacttccttatttttggagaattttaggaatactcaatttacatatctgtataaatcaggacagagctcctttaagagactttataatctaatttatcaataccccccaaatacaggagaacattatacacaaaattagatataggcctttgttaattatagacacatacttgcaaagacacatagagagcttagtaaatagtttcagttctgcaatttgagccaaaaaccaggagatacagacatagccgacaccagctcggtcatggagtccctaacccaggagcactagaggaattaaagacacacacacagaaatatagagtgtggagtggtgaatcaaggggctgacagccttcagagctgagagccaggaacagagatttacccacatntttattgacagcaagccagtgataagcatcgtttctatggattatagattaactaaaatggggaacaaagggatnggctg

SEQ ID NO: 8652 - DNA, 474 bp, Homo sapiens
  misc_feature 2, 3, 7, 9: n = A,T,C or G
gnnaggncnctatcactacttagggcgaattggagctccccgcggtggcggccgaggtacgcggggaccctagatcccaagatctccaaggatttggtggcatacccactccagcacacagaagcatgaggttcatgactctcctcttcctgacagctctggcaggagccctggtctgtgcctatgatccagaggccgcctctgctccaggatcggggaacccttgccatgaagcatcagcagctcaaaaggaaaatgcaggtgaagacccagggttagccagacaggcaccaaagccaaggaagcagagatccagccttctggaaaaaggcctagacggagcaaaaaaggctgtggggggactcggaaaactaggaaaagatgcagtcgaagatctagaaagcgtgggtaaaggagccgtccatgacgttaaagacgtccttgactcagtacctgcccgggcggccgctctag

SEQ ID NO: 8653 - DNA, 706 bp, Homo sapiens
  misc_feature 1, 2, 3, 4, 5, 6, 7, 8, 9, 10, 11, 12, 13, 14, 15, 16, 17,18, 19, 20, 21, 22, 23, 24, 25, 26, 27, 28, 29, 30, 31,32, 33, 34, 35, 36, 37, 38, 39, 41, 42, 48, 57, 59, 66,70, 102, 315, 361, 434, 442, 482, 512, 524, 528, 554, 557,570: n = A,T,C or G
  misc_feature 581, 583, 593, 600, 602, 607, 609, 610, 611, 619, 622, 624,629, 630, 647, 649, 654, 655, 662, 664, 665, 667, 670, 673,674, 679, 682, 685, 687, 689, 693, 694, 696, 702, 705: n = A,T,C or G
nnnnnnnnnnnnnnnnnnnnnnnnnnnnnnnnnnnnnnncnnaaaacnaactacctntnaggcgantggnactccccgcggtggcggccgagtacgcggggnggtattaacagaagcagattaacctcagaaaatcctgtctggctggcagatttcaagtaaaaaaaaaaggtgggttggggggacccttttctttctagttgtctttaaggaaaattaattttactttttttttgttctggccgaaatttttatgagatatctctcacttgtcttccactttgaaccggttaaagctcatagctgtcagctctnaatgaggaggggagaagcccctgggtctttctttgaaaggaatccnctgcttgagggctgcctccctcatggggtgcgtgtcgtttctcttcctgacgcatcttgtgatatcagaggtnactatgcnaagcatccaggccgttctgaatgtgaagcactacacccancaaagtcccggtgccctctgtccccactgncggcccatgttntctnttcggaggtcaccaaggaatgcacanggnttgcgactaccanaaaaggggagngnctttgggttnttttcananaaatntnnnaggaaganctntntacanntggaaataaagggggtntncctgnngaaattncnngnccnagnngcttnggnttngnanatgnngnggggantgng

SEQ ID NO: 8654 - DNA, 848 bp, Homo sapiens
  misc_feature 6, 11, 15, 18, 22, 23, 129, 132, 175, 192, 194, 211, 233,243, 254, 257, 266, 269, 277, 279, 282, 348, 431, 443, 473,475, 482, 489, 507, 508, 524, 528, 529, 556, 576, 587, 604,608, 609, 615, 624, 625, 626, 641, 650, 658, 675, 683: n = A,T,C or G
  misc_feature 686, 693, 706, 711, 721, 723, 724, 726, 736, 740, 745, 797,798, 803, 809, 811, 821, 836, 845, 848: n = A,T,C or G
ttatcncctantatnagnaccnntacgcgtaagcttgggcccctcgagggatactctagagcggcccgcccttttttttttttttttttttttttttttttttttttttttttttttttttttttttgnaanaggaaaacccggtaatgatgtcggggttgagggataggagganaatgggggataggtgtntnaacatgagggtgttttntcgtgtgaatgagggttttatnttgttaatgnggggggtgagnganccccattgntgnggtaaatntntanagggagtatagggctgtgactagtatgttgagtcctgtaagtaggagagtgatttttgatcagganaacgtggttactaccacagagagttctcccagtaggttaatagtggggggtaaggcgaggttaaccgaggcttgctaaaagtnatcaaaaagctnttagtgggagtaaaagtttgaagtcttgananaggattntgacgcnactgggaagtgccttccnnagtttgagttttcttngccnnaattttaattgaggatttaacccccgngggccaattttaaaaaaaanctgcccccggnaacctttagggggtttngaannaaaaantggtttttnnnacaaggccttttttnggttttttnaaaaacanttccccgggaaattccnggaccggnccnacccttnttttttgcccaanctttntttttagggncnncnaaaaaggccnaaangggcnaaacttttttcctgggggaaaaatttttttccccccccgcctaagtttaaannccggnggcttngnccgcccccgngttttttttggggcnaaaaaaacnggn

SEQ ID NO: 8655 - DNA, 617 bp, Homo sapiens
  misc_feature 7, 21, 29, 52: n = A,T,C or G
gcattanccctcactaagggnaacaaagnctgggtaccgggccccccctcgngtcgacggtatcgataagcttgatatcgaattcctgcagcccgggggatccactagttctagagcggccgaggtactgtcacttagtctgtctttgttttctcgtatagaactgatctcagccttgaagggtggttcagcaaaaaatgccgattcctttcccgatagtggagtcgaagttattgatcttggggaagagacatcactcaactgctttggttttgttggggtctttaaatcagcatcctgagagatttttgataatagaaggctttgaattcctgcattttctgagagtttggaataatgtaaggcattgtatccaagagaatctacaaggtttaggtctgcaccctttttaattaaggcttccacagcgttagagctgccaccgcggtggagctccaattcgccctatagtgagtcgtattacgcgcgctcactggccgtcgttttacaacgtcgtgactgggaaaccctggcgttacccaacttaatcgccttgcagcacatccccctttcgccagctggcgtaatagcgaagaggcccgcaccgatcgccccta

SEQ ID NO: 8656 - DNA, 644 bp, Homo sapiens
  misc_feature 22, 84, 126, 138, 152, 157, 163, 204, 221, 228, 238, 247,258, 269, 305, 317, 320, 353, 356, 357, 412, 457, 460, 462,505, 523, 537, 572, 579, 583, 619, 642: n = A,T,C or G
gactcctatagggcgaattggnagctccaccgcggtggcggccgcccgggcaggtacttttttttttttttttttttttttttngctccaataagttaaaaatttttagttcactggaaaaaacanatctttgatatntggactattcagcnttttntatgtntgttggggaacaggcccccaaatctggccataaacaaaatntttgcagcactgcgacntgttcgngatggccatnatgtccacnctgaaagttgngggtttattanaatgagggcaaggaacacctgacccacccagggcanaaaataacttanggngttcctgaaccacaaacaatagcatgaggcatntgnnccttaaggacatgctcctgctacagataactagccagagcccatccctttgtttnagcccatccctttgtttcccattttagttaatctataatctatanaancnatgcttatcactggcttgctgtcaataaatatgtgggtaaatntctgttcctggctctcanctttgaaggctgtnagccccctgatttacccctccaaactctatatttntgggggngggnctttaattcctctagggctccctgggttagggaccnccatgaccgagcctggtgtcggntt

SEQ ID NO: 8657 - DNA, 455 bp, Homo sapiens
  misc_feature 2, 7, 404, 454: n = A,T,C or G
gnatccnatcactactatagggcgaattggagctccccgcggtggcggccgaggtactagctgcatccttttctatgctctccctgctggtgataatgggagatacagacagtaaaacggacagctcattcataatggactcggaccctcgacgctgcatgaggcaccactatgtggattctatcagtcacccattgtacctgcccgggcggccgctctagaactagtggatcccccgggctgcaggaattcgatatcaagcttatcgataccgtcgacctcgagggggggcccggtacccagcttttgttccctttagtgagggttaattgcgcgcttggcgtaatcatggtcatagctgtttcctgtgtgaaattgttatccgctcacaattccacacaacnataccgagccggggaggcataaagtgtaaaagcctgggggtgcctaaatng

SEQ ID NO: 8658 - DNA, 635 bp, Homo sapiens
  misc_feature 549, 594, 602, 611, 633: n = A,T,C or G
ggcgaattggagctccaccgcggtggcggccgaggtacgcgggggccttggaattgaagaatgaacaaacattgagagcagatgagatactcccatcagaatccaaacaaaaggactatgaagaaagtccttgggattctgagagtctctgtgagactgtttcacagaaggatgtgtgtttacccaaggctacacatcaaaaagaaatagataaaataaatggaaaattagaagggtctcctgttaaagatggtcttctgaaggctaactgcggaatgaaagtttctattccaactaaagccttagaattgatggacatgcaaactttcaaagcagagcctcccgagaagccatctgccttcgagcctgccattgaaatgcaaaagtctgttccaaataaagccttggaattgaagaatgaacaaacattgagagcagatgagatactcccatcagaatccaaacaaaaggactatgaagaaagttcttgggattctgagagtctctgtgagactgtttcacagaaggatgtggtgttaccccaggctncccaccaaaaaaaaaaaaaaaaaaaaaagtccctgcccgggcggncggtctanactaggggntccccgggctgcaggattcgantc

SEQ ID NO: 8659 - DNA, 631 bp, Homo sapiens
  misc_feature 20, 461, 463, 470, 473, 475, 487, 496, 508, 509, 521, 526,532, 536, 538, 541, 543, 547, 548, 558, 561, 566, 567, 568,569, 574, 576, 577, 581, 582, 587, 590, 597, 600, 603, 606,607, 608, 609, 610, 612, 614, 615, 617, 618, 622, 626: n = A,T,C or G
  misc_feature 628: n = A,T,C or G
tcactatagggcgaattggnagctccaccgcggtggcggccgagtagaagacaagccgagtgctggtgaccctgggggtctgagtggatgattggggctgctgcgctcagaggcctgcctccctgccttccaatgcatataaccccacaccccagccaatgaagacgagaggcagcgtgaacaaagtcatttagaaagcccccgaggaagtgtaaacaaaagagaaagcatgaatggagtgcctgagagacaagtgtgtcctgtacttttttcttttttttttttagtagattaatgaatgactcactttacttacttgaaatattaggaactgagttaaaggcaactccttacagatggagttcttgttgttataactggagtgcagtggttgtttacaggcgtgatcatagtggactgcagcctcagcttcctgggcctgatgtgatcctccctgcctnantctcccnaantngcttggactgtnggcacaaanccaccttgcctnngagtgttgcttnccttntcctanaatntnttngntgtnnacttataaanaantcgannnnctttntnntttnntctanatnatgaacnatntanttnnnnntntnnannaagntaantnatt

SEQ ID NO: 8660 - DNA, 903 bp, Homo sapiens
  misc_feature 66, 94, 484, 624, 639, 640, 641, 651, 659, 676, 744, 752,755, 774, 780, 783, 785, 806, 811, 826, 844, 870, 879, 892,893, 896: n = A,T,C or G
acgatacgactcctatagggcgaattggagctccccgcggtggcggccgcccgggcaggtactttnttttttttttttttttttttaattcttngggcagctaaaatctaggatggtgttaagtttcttcattttgtcaattatatataaaaaattagaaacaacatgaatctgcatttcttggatgagatagttaataacaaactatttctcaatatttgtatactaaaaactagtgaaggtgttatgtgtttcagtatcttatctcttatttgaacatgggtttctgaaaggagcctatataataatataaatggtatgtagtaaatgaggcactgtcttggctgggactgctataaaaaaattaccatagaccattgactaaaccacaaacatatacttctcacagttctggaagttggaaagccaagatgaggatgccagtatggctagcttctagtgagggtcctcttgcaggttgcanacagccggcttcttggctcctcacatggcaggaagaaggtgcgcaagctctctggcctcttcttacaagggcattaattaccttctgaaggctccacctccaaacaccatcacattgctgacttccattaacttccttgncattttttaaaggtnnnctcttcttanggttttcnaccgggggggccaaggngggaaatgtgtttctgacatatagactcatttttctggcaggatgtttataaatagttcctggcaaanggaggtgncgnatagggtcctacaagtaanctaggnggnancatttccttccagggtagggnttaancaccaaagtttttcnttcatttacaaaaccccnggtccttggccggtttaaaaactagnggatccccnggctggaggaatnnatnttaacct

SEQ ID NO: 8661 - DNA, 638 bp, Homo sapiens
  misc_feature 20, 420, 438, 478, 515, 517, 526, 528, 537, 538, 544, 588,598, 600, 615, 619, 620, 626: n = A,T,C or G
cctcttatagggcgattggngctccaccgcggtggcggccgagtactttttttttttttttttttttttttggaaaaaataagaatagttggagaatgttaaaacattattgaaaaacatatcgactaaaaaagataaaaacaatcccaaatcactttaatactttaaataaattcacaatagaattctactcagtgttaaaatactggagaaggctgggtgcagtggctcatgactgtaatctcaatactttgggagcctgagaccggaggattgcttgagcccaggaattcaagaccagcctcagcaacatggcaataccccatctctacaaaaaaaattttaaaaattagctggggtacagctggggcacagtgggctcatgtctgtaatccccagccttttgggtgggctggaggnggggggggaccccttganggtcagttcaagaccagccctggccaacatggggaaaccncatttcccctaaaccaaaacccaaaaattagatgggngnggggatacncncctgtattnncagctnctcgggaggctgaggcaggaaaattgcttgaacctgaaaggcanagcttgcagngngtcaaaattgccccnctgnnctttancctaggggaaag

SEQ ID NO: 8662 - DNA, 661 bp, Homo sapiens
  misc_feature 23, 30, 31, 517, 525, 528, 542, 573, 579, 583, 586, 588,589, 590, 601, 602, 608, 611, 612, 616, 618, 619, 622, 623,627, 629, 631, 633, 638, 641, 643, 644, 645, 647, 651, 656,658, 659, 660, 661: n = A,T,C or G
gcgcattaaccctcactaaaggnaacaaannctgggtaccgggccccccctcgagtcgacggtatcgataagcttgatatcgaattcctgcagcccgggggatccactagttctagagcggccgaggtacacacaagctgcctgggattgggatggggagggctgctgatttcgagacacatgacagcctttggtggacgggcacaggcaaagccccacgggcccttcttcctgggcagggttgggactaagcggcggaggcggagcttcatcttcttcttggaacttgtcgttttggttctcctccaaaagccttcatccagataagaagccaatgactgattacaaaaataagaataattaaatttggctcaagaaatagattgtccaactgttctgccttggtatttttcaatatccaaggcctttacaaagaaagaaacaaaaacatctttcaatctcccgacaaaagcaaactccttttttttttttttttttttttgctccaaatgctacnacctgaanaanggctgcagattganatatcaaaaatcttccccgcgtacctgcccnggcggnccanccngnnnggactccaatnngacctntanngagntnnatnnacgngntnantgaantanannntnaaanaaaanannnn

SEQ ID NO: 8663 - DNA, 899 bp, Homo sapiens
  misc_feature 478, 481, 492, 505, 508, 511, 515, 526, 529, 534, 540, 548,554, 556, 559, 572, 579, 582, 586, 602, 604, 605, 606, 607,612, 613, 616, 620, 624, 626, 628, 629, 632, 634, 639, 646,650, 651, 652, 654, 656, 657, 659, 660, 662, 665, 671: n = A,T,C or G
  misc_feature 677, 678, 679, 683, 690, 693, 694, 699, 703, 704, 705, 706,707, 710, 719, 720, 721, 723, 724, 725, 728, 729, 733, 734,737, 738, 748, 752, 755, 756, 758, 759, 760, 766, 767, 769,772, 773, 776, 779, 782, 784, 786, 787, 788, 793, 794: n = A,T,C or G
  misc_feature 795, 797, 802, 805, 807, 812, 816, 833, 836, 840, 841, 844,849, 850, 853, 855, 858, 860, 862, 864, 865, 869, 879, 880,881, 886, 887, 894, 896, 897, 898: n = A,T,C or G
gactactatagggcgaattggagctccaccgcggtggcggcccgcccgggcaggtacatctaaaggcatgaagcactcaattgggcaattaacattagtgtttgttctctgatggtatctctgagaatactggttgtaggactggccagtagtgccttcgggactgggttcacccccaggtctgcggcagttgtcacagcgccagccccgctggcctccaaagcatgtgcaggagcaaatggcaccgagatattccttctgccactgttctcctacgtggtatgtcttcccatcatcgcccgcgtacctcggccgctctagaactagtggatcccccgggctgcaggaattcgatatcaagcttatcgataccgtcgacctcgagggggggcccggttcccagcttttgttccctttagtgagggttaattgcgcgcttggcgtaatcatgggcataagctgtttcctgtgtgaaaantgntatcccgctcnacaattccacacnacnttncgangccggggagcnttnaatgngtaaancctggggntccttnanganttgagcttaactncacattnatntgcngttgcgcttcactagncnnnnttttnnagncggntaancnanncgngnccagnttggatnttannnantnngnnangangcgtcntgtttnnnggcngcgttgngannattangagnnnnngantaccacttnnngnnnagnntatnngtnnagagtgagtngtangannannnggagannanatnncgngtngancntnnncacgnnnantaggnttnantatgnggtngatggaataagtcgctnagntcgnngantacgnngantngangncnannatgncgtgtatgannngatgnngtgtacnannng

SEQ ID NO: 8664 - DNA, 794 bp, Homo sapiens
  misc_feature 3, 5, 26, 33, 46, 469, 470, 477, 578, 675, 694, 695, 699,722, 744, 753, 763, 767: n = A,T,C or G
ccngnggatgtttacgccaagcttgntaccganctcggatccactnagtaacggccgccagtgtgctggaattcggctttcgagcggccgcccgggcaggtacccaaagccatatttgttagagtaatcaacccatttggtgacccactgaaatgatgtgctcagctgctctttgggaatgcaatcagcttccggcatgttttccagacatccccgaagaacccttgccactgtgtctgcaacacttcccatggtaccgccctccgcaccacgccctaagccgaattctgcagatatccatcacactggcggccgctcgagcatgcatctagagggcccaattcgccctatagtgagtcgtattacaattcactggccgtcgttttacaacgtcgtgactgggaaaaccctggcgttacccaacttaatcgccttgcagcacatccccctttcgccagctggcgtaatnncgaagangcccgcaccgatcgcccttcccaacagttgcgcagcctgaatggcgaatggacgcgccctgtacggcgcataacgccggcgggtgtggtggttacgcgcancgtgacgctacacttgccagcgcctaacgccgctcctttcgcttctcccttcctttctcgccacgttcgccggctttccccgtcaagctctaaatcnggggctcctttaaggtccnnttantgctttacggcactcaccccaanaactgattaggtgatggtcacntactgggcncccccgatanaagntttcccccttgacttggatcacttccc

SEQ ID NO: 8665 - DNA, 650 bp, Homo sapiens
cctcactaagggaacaaaagctgggtaccgggccccccctcgggtcgacggtatcgataagcttgatatcgaattcctgcagcccgggggatccactagttctagagcggccgcccgggcaggtacagttatcataggtagccctcagggtgagcttttctgggtccaggatgtaagtgcagttcggcatgtcgagaccaagaggatccaccacagatgcatgccatttcttggtgccaggactgcttgggaactccactgttatttccctttcatcgcaagtgacagtgcctggaaaggcaggatttaccaactgagaaacatctatggagttccctgaagtcacaagggcgaagaagagagaaatcgacctgtaggtgctccagcctgcattgaaccagcctgagggactccaagagcctcctctctgcctgcacgccatagcagaagacactaccagatcaaccaggtagagggtaggctgctctgtgtttttatagcaggaagccagccgcatccacgccctctccccattgggggcacctgaatcttgtcccattctcccagctgaaacggaaggattggggaaggaagtggcctctccccgcgtacctcggccgccaccgcggtggagctccaattcgccctat

SEQ ID NO: 8666 - DNA, 649 bp, Homo sapiens
  misc_feature 20, 43: n = A,T,C or G
tcactatagggcgaattggnagctccaccgcggtggcggccgngtacctgtatccccaataatacagcccctgatgtaactatcactaagggtctataaggcctcaccactctaggaaatgaactagctgaaaattcgggaatgaatgatccctttacaggtgtaatggaaaaaatggtttggtagatggaaaggactaatggcctctattctcacctcccttgtgatcataataggggtgctcattctcttagggtgctgtattataccctgtgtctgcggactagttcaaaagctcatagaaacagcccttaccaagacctcccacaactctcccccaccctattcagataaacgtttatttctaagcaaccaagaagagcagtgaagccagatcctgttagaaatatatgaagaggaaggactacaaaatcaaaaggggaaaattattagacaaaatgagttgctctacaaaggtccaacttcgttgtcctttgttctgtaacctttgttctgtaaactgcccttcccgcagaaactgtctttcccgccgaccaaaactgctcttcactatcactgtaatccatacccctactctatttgaaactgccaatcgggatcagcttacattgtgtggttcaaccaccag

SEQ ID NO: 8667 - DNA, 661 bp, Homo sapiens
tatagggcgaattggagctccaccgcggtggcggccgaggtacacttctctttccctgaatatgacttgcctctggtgaacagaattttgcagatgtagttaagctctaaaatcagttagtgtttggctcatcagtagggaaattatcctgagtgagcctgatatacactgatatgacaggctattcttgctgacttgatgaagcaagcagccatgttgaggaaatccacatggctaagaactgtgaccagcctctaggaactgtaggcaacatttagggcctgagattacccagctaaaagtcaggagatagcttgggatttcagtcatactgtcataaaaacatacattttgccagcaaacttcatgaccttggaagcagactctttcccagtcaagattccaaatgaaaattcagcccagctgacacgctctagaactagtggatcccccgggctgcaggaattcgatatcaagcttatcgataccgtcgacctcgagggggggcccggtacccagcttttgttccctttagtgagggagaattgcgcgcttggcgtaatcatggtcatagctgtttcctgtgtgaaattgttatccgctcacaattccacacaacatacgagccgggagcataaagtgtaaagcctggggtgcctaa

SEQ ID NO: 8668 - DNA, 647 bp, Homo sapiens
  misc_feature 2, 7, 21, 39, 512, 597, 600, 612, 626, 631, 647: n = A,T,C or G
gngtcgnccacgcgtccgggnaagtgtccctatctctgntaccatcatcccagctgttcctcctcccactgacctgcgattcaccaacattggtccagacaccatgcgtgtcacctgggctccacccccatccattgatttaaccaacttcctggtgcgttactcacctgtgaaaaatgaggaagatgttgcagagttgtcaatttctccttcagacaatgcagtggtcttaacaaatctcctgcctggtacagaatatgtagtgagtgtctccagtgtctacgaacaacatgagagcacacctcttagaggaagacagaaaacaggtcttgatttcccaactggcattgacttttctgatattactgccaactcttttactgtgcactggattgctcctcgagccaccatcactggctacaggatccgccatcatccccgagcacttcagtgggagacctcgagaagatcgggtgccccactctcggaattccatcaccctcaccaacctnactccaggcacagagtatgtggtcagcatcgttgctcttaatggcagagaggaaaagtccctttattgattggccaacaatcaanagntttctgatgttnccgaaggacctggnagttnttgctgccaacccccn

SEQ ID NO: 8669 - DNA, 679 bp, Homo sapiens
  misc_feature 519, 533, 536, 546, 557, 559, 565, 567, 587, 600, 605, 612,615, 618, 631, 639, 648, 650, 668, 677: n = A,T,C or G
tatagggcgaattggagctccaccgcggtggccggccgcccgggcaggtacttggttaatctagcatttgttagccaatgatgtcctttggtattcatcaaatttaccacagcatgggggggcctttatattcaggttttgcccaagagttagcttatctgcttgttgtgctagcagggctgttgctgccaaggccctcaaacatgagggccaacacttagaaaccctgtctaattgtttagagagataggccaccagctttggccagtgtcccacagtctgggttaaaactattaactatcatttttttttctgacacatattgtgtaaaaaaaaaaaaaattataaaaaaagtacctcggccgctctagaactagtggatcccccgggctgcaggaattcgatatcaagcttatcgataccgtcgacctcgagggggggcccggtacccagcttttgttccctttagtgagggttaattgcgcgcttggcgtaatcatgggcatagctggttcctgngggaaattgttatncgntcacaattcncacaacatacnanccgggncntaaagggtaaagcctggggngcctatgagggancaacnccattantgngtnggctcactgcccnttccagtnggaaaccgncnggcccctgcttaaagaancggcccccncg

SEQ ID NO: 8670 - DNA, 584 bp, Homo sapiens
  misc_feature 5, 13, 22, 51: n = A,T,C or G
ggatngatccagntcctcgttnaagcaggcaatacggccgtccgcgatctnggggccaggttcgggatgagtatcggcaggactacgatgctgggagaggaggctatggaaaactggcacagaaccagtgagtggtgagagctctgtcagtgacaaacactcctttggcctgttgaatttgctgaagaacatcacctaaagtctgcacacgagcccatttttaccaagatttgatcagtgtctttactgagctggaagcctctgaaagttattaaaggacagaatccaaaagaatgcctttaattcttgtctgagaatcttggccatgtgtcagattatcagaacaattttgttaccaggtcagaaattgtgttctttgacaacagattggatctgtaatgttgattagtctttagccataaccactacacttttagaaagacagaaaaatgtaagaatttgtttttaccataatgagtcttaagtaggttcatgatctacattggggcctgggattatttttttaattttaagtttgcatgagatagcctaataaatggaagtggggccagcatggtggctcc

SEQ ID NO: 8671 - DNA, 538 bp, Homo sapiens
  misc_feature 11, 50, 462: n = A,T,C or G
gtgtttcacgntgtcgccccgcgtccgcttttttctgctgcattgcagangttagaaccaatttcatttgtcctgcactgagaatgtgcattcccagcagatcatggttgagctcagcacacctgcaactcagccagcctctttgaagggtgcacagttactaactgtcagcgttgcacagccacctttagcaggtatgttcagaacttacattcccaccctttctaaaacagctcacagtaacaagagaacgggatttaacttttgacatgcacactcatgaaaaccaatgattttggaaagccaaattgttgagaagataaggtggggattctgactactagtatttttacaaatctgattgtcgttgcaggttttgttttattttgttgtgttaatgctgagagtggagaatagattggaatatttgcctcttgtgtttctttttgctttgtaacattncaagtggtccacattttcctttatttaaaatttaaagttggtgcctggggtttctggtgttaataagaagtgatac

SEQ ID NO: 8672 - DNA, 675 bp, Homo sapiens
  misc_feature 2, 9, 11, 14, 25, 31, 36, 37, 41, 47, 79, 85, 104, 165, 233,234, 238, 239, 384, 387, 388, 392, 393, 394, 395, 396, 399,401, 402, 405, 417, 427, 428, 432, 440, 450, 451, 452, 454,457, 460, 462, 466, 470, 474, 476, 482, 483, 495: n = A,T,C or G
  misc_feature 496, 497, 502, 506, 507, 508, 509, 510, 514, 515, 517, 518,520, 524, 525, 528, 529, 531, 534, 536, 537, 539, 540, 542,543, 544, 545, 546, 547, 550, 551, 552, 553, 555, 556, 557,559, 560, 561, 562, 563, 564, 566, 567, 568, 569, 571: n = A,T,C or G
  misc_feature 572, 573, 574, 575, 576, 577, 578, 579, 580, 581, 582, 583,584, 585, 586, 587, 588, 589, 590, 591, 592, 593, 594, 595,596, 597, 598, 599, 600, 601, 602, 603, 604, 605, 606, 607,608, 609, 610, 611, 612, 613, 614, 615, 616, 617, 618: n = A,T,C or G
  misc_feature 619, 620, 621, 622, 623, 624, 625, 626, 627, 628, 629, 630,631, 632, 633, 634, 635, 636, 637, 638, 639, 640, 641, 642,643, 644, 645, 646, 647, 648, 649, 650, 651, 652, 653, 654,655, 656, 657, 658, 659, 660, 661, 662, 663, 664, 665: n = A,T,C or G
  misc_feature 666, 667, 668, 669, 671, 675: n = A,T,C or G
gngcttttngnganacgaaaacctnattttnttganntggnatctcnaccccggtggcggccgcccgggcaggtttttngggagnaaaagtggagttggagaancggttgttctttcctcacatttggatgattgtcataaggtttttagcatgttcctcctttncttcaccctccccttttttcttctattaatcaagagaaacttcaaagttaatgggatggtttgatctnntttnntgagaactcgttcacctccaagcatttcatgaaaaagctgcttcttattaatcatacaaactctcaccatgatgtgaagagtttcacaaatctttcaaaataaaaagtaatgacttagaaactgcaaaaaaaaaaaaaaaaacanaannaccnnnnncgntnnagnacctcggccgcnctagaactannggancccccggnctgcggaatnnnanatnaancntatngatnccgncnacctcnnaggggggcccgnnncccanctgnnnnncctnnanngngggnnaanngngcncnngnngnnnnnnggnnnnannngnnnnnngnnnnannnnnnnnnnnnnnnnnnnnnnnnnnnnnnnnnnnnnnnnnnnnnnnnnnnnnnnnnnnnnnnnnnnnnnnnnnnnnnnnnnnnnnnnnnnnnnnnnnnanaaan

SEQ ID NO: 8673 - DNA, 722 bp, Homo sapiens
  misc_feature 1, 8, 9, 10, 11, 15, 17, 18, 23, 27, 30, 41, 43, 44, 48,49, 54, 56, 58, 59, 61, 62, 63, 66, 68, 69, 70, 75, 79,85, 92, 96, 104, 105, 106, 107, 109, 110, 111, 123, 184,249, 266, 307, 349, 459, 469, 476, 477, 490, 510, 536, 553,556: n = A,T,C or G
  misc_feature 608, 664, 713: n = A,T,C or G
naacaatnnnntacntnnaccantacnttnattttataaanannatannctttnananngnnnttngnnnaatanttantgtatnaaatatnaatnaaaaattnnnnannngaattaggtcgncccccgtccggagaattgtaatacgactcactatagggatctagatcgcgagcggccgctngactagtctagagaaaaaacctcccacacctccccctgaacctgaaacataaaatgaatgcaatngttgtttgttaacttgnttattgcagcttataatggttacaaataaagcaatagcatnacaaatttcacaaataaagcatttttttcactgcattctagntgtggtttgtccaaactcatcaatgtatcttatcatgtcttgggatccccgggtacccgagccttcgaaattaattccctttttccgcttttcctcgctcacctgaactncgtctgcgcntcagggnncgttcggcctgcnggccgagccggttattcaancttcacctcaaaagggcgggtaatancgggtttatcccacaanaantcaggggggataaaccgccagggaaaagaacattgtgaagccaaaaagggcncagccaaaaaggccagggaacccggtaaaaaaaggccccgcgtttgcttgggccgnttttttcccataagggcttcccgcccccccctggaccgaggccattcancaaaaaaaa

SEQ ID NO: 8674 - DNA, 579 bp, Homo sapiens
  misc_feature 15, 16, 17, 18, 28, 46: n = A,T,C or G
cgggccccccctcgnnnntacttctagnaattaattaacgcggggnaaatcagctcttgtttacccctctatccattacactacgatccagctgggtttaggcatcacttcctctgagcaatcctccctgatgtcatgaggcagtgctgagtgccttctctggaccctctgtttacttgcctgttaaatcctgaacatctggaagggagtcgtgttcagcaacatatctacgccttgcagcacggtgcctggcctgcagctggtgttccgtaaacagctgctgactgacgggatgcatcgccaattctagatttgagtcaattctagagaccaccatggtggagagtgcatatgcaggcacgccagttaactgatctggctgagcccagccctccagccatccctgccaaggtgtcaatgtgagtgaaaccatcttgaactctgcatattaacttattctccagctgaatatcaccaagagacctgtcttctgatgctacatggagtggaacaatctcccagctgagctctgtccacattcctgaccacaaaatcatgagatattaaataaaatggctg

SEQ ID NO: 8675 - DNA, 672 bp, Homo sapiens
  misc_feature 392, 442, 520, 530, 538, 551, 556, 573, 582, 597, 599, 601,606, 607, 617, 618, 624, 629, 633, 635, 636, 654, 663, 668: n = A,T,C or G
tatagggcgaattggagctccaccgcggtggcggccgaggtacgcgggtatatctgaaaacctaatttctttctttttttgataaggaaatcttttccatctccatcctaacatgcacaacctgtgaagagaattgtttctatagtaactggtctgtgatcttttgtggccaagagaatagcaggcaagaattagggccttgacagaatttccacgaagctctgagaacatgtttgtttcgaatgtctgattcctctttgtcatcaatgtgtatgctctgtccccatccttcactcctcctcaagctcacaccaattggtttggcacaggcacagagctggtccctagttaagtggcatttatgttaaaaaaaaatagttcagaatctcagncttttctttgtgtcatcaaaacagcttaagaaggggactactgccaatgncctctagtctgacctccacccagggaggacccatggcaggaccttttaaacttttctgattcatgagaacaaccttgngaagcttttncccacctnctaaagtgtttantgcantctgtagccttcctttngaacctcanaacaaaatcctgtgnangnaactnnaaacatctgnnggaagngaacnttantnnggaagagtaaactgaggntaaaggaanaaatnaaaa

SEQ ID NO: 8676 - DNA, 393 bp, Homo sapiens
  misc_feature 18: n = A,T,C or G
ggagccccccgtaatacngactcactattagggcgaattggagctccaccgcggtggcggccgcccgggcaggtacgcgggatggaaagcgaggagttgaatggtgcatacaaggccatccccgttgcccaggacctgaacgcgccttctgattgggacagccgtgggaaggacagttatgaaacgagtcagctggatgaccagagtgctgaaacccacagccacaagcagtccagattatataagcggaaagccaatgatgagagcaatgagcattccgatgtgattgatagtcaggaactttccaaagtcagccgtgaattccacagccatgaatttcacagccatgaagatatgctggttgtagaccccaaaagtaaggaagaagataaa

SEQ ID NO: 8677 - DNA, 675 bp, Homo sapiens
  misc_feature 20, 42: n = A,T,C or G
tcactatagggcgaattggnactccaccgcggtggcggccgngtactcgcccgacgggtcagtgctgacagttgcttgtgaacaaactgaagttctgctttttgaccctatatcttcaaagcacataaaaacactttctgaagctcatgaagactgtgtaaataatatcagatttcttgataaccggctgtttgctacctgctctgatgacactacaatagcactatgggatctgagaaaattgaacaccaaagtatgcactttacatggtcacactagctgggtgaagaacatcgaatatgatactaatacaagactcttagtaacatcaggatttgatggaaatgtcattatttgggacactaacaggtatacagaagatgggtgtccacataagaaattctttcacacacgttttctcatgcgaatgaggttaacaccagattgttccaaaatgttgatttcaacgtcctctggatatctcttaattttgcatgaccttgacttaactaagtctttagaagtaggcagctatcccattttaagagcaagaagaactacttcaagttcagatttgaccacttcatcaagttcatctggtcctagagtttctggctcaccttgccatcatagtgattctaattcttctgagaaacacatgtcacgagcctctcc

SEQ ID NO: 8678 - DNA, 625 bp, Homo sapiens
  misc_feature 3, 557, 559, 567, 582, 591, 594, 599, 603, 613, 618, 620: n = A,T,C or G
atnaccctactaaagggaacaaaagctgggtaccgggccccccctcgaggtcgacggtatcgataagcttgatatcgaattcctgcagcccgggggatccactagttctagagcggccggccctggaaatgcatcagcaaaacccatttcccccgtgcactcattctgagcttccttccttcatttctgtcattactgctgagaactggactgtgcccagctgacctttcccttccttgccctcatcttgctgccagggtctgcaggtttgccaccgtcccggccccagtctgaaacatgggattatttcagaattggaggtggcagcttcagaaaaaaatccttctcgtgtgttgactgctgagatccaggaactgggaaatcaacccccagtttgtagattgctctctttggaaattctgtggcccaacctcgtggctgttttctggaattccttctatcggggcagacagtgctgtgcctttcttgacttcaggatgttccaaggatgctgctggatctgtgtgtgtgtgtgtgtgtgtgtgtgtgtgtgtgcntntatgtgcncctgaccctgatttntgcaacctncanatttntttnttgacccttnaaagnanaacag

SEQ ID NO: 8679 - DNA, 613 bp, Homo sapiens
  misc_feature 2, 6, 32: n = A,T,C or G
gncgtngtgttccaaaagaattttctaatatnacctggcttgataacatttttctccttcgagttcctttttctggagtttaacaaacttgttctttacaaatagattatattgactacctctcactgatgttatgatattagtttctattgcttactttgtatttctaattttaggattcacaatttagctggagaactattttttaacctgttgcacctaaacatgattgagctagaagacagttttaccatatgcatgcattttctctgagttatattttaaaatctatacatttctcctaaatatggaggaaatcactggcatcaaatgccagtctcagacggaagacctaaagcccatttctggcctggagctacttggctttgtgacctatggtgaggcataagtgctctgagtttgtgttgcctcttttgtaaaatgagggtttgacttaatcagtgattttcatagcttaaaatttttttgaagaacagaactttttttaaaaacagttagatgcaaccatattatataaaacagaacagatacaagtagagctaacttgcttaagaaaggatggaggctctgaagctgggacttcatatcctta

SEQ ID NO: 8680 - DNA, 304 bp, Homo sapiens
  misc_feature 11, 58, 62, 77, 82, 87, 93, 120, 140, 142, 151, 160, 178,184, 192, 211, 214, 215, 217, 218, 224, 225, 226, 227, 232,250, 261, 262, 263, 264, 265, 266, 271, 272, 273, 275, 276,279, 280, 282, 288, 289, 298, 299, 300, 301, 302, 303: n = A,T,C or G
tttgggagtcncgcgtagacgtgttttgcgacccggaccaccgtagttttacgccggngagngttcacccgaactanaagcnggtgnttatangggttcgggaaaaagaacctttttaanaggcaaaaaggcccttgggngnttttcttanaaagggganaaagaaattttgggtttnccttgnaaaggggnccccaacccttttttaaanccnngnntttttnnnnggggngccccccttttccccccnaaaaaaaaaannnnnnaaaannngnnttnntntttttnnccccccccnnnnnng

SEQ ID NO: 8681 - DNA, 850 bp, Homo sapiens
  misc_feature 655, 691, 714, 716, 724, 731, 748, 755, 759, 762, 768, 777,782, 810, 815, 835, 840, 848: n = A,T,C or G
ccgtatacgactcactatagggcgaattggagctccccgcggtggcggcccgaggtacgcggggggaaagctgatattgcaattgctccattaactattacccttgtgagagaagaggtgattgacttctcaaagcccttcatgagcctcgggatatctatcatgatcaagaagcctcagaagtccaaaccaggagtgttttcctttcttgatcctttagcctatgagatctggatgtgcattgtttttgcctacattggggtcagtgtagttttattcctggtcagcagatttagcccctacgagtggcacactgaggagtttgaagatggaagagaaacacaaagtagtgaatcaactaatgaatttgggatttttaatagtctctggttttccttgggtgcctttatgcggcaaggatgcgatatttcgccaagatccctctctgggcgcattgttggaggtgtgtggtggttctttaccctgatcataatctcctcctacacggctaacttagctgccttcctgactgtagagaggatggtgtctcccatcgaaagtgctgaggatctttctaagcaaacagaaattgcttatggaacattagactctggcttcactaaaagaatttttcaggagaatctaaaattgcagngtttgataaaatgtggaccccatgccgagtgcgganccctctgtgttgtgaggactacngncgctctanaactagnggatcccccggctgcangaatttnattnaancttatngatcccgcnacctnagggggggcccgtcccacttttgttccntttangagggtaattgccccttggngaatnatggcatncc

SEQ ID NO: 8682 - DNA, 684 bp, Homo sapiens
  misc_feature 17, 20, 345, 363, 364, 368, 373, 378, 380, 389, 392, 393,395, 396, 397, 401, 403, 413, 414, 415, 418, 419, 423, 425,427, 429, 430, 431, 432, 437, 438, 440, 443, 448, 450, 452,453, 455, 459, 460, 461, 464, 467, 468, 470, 475, 478: n = A,T,C or G
  misc_feature 480, 482, 483, 486, 489, 491, 493, 494, 495, 496, 497, 498,503, 506, 507, 511, 520, 523, 528, 530, 531, 532, 535, 536,537, 539, 540, 542, 544, 548, 549, 551, 555, 556, 557, 558,560, 561, 564, 570, 571, 574, 577, 579, 581, 582, 583: n = A,T,C or G
  misc_feature 585, 586, 589, 593, 594, 596, 597, 598, 600, 601, 603, 604,606, 607, 608, 610, 616, 617, 621, 622, 623, 625, 632, 636,637, 639, 643, 644, 648, 649, 652, 653, 654, 657, 659, 660,662, 665, 668, 671, 672, 674, 675, 676, 677, 678, 680: n = A,T,C or G
  misc_feature 681, 683: n = A,T,C or G
ttttctaaactctcctntgnacaagcaaactgccgtgtggcttaccattttatagcgctggggaaattgttgttacacagtgctgcttcacctgtaatggcaaacatcagaacaaaaaccaggagcccccgagaagaaatgtgtaaagatatcttcatggtgcatggagattatagtgtttcatgcttttgaacaggaaagcattttcggttttatatactgtctaatttagagcaaacattctttaagtccaaggagcattattcgcctttagaaatttctactccaaataatatagcactgcaattacgtgagatcattctagagatttaaaaatgctttggnaagacacaaaagtgcccnncaanctttnaatgnanagccccacntgnntnnncttnanagtaatgcannntanncctncncntnnnnttccnntntgntgccnananngntggnnntgnttnngntccgngcncngnnctntcngntnnnnnnccttnatnnactngacctcgcntcnccctnannncannncnngntnccgnntncgannnntnngtnttttanngcnatnancnnntnntanttanntnnncnncnntnnntngcttgnncctnnncncaacatnccanncngtanngttnnggnnnaantnncncangtnttnncnnnnnanntnt

SEQ ID NO: 8683 - DNA, 880 bp, Homo sapiens
  misc_feature 3, 9, 580, 635, 652, 663, 670, 681, 682, 709, 729, 751, 761,785, 789, 797, 820, 837, 844, 855, 857, 864, 867, 874: n = A,T,C or G
atntactcnagcgccaattaaccctactaaagggaacaaaagctggagctccacccgcggtgggcggcccgagggtgggcaagttcatgaaacctgggaaggtggtgcttgtcctggctggacgctactccggacgcaaagctgtcatcgtgaagaacattgatgatggcacctcagatcgcccctacaccatgctctggtggctggaattgaccgctacccccgcaaagtgacagctgccatgggcaagaagaagatcgccaagagatcaaagataaaatcttttgtgaaagtgtataactacaatcacctaatgcccacaaggtacctgcccgggcggccgctctagaactagtggatcccccgggctgcaggaattcgatatcaagcttatcgataccgtcgacctcgagggggggcccggtacccaattcgccctatagtgagtcgtattacgcgcgctcactggccgtcgttttacaacgtcgtgactgggaaaaccctggcgttacccaacttaatcgccttgcagcacatccccctttcgccagctggcgtaataaccaaaaggcccccaccnatcgcccttccaacagttgcgcacctgaatggcgaatgggacccgccctgtaacngctcattaaaccccgcnggtgtggtggntaccccncaacgtgaccnntacacttgccagcgccctagcgcccgnttctttcgctttcttccttnctttttcgccacgttcgccggntttccccgtnaagctctaaatcggggggctcccnttangggttccnatttaaatgctttaccggacctngaccccaaaaaacttgnttagggngatgggtcacntntggcccntcnccttganaaccgt

SEQ ID NO: 8684 - DNA, 665 bp, Homo sapiens
  misc_feature 2, 3, 4, 6, 9, 12, 22, 23, 26, 33, 54, 249, 253, 256, 257,264, 265, 266, 269, 270, 271, 273, 274, 275, 276, 280, 281,282, 283, 287, 288, 291, 292, 295, 297, 298, 300, 301, 302,303, 305, 307, 308, 310, 311, 312, 314, 315, 317, 319: n = A,T,C or G
  misc_feature 320, 321, 323, 324, 325, 326, 327, 329, 330, 332, 334, 335,336, 338, 340, 341, 342, 343, 345, 347, 348, 349, 350, 351,355, 357, 358, 359, 360, 362, 363, 364, 366, 368, 369, 370,371, 372, 373, 374, 375, 376, 377, 378, 380, 381, 382: n = A,T,C or G
  misc_feature 384, 385, 387, 388, 389, 390, 391, 392, 393, 394, 395, 396,397, 398, 399, 400, 401, 402, 403, 404, 405, 406, 407, 408,410, 411, 412, 413, 414, 415, 416, 417, 419, 420, 422, 423,425, 426, 427, 428, 429, 431, 432, 434, 435, 437, 439: n = A,T,C or G
  misc_feature 440, 441, 442, 443, 445, 446, 449, 450, 451, 454, 457, 459,461, 462, 464, 465, 467, 471, 472, 473, 476, 477, 479, 480,481, 484, 487, 489, 491, 493, 494, 495, 496, 498, 500, 502,503, 504, 505, 506, 507, 509, 511, 512, 513, 514, 515: n = A,T,C or G
  misc_feature 516, 517, 518, 521, 523, 526, 530, 531, 541, 543, 544, 551,553, 555, 558, 561, 564, 565, 567, 569, 570, 572, 581, 584,591, 592, 593, 594, 595, 596, 598, 599, 600, 603, 604, 607,611, 615, 617, 618, 619, 620, 621, 623, 624, 626, 627: n = A,T,C or G
  misc_feature 628, 630, 638, 639, 641, 642, 643, 644, 649, 650, 655, 656,658, 659, 662, 663, 665: n = A,T,C or G
tnnncngtnctnacaactaaannaanaaatatnctaaaaatatgcttttcaatnctatataatttaaaggtggtaggctttttatatttgttttgataaagtaaatattaataagccaattttgaaaattgtttaattagtaaactcagagtcataattctctccagcacttcaaacattataattctttacttctttaatttcatataaatcttaagtcaggaagaaagcaaagttcaggattggatnatantcnntaacttnnnacnnntnnnnaggnnnncccnnccnnccncnngnnnncncnncnnncnncngnnncnnnnncnncncnnncncnnnncncnnnnncccncnnnncnnncngnnnnnnnnnnncnnncnncnnnnnnnnnnnnnnnnnnnnnngnnnnnnnngnngnncnnnnncnncnncngnnnnntnnacnnnccnccncncnncnncncccnnnggnngnnncgncgncngngnnnngngncnnnnnngncnnnnnnnncgngnccncccnncgcccgcccncnngcccgcncncnccnccnccnncncnncnccccccgcngcngcccgcnnnnnncnnnccnnccngccncctngnnnnnanncnnncncccccccnncnnnngccgnnccagnncnnacnncn

SEQ ID NO: 8685 - DNA, 407 bp, Homo sapiens
  misc_feature 5: n = A,T,C or G
gagcnccgcgtaatacgactcactatagggcgaattggagctccaccgcggtggcggccgcccgggcaggtacgcggggaggcattgaggcagccagcgcaggggcttctgctgagggggcaggcggagcttgaggaaaccgcagataagtttttttctctttgaaagatagagattaatacaactacttaaaaaatatagtcaataggttactaagatattgcttagcgttaagtttttaacgtaattttaatagcttaagattttaagagaaaatatgaagacttagaagagtagcatgaggaaggaaaagataaaaggtttctaaaacatgacggaggttgagatgaagcttcttcatggagtaaaaaatgtatttaaaagaaaattgagagaaaggactacag

SEQ ID NO: 8686 - DNA, 637 bp, Homo sapiens
  misc_feature 23, 56, 630, 632, 634: n = A,T,C or G
gactcactatagggcgaattggnagctccaccgcggtggcggccgagtacgcgggnatctcgatagtgaggaggatgaggagtagccagcagctcccagaacctcttcttccttcttggcctaactcttccagttaggatctagaactttgccttttttttttttttttttttttttttgagatgggttctcactatattgtccaggctagagtgcagtggctattcacagatgcgaacatagtacctgcccgggcggccgctctagaactagtggatcccccgggctgcaggaattcgatatcaagcttatcgataccgtcgacctcgagggggggcccggtacccagcttttgttccctttagtgagggttaattgcgcgcttggcgtaatcatggtcatagctgtttcctgtgtgaaattgttatccgctcacaattccacacaacatacgagccgggagcataaagtgtaaagcctggggtgcctaatgagtgagctaactcacattaattgcgttgcgctcactgcccgctttccagtcgggaaacctgtcgtgccagctgcattaatgaatcggccaacccccgggagaggcggtttgcgtattgggcgctctttcgctttctngntnctg

SEQ ID NO: 8687 - DNA, 754 bp, Homo sapiens
  misc_feature 2, 3, 4, 5, 21, 24, 27, 649, 658, 679, 693: n = A,T,C or G
gnnnnatactatagggagtcnatntcnggtgaatggggccctctagatgcatgctcgagcggccgccagtgtgatggatatctgcagaattcgcccttagcgtggtcgcggccgaggtacccgtatgtgtgatagggcaggcagagggctccacctgctctgcccttggcaaaggcccttggctacactggtgaaaatgccagctcggcttctgcacggatacactatgttgtgccatccaactggagtgccagtggaccccaaaggcagggcagggcagggggagggggtattttgaaatgttttcaggagctctgtccagctgtctctgtcttccagcccggaactgctgcacaaagctacaaggacactgatgagaccatggatctgctgctgttctctagggaagacttggcttggagtgtggctgcctggattcgaaagtgtgtccttgactccatggagtaattcttgtagttttgcttggcagattccaaaagtttgatggcctcttcgtttctgtcttgctccataagcagcagggccagctccagcagggcgtttgggatcaagtagtggtcatatttaatcttcttttcattggcagagatgctcctaaaattctcctcgcctcctggacacggcccangtatttcanaccaggcctttcaacaatttnaccaagcactcgtnatccactgagtacctgcccggccggccgtcgaaaaggccaattccagcacacttgggcgcc

SEQ ID NO: 8688 - DNA, 839 bp, Homo sapiens
  misc_feature 4, 18, 29, 538, 599, 620, 635, 641, 666, 676, 692, 703, 730,735, 737, 738, 739, 740, 741, 742, 743, 744, 745, 746, 749,751, 752, 753, 754, 755, 756, 757, 758, 760, 761, 764, 765,766, 767, 768, 769, 770, 771, 772, 773, 774, 775: n = A,T,C or G
  misc_feature 776, 777, 778, 779, 780, 781, 782, 783, 784, 785, 786, 787,788, 789, 790, 791, 792, 793, 794, 795, 796, 797, 798, 799,800, 801, 802, 803, 805, 806, 807, 808, 809, 810, 811, 812,816, 817, 818, 819, 820, 821, 822, 823, 824, 825, 826: n = A,T,C or G
  misc_feature 827, 828, 829, 830, 831, 832, 833, 834, 835, 836, 837: n = A,T,C or G
gacncgcgtatacgactnactatagggcnaattggagctccaccgcggtggcggccgcccgggcaggtactgtccaactggatgctgccctggtggctgaaggcacacttcatgatgctgtccagggtcatcagggagacatgttgaaagagctccagacgtgagttttgggcaatgtgttcctcccatttgttcagcatcatccgaacactctcagacatcatggtgatgaatattttcagaatgctgatgttgaagccaggtttcacaatctggcggtgctttttccatttagaaccatccagggtcacaagtcctcgaccaacccaggattcaaggattttgtggctaacagcacttttgggatcttgtcttttcaggagaatcttggcatagtctgggtcatggacactgaagaacatcgtaaagggtccaacccacaagggaacagcacatgggtatttttccatcagcttatgatacccctcaaactcctttactgggtaaaactccttgtggccatagaaccagtgggcanggggtgcaggaaacaagtgcagggctctgatcatccatctcctcctctggtacctcgccgntctaaaactagtggatccccnggctggaggaattcnatatcnagcttatcgatccgtcgacctcganggggggcccngtacccaactttggtncctttaatganggttaatgccccctggcgtaatatggncatancnnnnnnnnnnccngnnnnnnnncnnccnnnnnnnnnnnnnnnnnnnnnnnnnnnnnnnnnnnnnnnngnnnnnnnngggnnnnnnnnnnnnnnnnnnnnnncc

SEQ ID NO: 8689 - DNA, 682 bp, Homo sapiens
  misc_feature 7, 62, 76, 80, 175, 254, 255, 258, 355, 434, 459, 507, 549,563, 572, 585, 612, 648: n = A,T,C or G
taatacnactcactatagggcgaattggagctccaccgcggtggcggccgcccgggcaggtnccatcacatgctgntcanagtggccatttgtcccaagtcaaaacataacatgctacagtgtggcaccagagaaaagcaaacatggcctattctcttggaggtaatgcaaactngatcctaaactgtggaaaccagtctgaagatttctggaaaaaaaaaaggatggaaggcagagctatgctttgacccagnnatncctaccccatgcatctaccccagggaaaaacacatgcgtctatcaaatagacaccattgacacttacaccgtccacgggagtggttactgacaggantaaagatgtgggaactgatctagatgcccacgaacagaaaactgggatttttaaaaatcgcggtttcctatacatccangaatgctaaaaagccacttaagganaaatcaaacacagaagccaaaatcattgccctcggtagggaacatggngttggaactggaggccactctgctaaaccactgaggcaagancagaagaccaaacncttgcaggntctcatttattangtggaggcgcaacacccaatacacatnaacatagagatgaatcaagaggcgctgggtaccctnggcccggtctagaaactagtggatcccccgggct

SEQ ID NO: 8690 - DNA, 656 bp, Homo sapiens
  misc_feature 2, 3, 7, 13, 14: n = A,T,C or G
gnntttncctttnncccgcgtccggttctgtgtttgaacactagcgagaacaccactgtgtgcgcctccacccccatcacacaccaaacaacaggtggctcagacaccctgaatttgcacagctcacctagctttcctaatttaggccttcatatcatagaatggtggcctggaccaataggaatgaaaacagaccaggggttttcccagagaataaagccggaaaagttttgattctccactggactgctgtgtttggatttgatctgttgttagattctagttaacacttttgtttttaaaaactaaggacaaatgaacaaaaaaaaaaaaaaagggcggccgctagactagtctagagaaaaaacctcccacacctccccctgaacctgaaacataaaatgaatgcaattgttgttgttaacttgtttattgcagcttataatggttacaaataaagcaatagcatcacaaatttcacaaataaagcatttttttcactgcattctagttgtggtttgtccaaactcatcaatgtatcttatcatgtctggatccccgggtaccgagctcgaattaattcctcttccgcttcctcgctcactgactcgcttgcgctcggtccgttcggctgcggcgagcggtatcagcttact

SEQ ID NO: 8691 - DNA, 347 bp, Homo sapiens
  misc_feature 2, 4, 5, 8, 9, 13, 20, 27, 29: n = A,T,C or G
tntnnggnntcgncccacgncgtccgnangtcttgtgttgttttgttcccctgccctcctttctcagcagctttttgttattgttgttgttgttcttagacaagtgcctcctggtgcctgcggcatccttctgcctgtttctgtaagcaaatgccacaggccacctatagctacatactcctggcattgcactttttaaccttgctgacatccaaatagaagataggactatctaagccctaggtttctttttaaattaagaaataataacaattaaagggcaaaaaacactgtatcagcatagcctttctgtatttaagaaacttaagcagccgggcatggtggct

SEQ ID NO: 8692 - DNA, 1133 bp, Homo sapiens
  misc_feature 1, 4, 5, 6, 8, 9, 11, 12, 13, 14, 16, 17, 20, 21, 22, 23,25, 26, 27, 28, 32, 34, 44, 46, 47, 50, 51, 52, 53, 54,59, 60, 61, 63, 64, 69, 70, 71, 72, 74, 75, 78, 79, 81,85, 87, 93, 96, 98, 99, 105, 107, 109, 169, 190, 447, 505,510: n = A,T,C or G
  misc_feature 601, 641, 667, 698, 751, 792, 795, 804, 828, 833, 871, 877,879, 889, 907, 918, 951, 957, 980, 983, 984, 989, 995, 996,999, 1000, 1005, 1009, 1012, 1017, 1019, 1021, 1024, 1028,1030, 1047, 1063, 1071, 1073, 1079, 1081, 1094, 1101: n = A,T,C or G
  misc_feature 1110, 1116, 1120, 1125, 1131, 1132: n = A,T,C or G
nttnnnanntnnnnannatnnnntnnnnatantntatgatattntnnatnnnnnttttnnntnntttannnntnnatnntntagntnttgatntantnnttaggngncncccacgcgtccgaaaagtttttatttttggcaataaagagcacaacataatctccttcanaaaaaaaaaaaaaaaaaaaangggcggccgctagactagtctagagaaaaaacctcccacacctccccctgaacctgaaacataaaatgaatgcaattgttgttgttaacttgtttattgcagcttataatggttacaaataaagcaatagcatcacaaatttcacaaataaagcatttttttcactgcattctagttgtggtttgtccaaactcatcaatgtatcttatcatgtctgggatccccggggttacccgagctcgaaattaaatttcctntttccgcttcctcgctcactggactccgcttgcgctcgggtccgtttcggctgcggcngaagncgggtattcagccttcacttcaaaggccggtaaattacgggttatccaccaggaatcagggggattaaccgccagggaaaaagaaaccatnttgaagccaaaaaaggccaagccaaaaaagggcccagggnaacccgttaaaaaaaaagggcccgcngtttgccttggccgtttttttttccaattanggctcccggccccccccttgaccggaggccattcaacaaaaaaattccggacnccttaaaagttcaaaaaagggtggggcggaaaacccccggnccngggaccttnttaaaaggattacccaggggccgnttttncccccccttgggaaagctttcccctttgtggccgcctnttttcntngttttcccgnaacccttggccggttttnaacccgggaanaaccctggttcccgcccctttttttcccctttntggggnaaggccggtggggcggctttttnttnnataangctttnnccnnccttngaanggntattntntnaantttncnggggtaaaggtcggttnccgctcccaaaacctnggggcttngngggccncnaaaaccccccccnttttaanccccgaacngtttgnggcntttantcccgnng

SEQ ID NO: 8693 - DNA, 659 bp, Homo sapiens
  misc_feature 42, 301, 314, 315, 337, 343, 346, 354, 357, 362, 369, 371,373, 375, 378, 380, 394, 398, 400, 402, 414, 415, 416, 418,435, 437, 452, 455, 457, 466, 467, 477, 480, 484, 489, 496,502, 516, 517, 520, 525, 536, 538, 539, 546, 547, 554: n = A,T,C or G
  misc_feature 558, 567, 576, 577, 578, 584, 585, 603, 604, 605, 606, 609,611, 612, 617, 627, 628, 633, 638, 641, 644: n = A,T,C or G
cctcactaagggaacaaagctgggtaccgggccccccctcgngtcgacggtatcgataagcttgatatcgaattcctgcagcccgggggatccactagttctagagcggccgaggtaccaccacccattcgatatggaccaccacctcagctctgcggaccttttgggcctcggccacttcctccaccctttggtaagatgatctgaacagtagtaattgacttgtaaagcacattcatcttctccatctatcccttgctaaaacaactgcaattgcgggggcttttgcaatgcagccaantgaagctgatttnntaccttgcccgggccggccgcnaccggnggnggagcctncanttcgnccctaangngngnccnantaacccgcccccantggncngncgttttaaacgnnngngaccggggaaaaacccngnggttcccaaattaantgncntgagaaaanncccccttttnccnagtnggggntatatancaaaanaggccccccccganngcnctttnccaaaaatggncnnccttaanngggaaanggangcccccccnttagggggnnntaaagnnggggggggggggggggannnnccncnnggacnttaaattttnnagggnccaanagncgnccttttttttttttt

SEQ ID NO: 8694 - DNA, 644 bp, Homo sapiens
  misc_feature 352, 353, 389, 474, 526, 578, 591, 599, 618, 638: n = A,T,C or G
gcattaaccctcactaagggaacaaagctgggtaccgggccccccctcgaggtcgacggtatcgataagcttgatatcgaattcctgcagcccgggggatccactagttctagagcggccgcccgggcaggtacgcgggaacctggggctgaatcttcaacctgtcaaagccttcttaattatgtctgagaaaaggatcctgattgagtcaatgctttgcattctcagtcctctgcataaagctgagagatgcctacagctgagagtgaagcaaaagtaaaaaccaaagttcgctttgaagaattgcttaagacccacagtgatctaatgcggaaaaaaaaaaaaaaaaaannaaaaaaaaagtactgttcaacagagctttctgcagngatggaaaagttctgcatccgtggtgtcaagtgtggtggccactagctccacatggccactgagtacctcggccgccaccgcggnggagctccaattcgccctatagtgagtcgtattacgcgcgctcactggccgncgttttacaacgtcgtgactgggaaaaccctggcgttacccaacttaatcgncttgcagcacatncccctttngccagctggcgtaataacnaaaaggcccgcaccgatcgncctttc

SEQ ID NO: 8695 - DNA, 655 bp, Homo sapiens
  misc_feature 615, 643, 650: n = A,T,C or G
gcgtaatacgactcactatagggcgaattggagctccaccgcggtggcagcggccgcccgggcaggtacgcgggcttgctgatcgacttattggggtgacaacagatatgactctggatggaatcacctccccagctgaacttttccacctggagtccttgggaataccggacgtgatcttcttttataggtccaatgatgtgacccagtcctgcagttctgggagatcaaccaccatccgcgtcaggtgcagtccacagaaaactgtccctggaagtttgctgctgccaggaacgtgctcagatgggacctgtgatggctgcaacttccacttcctgtgggagagcgcggctgcttgcccgctctgctcagtggctgactaccatgctatcgtcagcagctgtgtggctgggatccagaagactacttacgtgtggcgagaacccaagctatgctctggtggcatttctctgcctgagcagagagtcaccatctgcaaaaccatagatttctggctgaaagtgggcatctctgcaggcacctgtacctcggccgctctagaactagtggatcccccgggctgcaggaattcgatatcaagcttatcgataccgncgacctcgagggggggcccggtacccancttttgntccct

SEQ ID NO: 8696 - DNA, 602 bp, Homo sapiens
  misc_feature 2, 12, 15, 108, 118, 139, 145, 158, 161, 179, 184, 193, 209,211, 225, 236, 237, 249, 271, 277, 301, 320, 323, 324, 327,329, 336, 341, 354, 356, 366, 380, 393, 403, 406, 413, 419,429, 468, 472, 481, 503, 511, 521, 523, 535, 550: n = A,T,C or G
  misc_feature 556, 566, 594, 595, 598: n = A,T,C or G
gncactattagnaanaactatgacgttcgcatgcacgcgtacgtaagacttgggatcctctaaagcggccgcacttttttttttttttttttttttttttttttaaanaaaatttctnattttactttttgctaaaacnacagcngggaaattgtaancanatggatgggcaatccccnccttnagcaggggnggccaaggccccaacncncctggggaaaaaanctgggggcagnnaatggctgaggnttttttggggagctgggccatntttttnggttttacttcctgaggaattcanaggcttccaggaggggggnggnngancnctttttnaaatnaaaaatgcctgcnanatactggggncccaaatatttttnatatgttgttttnccatggagtntgnccaaacnctcagngttgtcattnaacaaaaggtttttggtttcaaactggaataagcaaaanttgnccgggcagncaaatccatttttcccaaattnaacctgtngggggagcancncctgtttaaggngttccaccttatccntccganacaccacggnatgattcggggccatggcaaaatggcannttntacc

SEQ ID NO: 8697 - DNA, 455 bp, Homo sapiens
  misc_feature 2, 3, 4, 5, 426, 438, 440, 446, 447, 448, 450, 453: n = A,T,C or G
gnnnnagggcccgaatcactacttagggcgaattggagctccaccgcggtggcggccgaggtacgcggggctctcttccacaagcacaacccttcttcagacgtccatatacacttctcccaaaatcctgtgcttaacacattgttactgagcacacaggcgtgctggggcaagcgacgcctgggaatatgaagcgaacgccacacactagaacgcgccctgggagctggcctccggtgggggacgcaggtgttgaagacataaccgcatgaccgagaaacctcagttttgctctgaaggccttcaactgcccggccgctctagaactagtggatcccccgggctgcaggaattcgatatcaagcttatcgataccgtcgacctcgagggggggcccggtacccagcttttgttccctttagtgangggttaattgcncnctgggnnnantantg

SEQ ID NO: 8698 - DNA, 723 bp, Homo sapiens
  misc_feature 20, 32, 33, 538, 561, 583, 585, 593, 608, 611, 621, 627,632, 633, 650, 653, 654, 668, 674, 676, 684, 688, 691, 696,700, 705, 707, 715: n = A,T,C or G
gagcccgcgtaatacgactnactatgagggcnnattggagctccaccgcggtggcggccggtagcttctgataatgatgatgagaaacagaattctgatgatgaagaacaaccacagctgtctgatgaagagaaaatgcaaaattctgatgatgaaaggccacaggcctcagatgaagaacacaggcattcagatgatgaagaggaacaggatcataaatcagaatctgcaagaggcagtgatagtgaagatgaagttttacgaatgaaacgcaagaatgcgattgcatctgattcagaagcggatagtgacactgaggtgccaaaagataatagtggaaccatggatttatttggaggtgcagatgatatctcttcagggagtgatggagaagacaaaccacctactccaggacagcctgttgatgaaaatggattgcctcaggatcaacaggaagaggagcccattcctgagaccagaatagaagtagaaatacccaaagtaaacactgatttaggaaaccacttatattttgttnaactgcccactttctcagtgtanagcccaaccttttgatcctcantnttatgaanatgaatttgaagatnaanaaatgctggntgaaanaaggnnaaccaggttaaattaanggnngaaattccttttanatgggngnttcccccngatnaanaaggnattnaattnangaaagccntgctcggt

SEQ ID NO: 8699 - DNA, 516 bp, Homo sapiens
  misc_feature 2, 3, 9, 17, 443, 476, 504: n = A,T,C or G
gnngagctnttagggcnaattggagctccccgcggtggcggccgcccgggcaggtacattagtaattataacaatgcattaaaattttcatttcatgtcatagagaatcagttttcttcatgatacattatgttttactgagtgagtttgtccctccagagacctttctgggaacatgccttctccagggactgcttcctaagatgcccaggttgcttaccacaggtcatctttggtcatttaaaagcagtcaagctgtctggactgcaccctctcaactgaagttgagccaaattcccttctctcaaaccctaaccgccgccatcactaagagaatgggcatctcggcttgggcagagcattactaacaagctaatgtgggattctctttggttatgaatttttatttttatttaagacctcggcccgctctagaactaggntggatcccccgggctgcagggaatttcgatatnaaggcttatcgatacccgttccgacctngaggggggggcc

SEQ ID NO: 8700 - DNA, 658 bp, Homo sapiens
  misc_feature 23, 485, 508, 512, 521, 556, 574, 593, 616, 622, 630, 631,634, 635, 654: n = A,T,C or G
gactcactatagggcgaattggnactccaccgcggtggcggccgaggtacttttttttttttttttttttttttttaaatgtttttgttaaaaactaagacacatattagcctaggcctacacccggtcaggatcattcatatcactgtcttctgcctccacaccttgtcccactggaaggtcttcaggggtgtgatcgttaatactgagtgtcaaacttgactggactgaagaatgcagagtattgttcctggtgtgtctgtgagggtgttgccaaaggagattaacatttgagtcagtggactgggagaggcagacccccctcaatctgggtgggcaccatctaatcagctgccagcgcagctagaataaagcaggaaggagaagatggaagaatgacttgcagagtcttccagccttcatctctctcccgtgctggatgcctcctgccctcaacatcagactccaagttcctcagcttttanactcttggacttacaccagtggnttgncaggggctntttgggccttcggcacagactcaaggctgcactgncaactttccaacttttgnggtttgggacttaaacggntcccccctggcttctttgccctnacttgnaaacgggnnttnnggattttacctggggatcngggg

SEQ ID NO: 8701 - DNA, 493 bp, Homo sapiens
  misc_feature 2, 3, 4, 37, 42, 49, 224, 233: n = A,T,C or G
gnnnaggcccgaatcactactatagggcgaattggancttcnccgcggnggcggccgcccgggcaggtacacaagcccaggtaagcataccaagcaagccccctcacaccttttgtctgaaaaaagcttgacttctttgcagcaatgtctcgcccattccagcagcagtatctcagttaacttggttccttttcctccaggctcaaaacaaaatcaaactcttnctgggtcanggggctggattgataatctcatggaccacttagggttgtcctctttgctagatgggtcataatggggattgtttttctcaaactgtgtgtggtctgggtaagcctctttcacgatcttcatgagtcctgcgatgcctggctctttgcagttgctatggtagaagaaggcttcttctcccagcttcatggctctaaggaagttccgagcctggtagttaccaacaccatcccagcatgttgtctggttgggctgtgctttg

SEQ ID NO: 8702 - DNA, 645 bp, Homo sapiens
  misc_feature 500, 515, 537, 549, 551, 553, 559, 564, 578, 610, 617: n = A,T,C or G
ctcactaagggaacaaaagctgggtaccgggccccccctcgggtcgacggtatcgataagcttgatatcgaattcctgcagcccgggggatccactagttctagagcggccgaggacatcattccaccctgttccagacgtggagccctccctgggcatccagtgagatattggcagtcccacttggttcttggccatactgattatgccaccatctgctggtctatcgaagagcatttcagatatgtagactttcttccttttttattctgcaaatgaaaaacgattcttcaaggatataggaaagttatggggccaccttggaacttctctacctctgatacccacccccgccccgcactcaatccagccatctcttttcaagttttatcataccttgatagagtgaaaagctccttcagaagagtttgctgtcagggttcagagggaaagcagacatgggcagctctgctctcaagccctgtacctgcccgggcggncgctgccaccgcggnggagctccaattcccctatagngagtcgattacncncnctactngccgncgtttaaaacgcgngactgggaaaaccctggcgtaccaactaatgncttgganacatccccctttcccagctggggtaaag

SEQ ID NO: 8703 - DNA, 829 bp, Homo sapiens
  misc_feature 27, 69, 108, 198, 264, 288, 293, 295, 382, 470, 498, 515,528, 537, 555, 557, 562, 588, 592, 610, 611, 613, 623, 626,638, 640, 646, 647, 656, 664, 666, 671, 675, 676, 681, 682,686, 688, 690, 698, 714, 719, 721, 728, 735, 736, 742: n = A,T,C or G
  misc_feature 743, 746, 752, 761, 762, 773, 776, 782, 790, 794, 802, 804,809, 811, 826, 827, 829: n = A,T,C or G
ggagctccccgcggtggcggccgaggnacttttttttttttttttttttttttttttttgccctcccanattctcagtcctttggtgatcacttaactggacaatcanaaatgaatgaaatccacttttccaaacaagacataccaagagaagcccgagcagctcacctgggtcattggctaacacagacatcacctntcaatagggtttcaattacagacaataaggtcacccagaggaaatcaaacattcttttttgttaanaaaaaggaagtaacccataattgngctananaagcaaaggcccagggaaggctgccctgtggctggaatgagcctttcttttttagcctataggtcaaaggaaattgaaggaaatganctggcaggagtggaggcggtagggaacggggcgggggaggaagggggaggatttttttccccaaaccaaaccctgattttggattatntttaaaccaccaagggcataccgtaatntgaccagggtcccaccnttcctgaggggtnacagcaccngttcccaccctttttccntnccccnagggttctggggccaattttttgaanacancttttttccacagctttnngnacccctgggnttnttttaaacccangnccccgnntggggaaantgaaaaanangcctnggcnntcccnnaagngntncccggggncccccccccaaagggnatatngnggggggntttgacnnggaaannctncctttngttatcctnnaaacctttggncanggcccnccccttancaanttttgggntnttgcncnacaaatttgtttttnntn

SEQ ID NO: 8704 - DNA, 699 bp, Homo sapiens
  misc_feature 2, 4, 5, 7, 9, 10, 12, 14, 15, 18, 22, 28, 38, 60, 96, 159,218, 250, 255, 309, 332, 346, 354, 360, 374, 377, 384, 391,395, 416, 422, 442, 445, 448, 456, 463, 475, 478, 481, 488,490, 494, 497, 498, 500, 506, 509, 510, 514, 517, 518: n = A,T,C or G
  misc_feature 521, 522, 523, 525, 527, 528, 531, 534, 536, 537, 539, 540,541, 550, 554, 555, 556, 558, 562, 570, 572, 577, 579, 580,581, 583, 584, 586, 590, 591, 597, 598, 599, 601, 603, 604,606, 608, 614, 619, 621, 622, 624, 625, 626, 627, 628: n = A,T,C or G
  misc_feature 629, 630, 631, 635, 636, 638, 641, 643, 644, 645, 648, 649,650, 652, 656, 659, 661, 662, 663, 665, 666, 670, 671, 674,675, 676, 680, 682, 686, 689, 693, 699: n = A,T,C or G
cncnncntnntncnnctncctntaaggncgacttggtntctccccgcggtggcggccgcngtacttttttttttttttttttttttttttttttgngggaaaagaaaaataaactatagtttttgtcattaagtttactagtccaaaataatgtatagnaattggttaccaagttggaagaatcaggtaatatttatgataaaatcatggcattcctnaaagaaaactattttcagtgcttcctaaagtntatancaaacatgatgtaaattataaaacttataactaaaacaacaaataaaagttttntcaattatttaaggtaaaaatanaaaccttggactgnttctcttnaattantgatacctaaagtnaancaaaggngtgagtnatcnggaactaacagtttggggaangacctntaaaacatcaaatgggtttnctnggnctctattntaaatanagggccccattnagnccncttgggnanccanctnngnagaccngcnnttgnagnnccnnntngnnganccnanngnnnttttgattntcannntnaaanatgataantncacanannnannanagtnnggtttnnntncnnantngtccgnttctntnnannnnnnnncttnnanccnannnaannngntatnctnannnanntatnntcnnntaantnttgnacnaaanaaaaan

SEQ ID NO: 8705 - DNA, 815 bp, Homo sapiens
  misc_feature 4, 5, 6, 13, 17, 509, 522, 632, 637, 684, 703, 711, 801, 810: n = A,T,C or G
gagnnnttcagtnccgncacgcgtccgaacttatataggcaaaatctcccatcattttattaatatgttaataggtttgtgaattgtttccaaacccatttgcttagtggaactactttagtagaagatacaaatgaaaaaccatggtcactcttcttacacatttttatgagtagctaaattctagcaaggaaggtagatgaaagaacataattttgagaataacacttttgagagtaacggagaaggagtgacaacataaactaaacatccgaagacgtgtggtaggcaagaattctaaagatgccctgcacccccatccctgtctcctggttattccttgtatcactaatgtaggtcaataagtccttacttaacatcatcattaggttcttggaaactgtgactttatttttcttttctttccttccttttcttttttttttgggagacagggtcttgtcatgctgcccgggctggtctctgatgcctggcctccagtggtcctnctacctaggcctnccaaagcgttgggattacaggtgtgagccactacacctggccaaaactcaaagtgaaaagttaccaagaacctatccgtgatgctaggttttgacgacttactggactgntttgnaggacttttaagattaagaaacaacatggattctaggcctgggctgncggacttacccatcaaggngaccctgncaaggaccccgacctcctgagcctggtccttattgcggggttaatgccatggcttggcatgcttccagtggtgaggaaacctaagtttgngcatgaagnactgg

SEQ ID NO: 8706 - DNA, 423 bp, Homo sapiens
ggcgaattgtagctccccgcggtggcggccgaggtacatgcggtagtgacgggttacagtcccgtgggcagcctctgcttctactgtcttgccatctggacaaaccagcacgctggtcatcatgccgagagagccatacccttgggccacagagtccgactgcacgtcaccatcatagtttttacaggcccagatgaagcctccctctgatttcatagcttgggccaccatgtcgtcgatgagcctatgctcataccagatcttttgagcttcaaactgggacttgtacctgcccgggcggccgctcgacgcaggaaagaacatgtgagcaaaaggccagcaaaaggccaggaaccgtaaaaaggccgcgttgctggcgtttttccataggctccgcccccctgacgagcatcacaaaaatcg

SEQ ID NO: 8707 - DNA, 640 bp, Homo sapiens
  misc_feature 6, 9, 13, 26, 41, 422, 454, 458, 460, 471, 482, 492, 508,531, 561, 562, 566, 577, 586, 594, 604, 614, 620, 629, 630,631, 637: n = A,T,C or G
ccactnttncggnccgacctgctcantgacaatttcacagnattccttggtgtctttctccgctgagattttgtcacggacactatgtgaaccccttgtggcgtctctctggatgaaactggggaacacgggggccatgagaaggtgtgtgaagctaacagtcgctcttgagactgctgaatgtgaattcccccctcacctggatgtatatatagaagacccacacttgcctccctcactaggactacttccaggagcccgggtccacttcagccagttggagaaaagggtttccagatctcacaatgtttattgttgtttccggtcatccacttatgtgcaggtcctgagttttccccctgagaccaccatcagcgttcccctgccccacatctacctgggctgaacttctgcaagggggncagtccccatttcaagccactggcttttggcntatngnctttgtctttnacccttaactntttttggggnggggcttattggaccnacctttggccgccgggaaaggcnctccccctgggcttcactttgccctacccnnacangttttaacccnggccttatnaggttctngggggagaanggactgcccnaacccnggggaaccnnnaggaanaac

SEQ ID NO: 8708 - DNA, 650 bp, Homo sapiens
  misc_feature 1, 6, 15, 20, 22, 35, 37, 70, 604, 628: n = A,T,C or G
ngcgtnatacgactncactntnagggcgaattggnanctccaccgcggtggcggccgaggtacgcggggnactgttgcgactggcatccgcatccggcagatgtagatggaaccaaagtccagaagttacgcgtcacccttgctctacagccaaacatgcaggactctagtaacccgcgaaatgatgggatagcgttgcaaatccttaaaagagtcttaacgaaatcctggctgacattgacttctccactgcaaccatcgagttcattgtctcctaaaccttgccatggaggcctgtggcacctgagccagccattatcatcaccagcacttccatgagctacaagctggacccactgcagtcctcctgacacactgaaatcagagcctgcacacagagcagcagatgcttcaatgtaaaggtcatttccaggtccttgacaggcgtgcatctgggccagatccatggcaataaccttcaggttgaggctagagggcttcagatgggcagcttcgaatgacaggagcaaggcacaagaggccggaaagggaagggtgacattttcagcatctataagatcaactttagaaacattttgggggntgacaaattcccatcaagctctgnggatcttgcacctgcccgggcg

SEQ ID NO: 8709 - DNA, 672 bp, Homo sapiens
  misc_feature 3, 5, 607: n = A,T,C or G
ctntncggcgaattggagctccaccgcggtggcggccgaggtaccctgggactcatacctgaaagcagtgttcaaccttagcaaaatctccaaccagcgcatgaacaattttctacatcacaacgacctggttttcaaattcagctctcaaggccaaatcttttctaaatttaaccaagaacttcatcagttcacagagaaagtaatccaggaccggaaggagtctcttaaggataagctaaaacaagatactactcagaaaaggcgctgggattttctggacatacttttgagtgccaaaagcgaaaacaccaaagatttctctgaagcagatctccaggctgaagtgaaaacgttcatgtttgcaggacatgacaccacatccagtgctatctcctggatcctttactgcttggcaaagtacctgcccgggcggccgctctagaactagtggatcccccgggctgcaggaattcgatatcaagcttatcgataccgtcgacctcgagggggggcccggtacccagcttttgttccctttagtgagggttaattgcgcgcttggcgtaatcatggtcatagctgtttcctgtgtgaaattgttatncgctcacaattcacacaacatacgagccggggagcataaagggtaagcctggggtgcctaatgag

SEQ ID NO: 8710 - DNA, 620 bp, Homo sapiens
  misc_feature 4, 5, 25, 218, 251, 275, 297, 306, 327, 340, 341, 349, 356,357, 381, 383, 384, 427, 437, 460, 462, 475, 482, 507, 522,551, 573, 575, 583, 587, 591, 608, 609, 611, 619: n = A,T,C or G
gggnnagaccacccggttccgaccncccgtccgcgacaaggcacctcctggtgtctaactcccccaaagacaatgagttaagggagagaataagaacggcggtaacagttattggcaaaaagcatgaaaagagaaagcactttgaaatttattactagcttgctacccacgatgaaatcaacaacctgtatctggtatcaggccgggagacagatgangctgagaggaggaggaggaggaggagaaggctntgggctcctctataaaaataaaantcaaaaaataaataaaattttnaaaattatnaaaattcactatatacacatntaaagaaataaanngaagtctnatttgcnnctattcgtcaaaattaatatccantnntttttatatacggtgaatattgcgcaattatagatctggattntgaaccactnaatgaagcggcaacaccaggtgntntgaggtgttggcnttcttcnctgatttggctgttcccaatgtttncattatttaatcttncaaaaatggttgtgtgcacttggatgtgnaatgctgtccagtctaattgantnaatgatgnaatncctngatgtacaaaaaattcnnanaatgatcnc

SEQ ID NO: 8711 - DNA, 645 bp, Homo sapiens
  misc_feature 19, 504, 585, 597, 620, 627, 635, 637: n = A,T,C or G
gcaattaaccctcactaanggaacaaagctgggtaccgggccccccctcgggtcgacggtatcgataagcttgatatcgaattcctgcagcccgggggatccactagttctagagcggccgaggtacgcggggaacacatccaagcttaagacggtgaggtcagcttcacattctcaggaactctccttctttgggtctggctgaagttgaggatctcttactctctaggccacggaattaacccgagcaggcatggaggcctctgctctcacctcatcagcagtcactgggagcaactggactctccggattgaccaagttcatcctgggcttcattgggtctgccattgcggctgtcattgcgaggttctactagctccctgcccctcgccctgcagagaagagaaccatgccaggggagaaggcacccagccatcctgacccagcgaggagccaactatcccaaatatacctggggtgaaatataccaaattctgcatctncagaggaaaataagaaataaagatgaattgttgcaactcgaaaaaaaaaaaaaaaaaaaaaaaagtacctgcccgggcggncgccaccgcggnggagctccaattcgccctatagngagtcgnattacccncnctcactgc

SEQ ID NO: 8712 - DNA, 612 bp, Homo sapiens
  misc_feature 10, 11, 12, 13, 23, 41, 49, 93, 331, 351, 352, 353, 363,366, 368, 373, 377, 379, 380, 382, 383, 402, 411, 412, 416,423, 425, 427, 431, 435, 436, 439, 441, 446, 448, 452, 458,459, 465, 466, 467, 468, 469, 470, 471, 472, 474, 475: n = A,T,C or G
  misc_feature 477, 488, 492, 496, 499, 500, 503, 504, 507, 509, 510, 513,517, 518, 520, 523, 531, 533, 537, 538, 542, 544, 565, 566,567, 568, 569, 573, 574, 575, 582, 587, 589, 591, 592, 595,599, 600, 601, 602, 607, 608, 609, 610, 611: n = A,T,C or G
cccccctcgnnnntacttctagnaattaattaacgcggggnaagggagnacagttctgctgaagaactgaaactggccacccagctgaccggnaccggtcatgcccgtccggaacgtctataagaaggagaaagctcgagtcatcactgaggaagagaagaatttcaaagccttcgctagtctccgtatggcccgtgccaacgcccggctcttcggcatacgggcaaaaagagccaaggaagccgcagaacaggatgttgaaaagaaaaaataaagccctcctggggacttggaatcaaaaaaaaaaaaaaaaaaaaaaaaaaaaaaaaanaaaaaaaaaaaaaaaaaaannncaaaaaatgnggngnaactnaaanannannttaatggggcccgtcaccnggggggacnntccnttccccntntngggngtcnnttnanccccncntggngtcccnnttttannnnnnnngnncntgggaaaaccnttgntttnccnnttnntancnnttnggannanatncaattttncntccnntggntntttccttaaagaggccccgannnnnaagnnnttttgcnaaaantntnntgncccnnnnttggnnnnng

SEQ ID NO: 8713 - DNA, 412 bp, Homo sapiens
agcgcgcgtaatacgactcactatagggcgaattggagctccaccgcggtggcggccgcccgggcaggtacccgggcgtgtgaggtgtcagtctgcccctacttgggggtgcctcccagttaggctactcgagggtctgggacccacttgaggaggcagtctgtccgttctcagatctccagctgcgtgctgggtgctgggagaaccactactctccccgcgtacctcggccgctctagaactagtggatcccccgggctgcaggaattcgatatcaagcttatcgataccgtcgacctcgagggggggcccggtacccagcttttgttccctttagtgagggttaattgcgcgcttggcgtaatcatggtcatagctgtttcctgtgtgaaattgttatccgctcacaatt

SEQ ID NO: 8714 - DNA, 660 bp, Homo sapiens
  misc_feature 2, 22, 623, 646: n = A,T,C or G
gnctcctatagggcgaattggngctccaccgcggtggcgtgaggtttctcacactcatgaaaatgaaaattatctcttacatgaaaattgcatgttgaaaaaggaaattgccatgctaaaactggaaatagccacactgaaacaccaataccaggaaaaggaaaataaatactttgaggacattaagattttaaaagaaaagaatgctgaacttcagatgaccctaaaactgaaagaggaatcattaactaaaagggcatctcaatatagtgggcagcttaaagttctgatagctgagaacacaatgctcacttctaaattgaaggaaaaacaagacaaagaaatactagaggcagaaattgaatcacaccatcctagactggcttctgctgtacaagaccatgatcaaattgtgacatcaagaaaaagtcaagaacctgctttccacattgcaggagatgcttgtttgcaaagaaaaatgaatgttgatgtgagtagtacgatatataacaatgaggtgctccatcaaccactttctgaagctcaaaggaaatccaaaagcctaaaattaatctcaatatgcaggagatgctctagagaaatacttgggtttcagacatgcncaaagagaccacgtgaacccagngtcaatgaaggaac

SEQ ID NO: 8715 - DNA, 660 bp, Homo sapiens
  misc_feature 532, 541, 547, 594, 603, 618, 638, 655, 659: n = A,T,C or G
tatagggcgaattggagctccaccgcggtggcggccgcccgggcaggtacgcggggcatataaaatgcagttctgatcctgtcacctctctgcttaaaactcttcagaggttcaccatcgcttccagaaaaagatcaatactcctgacgtggcaacctgtcgagactcaggaccgctaggaaatcagctcttgtttacccctctatccattacactacgatccagctgggtttaggcatcacttcctctgagcaatcctccctgatgtcatgaggcagtgctgagtgccttctctggaccccctgtttacttgcctgttaaatcctgaacatctggaagggagtcgtgttcagcaacatatctacgccttgcagcacggtgcctggcctgcagctggtgttccgtaaacagctgctgactgacgggatgcatcgccaattctagatttgagtcaattctagagaccaccatggtggagagtgcatatgcaggcacgccagttaactgatctggcttagcccagccctccagncattcctgncaaggngtcaatgtgagtgaaaccatcttgaactctgatattaacttattctncagctgaanttaccaagaaaccgncttttgatgctacatggagnggacattttccaactgngctnt

SEQ ID NO: 8716 - DNA, 588 bp, Homo sapiens
  misc_feature 2, 5, 11, 14, 19, 22, 23, 37, 282, 326, 328, 329, 331, 336,361, 380, 389, 412, 420, 428, 430, 441, 452, 453, 457, 463,471, 488, 491, 505, 509, 511, 521, 525, 527, 528, 531, 534,550, 571, 574, 584: n = A,T,C or G
gncgngtgcgnttnaaacnggnncaccacgcgccggngagatggagcagggaagtacagagtgggatggtcaggacctgggccattgcaaccaaaatggggacttcctgggtagggaggtcactccctctactcactgagctaggattagggagggttattgccccaaccattgcaatgggaggtggagggacaggctcagcctcctcattgtctaaatgaggcctaaatgtgtgaagtgcgatttctgcttttgtgtaccccaccaccccattaccacagntgcctttgtgtgtttgtgtcaataaaaagccaaacccttgcaangnnangtggngggacaggctcaacctcctcattgnctaaatgaggcctaaatgngagaagtgntgatttctgcttttgtgtacccnaccacccnattaccananctgcttttganagtaaagtgtnnatanaaagcnacgccctngaaaaaataaaaaaaanctnactattggcaaaanctantntttgcctgantaangnnttnaanaaaatatttttacctncattttcaaaaggggggctcnttnacttgtttantgaa

SEQ ID NO: 8717 - DNA, 512 bp, Homo sapiens
  misc_feature 1, 3, 384: n = A,T,C or G
nanccgagcgcgcgtcatacgactcactatagggcgaattggagctccaccgcggtggcggccgcccgggcaggtaccctctttcccttcccaccccccaattaaaggcaaacaatggcactttgctcttgcttaacctagattgtcttcaaaaactattaaaatgtaaaagacttaacaaaaaaacaaaaagacgtttaacagatgtcaaaaggctccttagtgtttgaaaataaatgcttaaacaaaagacaacatattttatatcaaacaagtttgaagagccctgaattgcagcattctgtaacataaacaaacaaaaagctggtataggatttattgtcaaaggcagaatttcttcaggcaggtaagtaaggaggtggntggttctttttcagacattttcacggccatttcataggttggcaaaacgtacctcggccgctctagaactagtggatcccccgggctgcaggaattcgatatcaagcttatcgataccgtcgacctcg

SEQ ID NO: 8718 - DNA, 890 bp, Homo sapiens
  misc_feature 4, 6, 8, 10, 434, 555, 608, 610, 637, 645, 653, 657, 658,671, 688, 691, 730, 744, 746, 748, 749, 761, 775, 793, 800,809, 829, 830, 839, 846, 847, 864, 878, 881: n = A,T,C or G
gtgnantntntacgactcactatagggcgaattgggccctctagatgcatgctcgagcggcccgccagtgtgatggatatctgcagaattcgccctttcgagcggccgcccgggcaggtacgcgggggtagtagccatggcggccatgagtttattgcggcgggtttcggttactgcggtggcagctctgtctggccggccccttggcactcgcctcggatttgggggcttcctcactcgtggctttccgaaggctgctgctcctgttcgacacagtggagaccatgggaaaagactatttgtcatcagaccttctagattctatgacaggcgttttttgaagttattgagattctacattgcattgactgggattccagtagcaattttcataactctggtgaatgtattcattggtcaagctgaactagcanaaattccagaaggctatgtcccaaaacactgggaatattataagcatcccatatcaagatggattgcccgtaatttctatgatagtcctgaaaagatataggaaaagaacaatgggccgtncttcagattgaaacctgaaaaggctgaattaccggtaaaggagctggaaagtncnaaaaattgatgcatgtgagaagagatnggcctggnttttactnttanncaaattggacaanggaacttatttgattanttnttccgaaagcaaccttcttgacaattaagcatttttttntccaaaagcaaagngntnnttcttttttttnggaaaaaaaaaatnaaaaaaatatatcccggnatttttnccctcgggnaaaaacaaaaaaaccttttnncattacctncttttanngttgggtcaaaattgangcttttgttttgangantttggcttt

SEQ ID NO: 8719 - DNA, 669 bp, Homo sapiens
  misc_feature 589, 593, 601, 604, 650, 659: n = A,T,C or G
cctcactaagggaacaaaagctgggtaccgggccccccctcgggtcgacggtatcgataagcttgatatcgaattcctgcagcccgggggatccactagttctagagcggccgaggtacactgcagcctccaactcctagcctcaagtgatcctcctgtctcaacctcccaagtaggattacaagcatgcgccgacgatgcccagaatccagaactttgtctatcactctccccaacaacctagatgtgaaaacagaataaacttcacccagaaaacacttaaaaaaaaaaaaaaaaaaaaaaaaagtacgcggggtccgccacggccgccaccgcggtggagctccaattcgccctatagtgagtcgtattacgcgcgctcactggccgtcgttttacaacgtcgtgactgggaaaaccctggcgttacccaacttaatcgccttgcagcacatccccctttcgccagctggcgtaatagcgaagaggcccgcaccgatcgccctttccaacagttgcgcagcctgaatggcgaatgggacgcgccctgtagcggcgcattaagcgcggcgggtgtggggggtacccncagngtgaccgntanacttgccagcgccctagcgcccgctcctttggtttttttcctttcntttttgccnagttcggcgg

SEQ ID NO: 8720 - DNA, 625 bp, Homo sapiens
  misc_feature 2, 24, 27, 34, 57: n = A,T,C or G
cngcgcgcattaaccctcactaanggnaacaaanctgggtaccgggccccccctcgngtcgacggtatcgataagcttgatatcgaattcctgcagcccgggggatccactagttctagagcggccgcccgggcaggtacgcggggaggctcctggggtggagtccaaatcactcattgtttgtgaaagctgagctcacagcaaaacaagccaccatgaagctgtcggtgtgtctcctgctggtcacgctggccctctgctgctaccaggccaatgccgagttctgcccagctcttgtttctgagctgttagacttcttcttcattagtgaacctctgttcaagttaagtcttgccaaatttgatgcccctccggaagctgttgcagccaagttaggagtgaagagatgcacggatcagatgtcccttcagaaacgaagcctcattgcggaagtcctggtgaaaatattgaagaaatgtagtgtgtgacatgtaaaaactttcatcctggtttccactgtctttcaatgacaccctgatcttcactgcagaatgtaaaggtttcaacgtcttgctttaataaatcacttgctctccaaaaaaaaaaaaaaaaaaaaaaaaaaaac

SEQ ID NO: 8721 - DNA, 676 bp, Homo sapiens
  misc_feature 3, 6, 13, 23, 44, 589, 594, 599, 601, 606, 636, 639, 648: n = A,T,C or G
ttnttnactatgnctgtgtaatnctagtgcttgcaatccacctnctacttggtggcatctgtctgtccttcaatttaaaagtagctgattacagtgtaatcttaactttattatggctttaatagaagtgattgttttaattttatatacctttttcttattgttaggattagaaatgtaatattttcagctttctttgttctcaacgaaagttgggggaaaaaagccatctttatgagaaacatcattagtaattggaaattaaacaataagtgttttctgaaagaattaatgaataaatggaaaaacgaagttagaatttagtaatatatttcaaatcataacaaacatgcaaaagcctacacttaaactcagccctgaagacacagtaaggtttgtgtgtagcacattgcttagataaattaatttccacattactcatcagatttggtattttgaagtttgtcagagactgatctcccagataattcatcactatgttttaatacgtctatcaactctctgatctgtgtggatagtttcttaaaatatcaaaagattcaacccaatatctagctacataacttgntttgnaatgnancaagnttctcacttgcttttgatcccgcgtacctnggncgcccccgngggggagctccaattcgccctatagtgc

SEQ ID NO: 8722 - DNA, 648 bp, Homo sapiens
  misc_feature 23, 72, 443, 451, 463, 469, 490, 533, 539, 541, 576, 578,592, 600, 614, 616, 617: n = A,T,C or G
gactcactatagggcgaattggnactccaccgcggtggcggccgagtactgggctgtggcacagccttcganacaacacgggtgtatctctgatcctgccctacctaggcttcaaggggcttctgtctggagaaatgccctcaaagggtaaccagtaggtgtggcattgaattggccagtgttagcatctacagccatcaccgagatgagtttgcctgcccgagggccccctaaggttatagacggtatcagcagggaggccgtcccgctggttttctaggagagcccacaggaggaagggagcctcttcaggggcactggaatcttttgtgccaggggcttcttttcatcagagcccgggagtacctgcccgggcggccgctctagaactagtggatccccccggctgcaggaattcgatatcaagcttatcgataccggcnacctcganggggggccccgnacccanctttttggtccctttagtganggttaaatgcgcgccttggcgtaatcatgggcatagctggttnctgtgngnaaatgttattccctcacaaattcccacaacatacnanccggagcataaaangtaaaacngggggcctatgagngnnctaactccattaattgggtgggcccactgcc

SEQ ID NO: 8723 - DNA, 637 bp, Homo sapiens
  misc_feature 2, 8: n = A,T,C or G
gncctttnttttttttttttttttttttttttgtttgaatattgactttattaggaaaacatttgatagttctattcggtcatataatcaatcacctaattttaaaactatgtggccaggaggacatcaattacaatatggatttttcattcattcaacgaatatttgagcacctacaagtgccagacattggaggtacagggtaaacaggaggatccttgctctcacggagcttacattctagcaggaggacaatattaatgtttataggaaaatgatgagtttatgacaaaggaagtagatagtgttttacaagagcatagagtagggaagctaatccagcacagggaggtcacagagacatccctaaggaagtggagtttaaactgagagaagcaagtgcttaaactgaaggatgtgttgaagaagaagggagagtagaacaatttgggcagagggaaccttatagaccctaaggtgggaaggttcaaagaactgaaagagagctagaacagctggagccgttctccggtgtaaagaggagtcaaagagataagattaaagatgtgaagattaagatcttggtggcattcagggattggcacttctacaagaaatcactgaagggagtaatgtg

SEQ ID NO: 8724 - DNA, 902 bp, Homo sapiens
  misc_feature 18, 37, 157, 192, 253, 274, 346, 349, 355, 378, 412, 425,439, 456, 465, 482, 484, 507, 520, 539, 542, 550, 557, 571,586, 597, 608, 637, 649, 665, 669, 701, 727, 728, 737, 744,754, 769, 771, 774, 784, 785, 797, 811, 814, 815, 819: n = A,T,C or G
  misc_feature 833, 836, 860, 863, 872, 875, 879, 885, 887, 896, 900, 901: n = A,T,C or G
gggagcgcgcgtaatacnactcactatagggcgaatnggagctccccgcggtggcggccgaggtacaagctttttttttttttttttttttttttcgggatggtgaaaagatatatatatatatatattcagaattaggcagctggactcagtttanatgatcccaattttgttggcaacatccaaagcatngtaatcaggagccagtcgaacatatgccttcttctctccatcaggccgaatcaagggtgtngaccttggccacatcaatgtnatacagcttcttcacagcctgtttaatctggtgcttgttggctttaacatccacaatgaacacaagtgtgtnggngggctnctatcttcttcatggcagactcnatggtcaacgggaaacttgatgatagcatagtgntcaagcttgtttnttctgggagccctntttccaggatatttggnctgtcttcngaagtcccaatgtcttngncccctctaaaactagtggatccncgggctgcagganttcgaaattaagcttattnatnccgtacancctcgangggggggccccggncccaacctttggttncctttaatganggttaaatgcncccttggcgtaatcatgggcataggctgncttcctggggtnaaaattgttatcccgntccnaaattcccaacaaaaaaccaagccgggagcantaaagtgtaaagccccggggggcccnntggagtgancttcctncatttaattngcgttcccccccctngnccnttttccaatnngggaaaccctgncttgccacttgaantanngaancgggcccccccccnggnaaaggcggttttctttttgggggnatnttcccttcnttntttnattaantnattggcccngggnnt

SEQ ID NO: 8725 - DNA, 721 bp, Homo sapiens
  misc_feature 2, 3, 4, 16, 23, 25, 42, 479, 482, 483, 484, 485, 486, 487,488, 489, 490, 491, 492, 493, 494, 495, 496, 497, 498, 499,500, 501, 502, 503, 504, 505, 506, 507, 508, 509, 510, 511,512, 513, 514, 515, 516, 517, 518, 519, 520, 521, 522: n = A,T,C or G
  misc_feature 523, 524, 525, 526, 527, 528, 529, 530, 531, 532, 533, 534,535, 536, 537, 538, 539, 540, 541, 542, 543, 544, 545, 546,547, 548, 549, 550, 551, 552, 553, 554, 555, 556, 557, 558,559, 560, 561, 562, 563, 564, 565, 566, 567, 568, 569: n = A,T,C or G
  misc_feature 570, 571, 572, 573, 574, 575, 576, 577, 578, 579, 580, 581,582, 583, 584, 585, 586, 587, 588, 589, 590, 591, 592, 593,594, 595, 596, 597, 598, 599, 600, 601, 602, 603, 604, 605,606, 607, 608, 609, 610, 611, 612, 613, 614, 615, 616: n = A,T,C or G
  misc_feature 617, 618, 619, 620, 621, 622, 623, 624, 625, 626, 627, 628,629, 630, 631, 632, 633, 634, 635, 636, 637, 638, 639, 640,641, 642, 643, 644, 645, 646, 647, 648, 649, 650, 651, 652,653, 654, 655, 656, 657, 658, 659, 660, 661, 662, 663: n = A,T,C or G
  misc_feature 664, 665, 666, 667, 668, 669, 670, 671, 672, 673, 674, 675,676, 677, 678, 679, 680, 681, 682, 683, 684, 685, 686, 687,688, 689, 690, 691, 692, 693, 694, 695, 696, 697, 698, 699,700, 701, 702, 703, 704, 705, 706, 707, 708, 709, 710: n = A,T,C or G
  misc_feature 711, 712, 713, 714, 715, 716, 717, 718, 719, 720: n = A,T,C or G
gnnngaggaccgttangcgcgtnancgacttactatagggcnagattggagctccaccgcggtggcggcccgcccgggcaggtacctctttgatgaatgagcctggcagaccccgaatcgcatttaagtgaaagccatagccattttcacctttagccagcctgcagagtttaggcttatgatctacttcctctgtagtatctggtggacttgagacttccagagaagtgggagtaggagctggagcctccttgacagagccattgggcagttcttgactttgatagtagagaaatggagaaaaatgagccagtctgtacctcggccgctctagaactagtggatcccccgggctgcaggaattcgatatcaagcttatcgataccgtcgacctcgagggggggcccggtacccagcttttgttccctttagtgagggttaattgcgcgcttggcgtaatcatggtcatagctgtttcnggnnnnnnnnnnnnnnnnnnnnnnnnnnnnnnnnnnnnnnnnnnnnnnnnnnnnnnnnnnnnnnnnnnnnnnnnnnnnnnnnnnnnnnnnnnnnnnnnnnnnnnnnnnnnnnnnnnnnnnnnnnnnnnnnnnnnnnnnnnnnnnnnnnnnnnnnnnnnnnnnnnnnnnnnnnnnnnnnnnnnnnnnnnnnnnnnnnnnnnnnnnnnnnnnnnnnnnnnnnnnnnnnnnnnnnnnnnnnnnnc

SEQ ID NO: 8726 - DNA, 880 bp, Homo sapiens
  misc_feature 92, 93, 496, 526, 597, 598, 648, 686, 688, 691, 699, 715,728, 741, 742, 753, 776, 785, 791, 796, 804, 818, 826, 828,831, 840, 848, 849, 855, 874, 877, 878, 880: n = A,T,C or G
cgcgcgtaatacgactcactatagggcgaattggagctccccgcggtggcggccgaggtacttttttttttttttttttttttttttgggannttttggttttttgggggtttttttggcagccacaggagttttagccaattcagatgccttgctccccacaatttggaacattcctttggatttgaccaagtcaggaagagatgggagagaagtgaaacagcaacaataaaccccaaacataaacaaaaagagttaagcaaaacaaacaaatgcacaatccatgtgattactgagtgttctaatggtaaggagaaattaaaagcagctggtgggtcatcttaaattttagtcattaaggaaaaattttaagacaaactctaattcagctacttacctggaaataaggctcaggctggttgattgttctctgccatcttagatgctggaaaaaacttacactcaccttgcctgtcagaagcaagctgaaactcangaaaagaggtgcctgctctcctttgtcatngaagcaggaaaacttgccttcttgttggaaaatgagcaaaactttagaaaagggagtttgaccttgccccnngcggccgctctagaactaggtgggatccccccgggcctcaaggaatttcnatatccaagcttatttggataccgttgaacctcgaagngnggnccccgggnccccagctttttgttnccttttaattgangggttaaatttcnnccctttgggcngtaaatcattggtcattaagctngttttcttngggtgnaattngttattcngcttaccaatttcnccaaactntncanacccggtanccttaaanngtaaangccctgggtgcctaaatangannan

SEQ ID NO: 8727 - DNA, 441 bp, Homo sapiens
gggcgaattggagctccccgcggtggcggccgcccgggcaggtacatgactgatattacacctcaaggtgtggctatgagagctggagttctggctgatgatcacttgattgaagtgaatggagagaatgtagaggatgccagccatgaggaagtggttgaaaaggtgaagaagtcaggaagccgtgtcatgttcctgctggtggacaaagaaactgacaagcgtcatgttgagcagaagatacaattcaaaggagaaacagccagtttgaaactgttaccccaccagccccgaattgtggagatgaagaaaggaagcaatggctatggtttctatctgagggcaggctcagaacagaaaggtcaaatcatcaaggacatagattctggaagtccagcagaggaggctggcttgaagaacaatgatctggtagttgctgta

SEQ ID NO: 8728 - DNA, 504 bp, Homo sapiens
  misc_feature 2, 3, 5, 6, 8, 9, 11: n = A,T,C or G
gnnanngnngncgccgaatacgactactatagggcgaattggagctccaccgcggtggcggccgtggtggtgaagctgtagccgcgctcggtgaggatcttcatgaggtagtcagtcaggtcccggccagccaggtccagcccgcgtacctcggccgctctagaactagtggatcccccgggctgcaggaattcgatatcaagcttatcgataccgtcgacctcgagggggggcccggtacccagcttttgttccctttagtgagggttaattgcgcgcttggcgtaatcatggtcatagctgtttcctgtgtgaaattgttatccgctcacaattccacacaacatacgagccgggagcataaagtgtaaagcctggggtgcctaatgagtgagctaactcacattaattgcgttgcgctcactgcccgctttccagtcgggaaacctgtcgtgccagctgcattaatgaatcggccaacgcgcggggagaggcggtttgcgt

SEQ ID NO: 8729 - DNA, 370 bp, Homo sapiens
gcgtaataccgactcactatagggcgaattggagctccaccgcggtggcggccgaggtacacgtctctgtctgggcctcggccagggtgccgagggccagcatggacaccaggaccagggcgcagatcaccttgttctccatggtggccattgcctcctctctgccccaaaggcgaccccgagtcagccccgcgtacctgcccgggcggccgctctagaactagtggatcccccgggctgcaggaattcgatatcaagcttatcgataccgtcgacctcgagggggggcccggtacccagcttttgttccctttagtgagggttaattgcgcgcttggcgtaatcatggtcatagctgtttcctgtgtga

SEQ ID NO: 8730 - DNA, 660 bp, Homo sapiens
  misc_feature 122, 125, 252, 280, 304, 305, 334, 338, 348, 357, 364, 399,436, 446, 451, 468, 484, 506, 515, 516, 517, 532, 542, 551,556, 562, 567, 571, 572, 575, 581, 584, 591, 593, 595, 614,615, 620, 623, 624, 628, 629, 633, 639, 641, 647, 648: n = A,T,C or G
  misc_feature 649, 654, 659: n = A,T,C or G
ctcactaaaggaacaaaagctgggtaccgggccccccctcgggtcgacggtatcgataagcttgatatcgaattcctgcagcccgggggatccactagttctagagcggccgaggtactttnttntttttttttttttttgatgaaagagcagcaggagcctagcgcttcccaaggcacaaaggcaaacatttttaccatttattctctgggaggatgggctctaggattaaagccttgctacttctccttntgtaacctttaatcatgatctgcctttntttccatgtctacccctccacccnngtacctgcccgggcggccgccaccgcggngganctccaattcnccctatagngagtcgnattacgcgcgctcactggccgtcgttttacaacgncgtgactgggaaaaccctggcgttacccaacttaatngccttgcaanacatncccccttttcgccagcntggcgtaatagcgaanaggcccgcaccgatcgcccttnccaaaagtnnncgcagcctgaatggngaatgggacncgccctgtngcggngctttnaatcncggnnggngggggngtntacccgnananggaacgctaaacttggcanngcccntanncccnngtcncttagntnttttcnnntttcnttttnt

SEQ ID NO: 8731 - DNA, 405 bp, Homo sapiens
  misc_feature 405: n = A,T,C or G
ttagggagtcgccccgcgtccgctcgtcatgaagatttaaaaaatatgaaatgatgaaggaacatgaaaggagagaatatttaaaaacattgaatgaagaaaagagaaaagaagaagagtctaaatttgaagaaatgaagaaaaagcatgaaaatcaccctaaagttaatcacccaggaagcaaagatcaactaaaagaggtatgggaagagactgatggattggatcctaatgactttgaccccaagacatttttcaaattacatgatgtcaatagtgatggattcctggatgaacaagaattagaagccctatttactaaagagttggagaaagtatatgaccctaaaaatgaagaggatgatatggtagaaatggaagaagaaaggcttagaatgaggggan

SEQ ID NO: 8732 - DNA, 672 bp, Homo sapiens
  misc_feature 632, 636: n = A,T,C or G
tatagggcgaattggagctccaccgcggtggcggccgaggtacgcgggggttgtgactaggaaaggcatgggacgacatgtgtcccaggtgaggtatgtgccacaggcagttacggatgtgttggaggaggaaattccaggaaggggcaagatctggaacgaaggcctggagggaggttcccctgaaggatgctaaggaatacgctgaatccataggtgccatcgtggttgagacaagtgcaaaaaatgctattaatatcgaagagctttttcaaggaatcagccgccagatcccacccttggacccccatgaaaatggaaacaatggaacaatcaaagttgagaagccaaccatgcaagccagccgccggtgctgttgacccaagggccgtggtccacggtacctgcccgggcggccgctctagaactagtggatcccccgggctgcaggaattcgatatcaagcttatcgataccgtcgacctcgagggggggcccggtacccagcttttgttccctttagtgagggttaattgcgcgcttggcgtaatcatggtcatagctgtttcctgtgtgaaattgttatccgctcacaatttcacacaacatacgagccgggagcataaagtgtnaagnctggggtgcctaatgagtgagctaactcacattaat

SEQ ID NO: 8733 - DNA, 494 bp, Homo sapiens
  misc_feature 2, 3, 4, 5, 6, 7, 8, 9, 21, 24, 26, 35, 339: n = A,T,C or G
annnnnnnnacaactcacttnctntngggcgaatngggccctctagatgcatgctcgagcggccgccagtgtgatggatatctgcagaattcgccctttcgagcggccgcccgggcaggtacgcggggaggcattgaggcagccagcgcaggggcttctgctgagggggcaggcggagcttgaggaaaccgcagataagtttttttctctttgaaagatagagattaatgcaactacttaaaaaatatagtcaataggttactaagatattgcttagccgttaagtttttaacgtaattttaatagcttaagattttaagagaaaatatgaagacttanaagagtagcatgaggaaggaaaagataaaaggtttctaaaacatgacggaggttgagatgaagcttcttcatggagtaaaaaatgtatttaaaagaaaattgagagaaaggactacagagccccgaattaataccaatagaagggcaatgctttt

SEQ ID NO: 8734 - DNA, 545 bp, Homo sapiens
  misc_feature 2, 3, 6, 9, 15, 356, 389, 516: n = A,T,C or G
gnngangtngagctnccgcggtggcggccgcccgggcaggtactggtgttgtgatcggaacgtgtcgatcccctcttctcatcactgctgctccaactggatttattactccgggaatggtctgagggggaaaaccaatgtgtttagcgtgcctgcccacctgcgcctgagcacaactatcctgcaatctgacctgcccctcctgcacaggaaaccaccttcccctcccaattgatggttcaaacactgccaccgctgactgccctgcatctgtgggtctgtagaacagaaaggcagaacaacttattttttaggatttaacgacaaccggttgaaaaaaaccggtaggggtgtcntgctcacagagaataaagatttgtagaaaaggngctgaactgccaaggaaggcatttcttgtgccgtgtctggaaccgtgtatccttactacatcactgaacgacaccaaagcaccccatgcactttttgggtccaaccttggcccctgggagaaaaganactggaatttggcatggcagtcttcttcc

SEQ ID NO: 8735 - DNA, 874 bp, Homo sapiens
  misc_feature 620, 624, 636, 706, 737, 755, 772, 817, 824, 825, 835, 839,844, 846, 847, 861, 863: n = A,T,C or G
gagcgcgtatacgactactatagggcgaattggagctccaccgcggtggcggcccgcccgggcaggtacatccttctttgctggactactttctgcagcctgggatggggctctgctcagctgtgggagtaactcggcctccgacacttgttcagactgtgatggacaaggtcttggagggagcgcaggtggtgggggtaacaatcctgacttggtagctggcacactgggctggaagactttattcagatccaaggaggaggctctggaatgggttttctgtggccgaggtggcggggtgggagggtcctcgccccttttcatggcctcttctatggaggtgctagagtaagatctggatcttggtcttgctttgagactgttggaatccttgggaagttgctggatcctcagacacgtcctttggtaaggcttcattgatagtacctcggccgctctagaactagtggatcccccgggctgcaggaattcgatatcaagcttatcgatacccgtcgacctcgagggggggcccggtacccaacttttgttccctttaatgagggttaattgcgcgcttggccgtaatcatggcatagctgtttcctgtgtgaaattgntatncgctcacaattncacacaacataccaaccgggagcataaaagggtaaagcctggggtgcctaatgaatgaactaactcacantaaattgcgttgccctactgccgcttttcantcgggaaactgtctgccnacttgattaatgaatcngccaaccccccgggaaaaagcggtttcctattggccccttttccntttctcnntaattgactnctgnccctngnncgttcggttcgggnanccggtttaaat

SEQ ID NO: 8736 - DNA, 662 bp, Homo sapiens
  misc_feature 588, 603, 612, 614, 617, 618, 621, 623, 639, 647, 661: n = A,T,C or G
tatagggcgaattggagctccaccgcggtggcggccgaggtacgcgggtatgggatcttaggaaaaatgagccaatcatcaaagtcagtgaccatagtaacagaatgcattgttctgggttggcatggcatcctgatgttgctactcagatggtccttgcctccgaggatgaccggttaccagtgatccagatgtgggatcttcgatttgcttcctctccacttcgtgtcctggaaaaccatgccagggggattttggcaattgcttggagcatggcagatcctgaattgttactgagctgtggaaaagatgctaagattctctgctccaatccaaacacaggagaggtgttatatgaacttcccaccaacacacagtggtgcttcgatattcagtggtgtccccgaaatcctgctgtcttatcagctgcttcgtttgatgggcgtatcagtgtttattctatcatgggaggaagcacagatggtttaagacagaaacaagttgacaagctttcatcatcttttgggaatcttgatccctttggcacaggacagcccctttctccgtacaaattccacaagagactgntcagcatagtatagngcctgcctntngannaancncccaagtggatccaangcctggtngggcttttttttant

SEQ ID NO: 8737 - DNA, 407 bp, Homo sapiens
  misc_feature 5: n = A,T,C or G
gagcnccgcgtaatacgactcactatagggcgaattggagctccaccgcggtggcggccgaggtacgcggggacagcaacttccttgatccctgccacgcacgactgaacacagacagcagccgcctcgccatgaagctgctgatggtcctcatgctggtggccctcctcctgcactgctatgcagattctggctgcaaactcctggaggacatggttgaaaagaccatcaattccgacatatctatacctgaatacaaagagcttcttcaagagttcatagacagtgatgccgctgcagaggctatggggaaattcaagcagtgtttcctcaaccagtcacatagaactctgaaaaactttggactgatgatgcatacagtgtacctgcccgggcggccgctctac

SEQ ID NO: 8738 - DNA, 675 bp, Homo sapiens
  misc_feature 104, 468, 486, 491, 497, 498, 524, 528, 540, 563, 574, 586,610, 619, 620, 623, 625, 631, 635, 647, 648, 654, 674: n = A,T,C or G
tatagggcgaattggagctccaccgcggtggcggccgcccgggcaggtacactagaacctcacctcctaaatttgttaggtatcttgcaatgcggccactgagnatggagagaggctgggagctggacgaacggccatctctccttccatcttggcctcggctctaagaacctaaatccctgactgggatgcgtgcggagttcaatccagtatcgcctggcggtgctccccggaggcgcctgcgggaaaattcagctttccctctccacgacaggaggcgctgttttcgtggaaatcccccggctgcgaacctgggatccctgacctggatcaagtctccgaagctggcagagtccattctgcatcaccggtcttgggctttgaagaagcctaggagaaattccgcttcggccatcacgctatgaaaagtggattttttttttcttaagtcaatttttttttttttgnaaatatgagacttagtangtttnggaagnnggcttaaaagaacatttgatattgtnattnaccccccctttnaggggacaggggtttttcccctncttaaaagccnccaacttttttngcccttaaaaagctttactatccntaaattggnnctntncggaanaaanaacctatttttnntcggtntttttgaagaaccaaaaggng

SEQ ID NO: 8739 - DNA, 669 bp, Homo sapiens
  misc_feature 5, 7, 14, 97, 151, 256, 257, 266, 281, 289, 302, 304, 305,307, 311, 314, 323, 328, 333, 336, 337, 338, 340, 343, 344,350, 352, 353, 354, 357, 359, 360, 361, 362, 365, 366, 367,368, 370, 372, 374, 375, 376, 377, 378, 379, 382, 383: n = A,T,C or G
  misc_feature 384, 385, 386, 387, 388, 389, 390, 392, 394, 396, 397, 398,399, 401, 402, 405, 407, 410, 413, 414, 417, 418, 422, 423,425, 427, 428, 429, 431, 437, 438, 439, 440, 441, 442, 445,447, 448, 449, 450, 451, 452, 453, 455, 456, 458, 459: n = A,T,C or G
  misc_feature 461, 462, 468, 469, 470, 472, 474, 475, 477, 478, 480, 481,482, 484, 485, 486, 488, 489, 492, 495, 497, 499, 500, 501,502, 506, 510, 511, 514, 515, 516, 519, 524, 525, 527, 536,537, 539, 542, 549, 553, 554, 556, 557, 560, 561, 562: n = A,T,C or G
  misc_feature 563, 564, 569, 570, 571, 572, 574, 576, 577, 579, 580, 581,583, 588, 594, 596, 599, 600, 601, 603, 607, 608, 609, 611,618, 620, 621, 622, 625, 627, 630, 632, 634, 636, 637, 638,640, 648, 649, 657, 658, 662, 663, 665: n = A,T,C or G
gcgtnanacgactncactatagggacgaaattggaaatctccaccgcggtggcccgcccgggcaggtactttttttttttttttttttttttttttnggccaacgaaattatttattgctgtcaggaggcccaggaccctccagactgaanagtccatgggcccctgtgcatgtgagagctacacagggaatcgctgtcaccttccaaggataagcagacagggccacacatgccatggccactcggagcacaggnnccaggctgngcccagagacccagncatccaangtgcattccaagnanncngacnganagccccacngagangatgnaannngngannagaggngnnnagngnnnngannnnancngnnnnnnagnnnnnnnnnanancnnnnannaangnganggnnggnngggnngngnnnangccggnnnnnnacncnnnnnnnanncnncnnaaaagnnnananncnngnnncnnngnncgngananannnnccgngacnnaannncgngacanncnataaacacnnancanccgcgtncccnntnnagnnnnnaggannnngntnngnnngnccatnaaaaangngcnnncncacnnnancatctgnannnaanantcnanantnnnanaaacaaanncaaacgannaagnnanaaat

SEQ ID NO: 8740 - DNA, 664 bp, Homo sapiens
  misc_feature 5, 14, 26, 37, 447, 468, 470, 473, 479, 480, 481, 482, 494,501, 504, 509, 510, 514, 517, 518, 519, 525, 531, 532, 534,535, 536, 537, 538, 539, 541, 543, 544, 548, 549, 551, 554,555, 556, 557, 558, 563, 564, 565, 566, 567, 568, 569: n = A,T,C or G
  misc_feature 570, 571, 572, 573, 574, 575, 576, 577, 578, 579, 580, 581,582, 583, 584, 587, 588, 589, 590, 591, 592, 593, 594, 595,596, 597, 598, 600, 601, 602, 603, 604, 606, 607, 608, 609,610, 611, 612, 613, 614, 615, 616, 618, 619, 620, 621: n = A,T,C or G
  misc_feature 622, 623, 624, 625, 626, 627, 628, 630, 632, 633, 635, 636,637, 638, 639, 640, 641, 642, 644, 645, 646, 647, 648, 649,650, 651, 652, 653, 654, 655, 656, 657, 658, 659, 660, 661,662, 663: n = A,T,C or G
gcgtnatacgactncactattagggncgaattggaanctccaccgcggtggcggccgcccgggcaggtactttttttttttttttttttttttgttttggccaggaactaggaagtctacttacatagggacagtacctgctttttggttcttattgccccattttactagctgggatgaagtagtagaataacaccattggatggtctggaacatgtttgtcactcaaatctcctttgtccttaatagatagtggatggtctcctacttgtttgaaattacccaaaaaatgagattccctgtactttactccaagcgtggcacttatggatttgctcagttaaatcaatatatcaataacaatttcattcctcaaatagttactgaagacctattacattcaatttactgtgtgaaggattgaaattagcatacttttacttttgnctattgagatggatgaacctnanagncctacnnnnaccctctatacncatgctnatnactgnntatngcnnnaaaggnaatganntnnnnnnangnntatnncntgnnnnnatatnnnnnnnnnnnnnnnnnnnnnnctnnnnnnnnnnnncnnnnncnnnnnnnnnnntnnnnnnnnnnnananncnnnnnnnnannnnnnnnnnnnnnnnnnnnc

SEQ ID NO: 8741 - DNA, 593 bp, Homo sapiens
  misc_feature 2, 5, 11, 14, 34, 35, 36, 466, 467, 468, 469, 470, 475, 476,477, 478, 479, 480, 481, 482, 483, 484, 485, 486, 487, 488,489, 490, 491, 492, 493, 494, 495, 496, 497, 498, 499, 500,501, 502, 503, 504, 505, 506, 507, 508, 509, 510: n = A,T,C or G
  misc_feature 511, 512, 513, 514, 515, 516, 517, 518, 519, 520, 521, 522,523, 524, 525, 526, 527, 528, 529, 530, 531, 532, 533, 534,535, 536, 537, 538, 539, 540, 541, 542, 543, 544, 545, 546,547, 548, 549, 550, 551, 552, 553, 554, 555, 556, 557: n = A,T,C or G
  misc_feature 558, 559, 560, 561, 562, 563, 564, 565, 566, 567, 568, 569,570, 571, 572, 573, 574, 575, 576, 577, 578, 579, 580, 581,582, 583, 584, 585, 586, 587, 588, 589, 590, 591, 592, 593: n = A,T,C or G
gnacncgcgtnctncgtacttcactctgatggcnnntggaacctccaccgcggtggcggccgagtacgctttcctctaagtccgtgaccgtatttataatagctgctgtgatggctgattttgtatgtgaatttgactgggctaaggactacccagagagctggtgaagcgttatttctaggtgtgtctgtgagggggtttccagaagagattgacatttgaatcagaagaccaagtaaagatttaccctcaccagtgcggacaggtgtcatccaatccattgagggcccacgtagaacaaaaaaggcagagggcggccgctctagaactagtggatcccccgggctgcaggaattcgatatcaagcttatcgataccgtcgacctcgagggggggcccggtacccagcttttgttccctttagtgagggttaattgcgcgcttggcgtaatcatggtcatagctnnnnncctgnnnnnnnnnnnnnnnnnnnnnnnnnnnnnnnnnnnnnnnnnnnnnnnnnnnnnnnnnnnnnnnnnnnnnnnnnnnnnnnnnnnnnnnnnnnnnnnnnnnnnnnnnnnnnnnnnnnnnnn

SEQ ID NO: 8742 - DNA, 672 bp, Homo sapiens
  misc_feature 556, 639, 647, 659: n = A,T,C or G
tcactatagggcgaattggagctccaccgcggtggcggccgaggtactaaggtgagatcatttaattttgactaaagatacttttgttttgttttgtttgagatggagttttgttcttgttgcccaggctggagtgagactccatctcaaaaaaaaaaaaaagtaccaaaatgttacctgatagtaaaatacaaaattttttgtttactcatttatttcccaagttttgtatgaatatgcactatttttatgatcatgcctgcatactccttactctttatcctgccctttctgtaaggagtccaaggtggaaatgctcatgtgatgtgaactaattaaatttttcttaaaaacaattttaaaaaccatgacttaaaaagcacggtctgctttagttataatggcagattctgaactatacacacatgtattatatatacataaaatgctagaagacagactatggtcctttcatctgcatttgagtacagtggccccccgtgaaagacagaattgtggttttcctggtgtcacgccctcccagtgtgcaaataanggctgctgtttcgacgacaccgttcgtggggtcccctggtgcttctatcctaaaccatcgacgtccctccagaagaggagtgngaatttanacacttctgcangggatctgcctgc

SEQ ID NO: 8743 - DNA, 613 bp, Homo sapiens
  misc_feature 2, 4, 20, 26, 27, 28, 35, 362, 363, 374, 375, 376, 377, 378,379, 380, 381, 382, 383, 384, 385, 386, 387, 388, 389, 390,391, 392, 393, 394, 395, 396, 397, 398, 399, 400, 401, 402,403, 404, 405, 406, 407, 408, 409, 410, 411, 412: n = A,T,C or G
  misc_feature 413, 414, 415, 416, 417, 418, 419, 420, 421, 422, 423, 424,425, 426, 427, 428, 429, 430, 431, 432, 433, 434, 435, 436,437, 438, 439, 440, 441, 442, 443, 444, 445, 446, 447, 448,449, 450, 451, 452, 453, 454, 455, 456, 457, 458, 459: n = A,T,C or G
  misc_feature 460, 461, 462, 463, 464, 465, 466, 467, 468, 469, 470, 471,472, 473, 474, 475, 476, 477, 478, 479, 480, 481, 482, 483,484, 485, 486, 487, 488, 489, 490, 491, 492, 493, 494, 495,496, 497, 498, 499, 500, 501, 502, 503, 504, 505, 506: n = A,T,C or G
  misc_feature 507, 508, 509, 510, 511, 512, 513, 514, 515, 516, 517, 518,519, 520, 521, 522, 523, 524, 525, 526, 527, 528, 529, 530,531, 532, 533, 534, 535, 536, 537, 538, 539, 540, 541, 542,543, 544, 545, 546, 547, 548, 549, 550, 551, 552, 553: n = A,T,C or G
  misc_feature 554, 555, 556, 557, 558, 559, 560, 561, 562, 563, 564, 565,566, 567, 568, 569, 570, 571, 572, 573, 574, 575, 576, 577,578, 579, 580, 581, 582, 583, 584, 585, 586, 587, 588, 589,590, 591, 592, 593, 594, 595, 596, 597, 598, 599, 600: n = A,T,C or G
  misc_feature 601, 602, 603, 604, 605, 606, 607, 608, 609, 610, 611, 612,613: n = A,T,C or G
cntnctggtactcactctgngggccnnnttggaanctccaccgcggtggcggccgccacgctggttttgcatcttcaggaagacgctcgtagccctcgcgcttctcctcggccaattcgcggaagaagtggctcacgccttccagagccacatcatcgcggtcgaaatagaagcccagagagaggtaggtgtaggaggcctgcaggtacctcggccgctctagaactagtggatcccccgggctgcaggaattcgatatcaagcttatcgataccgtcgacctcgagggggggcccggtacccagcttttgttccctttagtgagggttaattgcgcgcttggcgtaatcatggtcatagcnnttttccctggnnnnnnnnnnnnnnnnnnnnnnnnnnnnnnnnnnnnnnnnnnnnnnnnnnnnnnnnnnnnnnnnnnnnnnnnnnnnnnnnnnnnnnnnnnnnnnnnnnnnnnnnnnnnnnnnnnnnnnnnnnnnnnnnnnnnnnnnnnnnnnnnnnnnnnnnnnnnnnnnnnnnnnnnnnnnnnnnnnnnnnnnnnnnnnnnnnnnnnnnnnnnnnnnnnnnnnnnnnnnnnnnnnnnnnnnnnnnnnnn

SEQ ID NO: 8744 - DNA, 494 bp, Homo sapiens
  misc_feature 1, 9: n = A,T,C or G
natctatcnctactatatggcgaattggagctccccgcggtggcggccgcccgggcaggtacagaagggcggtcctgctgacttggctgggctagaggatgaggatgtcatcattgaagtgaatggggtgaatgtgctagatgaaccctatgagaaggtggtggatagaatccagagcagtgggaagaatgtcacacttctagtctgtggaaaagaaaggcctatgattatttccaagctaagaaaatccctattgtttcctccctggctgatccacttgacacccctccagattctaaagaaggaatagtggtggagtcaaaccatgactcgcacatggcaaaagaacgggcccacagtacctcggccgctctagaactagtggatcccccgggctgcaggaattcgatatcaagcttatcgatacccgtccgacctcgaggggggggccccgggtacccagcttttgttccctttagtgagggttaattgcc

SEQ ID NO: 8745 - DNA, 614 bp, Homo sapiens
  misc_feature 6, 17, 21, 38, 59, 446, 449, 450, 451, 452, 453, 454, 455,456, 457, 458, 459, 460, 461, 462, 463, 464, 465, 466, 467,468, 469, 470, 471, 472, 473, 474, 475, 476, 477, 478, 479,480, 481, 482, 483, 484, 485, 486, 487, 488, 489, 490: n = A,T,C or G
  misc_feature 491, 492, 493, 494, 495, 496, 497, 498, 499, 500, 501, 502,503, 504, 505, 506, 507, 508, 509, 510, 511, 512, 513, 514,515, 516, 517, 518, 519, 520, 521, 522, 523, 524, 525, 526,527, 528, 529, 530, 531, 532, 533, 534, 535, 536, 537: n = A,T,C or G
  misc_feature 538, 539, 540, 541, 542, 543, 544, 545, 546, 547, 548, 549,550, 551, 552, 553, 554, 555, 556, 557, 558, 559, 560, 561,562, 563, 564, 565, 566, 567, 568, 569, 570, 571, 572, 573,574, 575, 576, 577, 578, 579, 580, 581, 582, 583, 584: n = A,T,C or G
  misc_feature 585, 586, 587, 588, 589, 590, 591, 592, 593, 594, 595, 596,597, 598, 599, 600, 601, 602, 603, 604, 605, 606, 607, 608,609, 610, 611, 612, 613, 614: n = A,T,C or G
tctgcngccaaactgtncagncatggggctggggcagnatactctactgtccatccggnatcagtatgctaagcgattcctggattttattaccaacatctttgcctaagagactgcctggttctctctgatgttcaaggtggtggggttctgagacacttgggggaattgtggggatattctagccaccagttctcttcttcctttgctaaattcaggctgcaggctccttccatccagataactccatcctgtcgagtaggctctttctgaccctcagaaatacattgtcctttttcctctttgcccatttttcttccctctcttcctccccatgagaagtctgcttgtagtattagaatgttattgttgactctctcccaagtgccttgatctttgtaatatctcctgttgtttctatgatataggagctaggggaagggggntgnnnnnnnnnnnnnnnnnnnnnnnnnnnnnnnnnnnnnnnnnnnnnnnnnnnnnnnnnnnnnnnnnnnnnnnnnnnnnnnnnnnnnnnnnnnnnnnnnnnnnnnnnnnnnnnnnnnnnnnnnnnnnnnnnnnnnnnnnnnnnnnnnnnnnnnnnnnnnnnnnnnnnn

SEQ ID NO: 8746 - DNA, 383 bp, Homo sapiens
  misc_feature 2, 4, 9: n = A,T,C or G
tntngggcnaattgggccctctagatgcatgctcgagcggccgccagtgtgatggatatctgcagaattcgccctttcgagcggccgcccgggcaggtacaggtccacctggctgctggtcaggcctgcggaccacctgttaatcgtgtcccggctcagtgcagcgatgactgtgttcatcttccccttgtccggaaggatgaagaagacagtcccattgcccacgtagttcatctgcaccagctggcaggggagctccgcgtcatgaaggtaactgatggtgctcgactgcaacatcatgggcaccttcaccacagttgtctcgtccacatagaagttctcctccctgatgcttgccaggtcaaagggctgtgtccatgtgc

SEQ ID NO: 8747 - DNA, 894 bp, Homo sapiens
  misc_feature 597, 645, 649, 680, 687, 694, 724, 754, 761, 764, 767, 786,804, 808, 811, 834, 841, 852, 869, 874: n = A,T,C or G
ggccgcgtaatacgactcactatagggcgaattggagctccccgcggtggcggcccgaggtacgcggggactctcgtaggactgctctacactgggcctgtgtcaatggccatgaggaagtagtaacatttctggtagacagaaagtgccagcttgacgtccttgatggcgaacacaggacacctctgatgaaggctctacaatgccatcaggaggcttgtgcaaatattctgatagattctggtgccgatataaatctcgtagatgtgtatggcaacacggctctccattatgctgtttatagtgagattttgtcagtggtggcaaaactgctgtcccatggtgcagtcatcgaagtgcacaacaagaaggaacatctgcaggaacacctgatgagactgcacccttggcggaaagaacacctgacacagcttgaaagcttgggtggaaaaaacacctgatgaggctgcacccttgggtggaaagaacacctgacaccggctgaaaagcttggtggaaaaaacacctgatgaggcttgcattccttggttggaggggaaacattctgacaaaattcaatgtttggaagaaagcganatctggaaagttcgaacagtcagcagaagaaacacctagggaaattcnagtncttgcaaaaaaaacatcttgagaaatttacnttggccngcaaaanggaagaacctaggaagatcccatggggaanaaaaaagaaaacccctaggggaaattaatngaccggncgnccnggccaggactttcacttgnggacttgaattttttggncaanaanggttggcccttgttcattaaaanaatccanagattgaattnacaatgccggaaaactnaggtnttaatgtcccccaaacttga

SEQ ID NO: 8748 - DNA, 689 bp, Homo sapiens
  misc_feature 4, 5, 6, 8, 9, 12, 19, 519, 540, 553, 575, 594, 614, 627,631, 644, 661, 664, 671, 688: n = A,T,C or G
ttcnnngnnctngtccggnaggttgaggaagtatttactgagtacctgctgtgtgctggacaatgttctgggtgctggagatgtagtcgtgaacaagaacaagccctgagcttacattcaccagggctagtgactgaagacagtcagcaaacagagaaacagatgcatcaacgggatcatttcagaagccagaattgttacagagaaaataaaccaggggtccagtgcagcaagtggcattagggtggcaggtgcataacatgggccaggagggtcaggacgaccactctgaatagtgacattggagcacagcttagtggtgtgtggggaaaggggtgacccaggcaggaaggactgcaagtatctggccttggagacctgtgagcatggagaatccaagagggagaaaatgggccttatatagggcagaaggataagaagaaatgagatggctgacgattaggggaacccttgcagggctttacatgggaacgtgatataatcggatgtgtgcttganggccacactcccgcagactgntattgagcgcgtncttcagttagcgacccacacangttgtggtggtggaacctngactgagggactcctcttgncttgaattacatnttgnggcatgaccaatngtttcacaaaggctaanttnacagctnttcaaaaggggttttgng

SEQ ID NO: 8749 - DNA, 660 bp, Homo sapiens
  misc_feature 6, 201, 381, 529, 576, 580, 589, 591, 606, 612, 614, 617,624, 636, 643: n = A,T,C or G
cctcantttagggcgaattggagctccaccgcggtggcggccgagtacttttttttttttttttttttttttgtcagctcaacccttctttaatgtcatccagggagggggccagggatggaggggaggggttgaggagcgagaggcagttatttttgggtgggattcaccacttttcccatgaagaggggagacttggtnttttggtcaattattaagaagacaaagggtttgttgaacttgacctcgggggggatagacatgggtatggcctctaaaaacatggccccagcagcttcagtccctttctcgtcgatggtcagcacagccttatgcacggccttggagagcttcaggggtgcctcctctgtgaccccgganaggtcagccccattgctgaagaccttagtgatgcccagttgacccaggacgctcttcagatcataggttccagtaatggacagtttgggtaaatgtaagctggcagaccttctgtcttcattttccaggaacttggtgatgatatcgngggtgagttcattttccaagtgctgtagttttcccctcatcaagcangaanaaaatggcngnggcattgcccaggtntttatnancancacccanctggacagcttnttacagngctggatgttaaacatg

SEQ ID NO: 8750 - DNA, 642 bp, Homo sapiens
  misc_feature 42, 642: n = A,T,C or G
tcactatagggcgaattggagctccaccgcggtggcggccgngtacttttagtagaggcggggtttcactatgttggtcaggctggtctcaaactcctaacctcgcgatctgcccgccttggcctcccgaagtgctggaattacaagcatgagccaccatacccggcctgatacttttgcttttcttattgaggtataaaatgtaagcaccttaaaattcccttcccttatatgaacactgcattttgctggatttttcagacacttaatttcaacaaccaagtgaataactcttaacatggaaattagagcttggtcccagtgactcagagctaaggctaatattgagcctgcagaagaaatttaataacggccttgttagttttttctggggagtctctcctgcagatgtcccagccttctcactgaagccatggaagaagcctatctgctgagagaagctacagagtcctggaaagctgggggctcacaggcagatgcagttaaggttaacataaaaggggattgggagggtcttgctgatgatgaagttgttattgttttaaggcagtttctagactttgtaatgtataaccaagttcaatttatttaaaaaattgaattccaaaaaaaaaaaaaaan

SEQ ID NO: 8751 - DNA, 604 bp, Homo sapiens
  misc_feature 3, 4: n = A,T,C or G
agnntttagatctaatctgtacccagctcggatccctagtaacggccgccagtgtgctggaattcggcttagcgtggtcgcggccgaggtacaaaccacggatcttgtgtcagaaacacatgttgagactcctccattccttccagaattttcagagatgaggtagacccacctcaatcatcctcagcatcagtttgctaaattgccaggctcaatgacaagctctcctgccatctccaagcccacttttcatagttccgctctgtctttggctgcagcactttaggcactattctaagtcctggagtatatcactcttgcttcagagctaaataaacattaatgaacacacttactcagaacaagtcactggatagctgcccattgcaagttacatactcaggagatgaaagagggaagccattaaaggtcttcagagtagacaatacctagtcaagatgtggccagacaaagacacaaacttcttaccctaaaagagcccaataatttctgcatcagagaactcctatcttgggcaaagcaactgaattcaggagtgagagttgatattaaaacatggaggctgggcacagcagctcatgcc

SEQ ID NO: 8752 - DNA, 646 bp, Homo sapiens
  misc_feature 3, 12, 17, 19, 32, 34, 86, 577, 594, 629, 646: n = A,T,C or G
gtnatacgactncactntnagggcgaattggnanctccaccgcggtggcggccgagtacaggtttgggcccagcagtctgacaggnaagggcagtaggagaggtggtcgtagatgatgggccagagggcgcagggcctagcaggccatggaaaggactctaggttttacgctaggtaaaatgaggaggcactgcagggctttgagcagcagagtaacacagtctaacttactttttttttttaatggatcctaccagctgctaagttaagaataatttccagtgagggcttttgtagtaaattagagatgatgctggtttgtcaatctccccttccagcagaggaatgtgtgggtaagagagtcacaatgtttctgaacaaagccatagctcctaagtggtgaagctgggcctagagcccctgtttcctgacagctggcctggcggtgggctctgtacctgcccgggcggccgctctagaactagtggatcccccgggctgcaggaattcgatatcaagcttatcgataccgtcgacctcgagggggggcccggtacccagcttttgttccctttantgagggttaattgcccncttggcgtaatcatggtcatagctgtttcctgtgngaaattgttatcccctn

SEQ ID NO: 8753 - DNA, 430 bp, Homo sapiens
gcgcgcgtaatacgactcactatagggcgaattggagctccaccgcggtggcggccgcccgggcaggtacgcgggggtaactgaaaatccacaagacagaatagccagatctcagaggagcctggctaagcaaaaccctgcagaacggctgcctaatttacagcaaccatgaggccacttaaggatgcagcaagaaggagccatctgcaatccaggaagaaattccttgccaggaaccaaattggttgtcaccttcatctaggacttctagcctcgagaacttacaaatggtgatgatcatcaggtcaaggatagtctggagcaattgagatgtcactttacatgggagttatccattgatgacgatgaaatgcctgatttagaaaacagagtcttggatcagattgaattcctagacaccaaatacagt

SEQ ID NO: 8754 - DNA, 632 bp, Homo sapiens
  misc_feature 627: n = A,T,C or G
gcattaaccctcactaagggaacaaagctgggtaccgggccccccctcgggtcgacggtatcgataagcttgatatcgaattcctgcagcccgggggatccactagttctagagcttaaggctggtagttgataggccacttgccagacggtgagtgtttgtagataactgcgaggacactaaggcatcaatgctttcttcagtctcttccaaggagtccttgtctaaagccccagggacagacttgcttcttatgcttacagtatcctctgagtcttctgtaaatgactcactcaaatctaactcagatcgactctgatctgaggagagagaggttccagacactgctatggaaggtgtgccagaagtgtttctgcggtgactctttgtgagctccccgcgtacctcggccgccaccgcggtggagctccaattcgccctatagtgagtcgtattacgcgcgctcactggccgtcgttttacaacgtcgtgactgggaaaaccctggcgttacccaacttaatcgccttgcagcacatccccctttcgccagctggcgtaatagcgaagaggcccgcaccgatcgcccttcccaacagttgcgcagcctgaatggcgaatgggacncgcct

SEQ ID NO: 8755 - DNA, 666 bp, Homo sapiens
  misc_feature 82, 114, 117, 138, 156, 166, 169, 174, 219, 222, 242, 244,249, 256, 296, 315, 328, 338, 343, 355, 361, 403, 415, 430,439, 465, 525, 543, 548, 563, 583, 587, 590, 592, 598, 602,609, 621, 643, 655: n = A,T,C or G
gactcactatagggcgaattggaagctccaccgcggtggcggccgaggtacttttttttttttttttttttttttttctctnaaatacataggggcttttcccctgggcagttngcnttccacaattacttgtttagngttttccaagctcccagngctgggctgngtntccgngcctgccccaggggctttcatggtaaagagagatgagaaaaaganccntaaagccataaacttgagtngngagcnaagcttnttaggccatccatcagtcaaagagctggaaaagatgttgnccccaagatcctacctagnggggaaaaccaancaggagggcnctttntgaaaagcctgngaaggngattccccagcccacccaggtccccccattcatcctgagganacagcggggaancacgaggttaaaagngaaaaaaanaaacagaacttcaaactctgttattngttatgataacactggattcttttcagcatggctaaattattctttataggagttttcanattaattcatttcaaaanaaatnttactcaaaagggcnctgtataaaagcgggctctncacncananaccctntganggagcanggggagagcccncttttgagggaccctggggctncataattagtgnggagccccctg

SEQ ID NO: 8756 - DNA, 437 bp, Homo sapiens
  misc_feature 434, 436: n = A,T,C or G
ggcgaattggagctccccgcggtggcggccgaggtacagatacatggacacaatcatggcagccagctcgaggcccccaattccagctgccacaccacccacggtgactgcattagttcggatgtcatacaaaagctgattgaagcaaccctctactttttggtcgtgagccttttgcttggtgcaggtttcattggctgtgttggtgacgttgtcattgcaacagaatgggggaaaggcactgttctctttgaagtagggtgagtcctcaaaatccgtatagttggtgaagccacagcacttgagccctttcatggtggtgttccacacttgagtgaagtcttcctgggaaccataatctttcttgatggcaggcactaccagcaacgtcaggaagtgctcagccattgtggtgtacctgcccgggcggccgntnt

SEQ ID NO: 8757 - DNA, 855 bp, Homo sapiens
  misc_feature 27, 591, 593, 594, 595, 596, 597, 598, 599, 600, 601, 602,603, 604, 605, 606, 607, 608, 609, 610, 611, 612, 613, 614,615, 616, 617, 618, 619, 620, 621, 622, 623, 624, 625, 626,627, 628, 629, 630, 631, 632, 633, 634, 635, 636, 637: n = A,T,C or G
  misc_feature 638, 639, 640, 641, 642, 643, 644, 645, 646, 647, 648, 649,650, 651, 652, 653, 654, 655, 656, 657, 658, 659, 660, 661,662, 663, 664, 665, 666, 667, 668, 669, 670, 671, 672, 673,674, 675, 676, 677, 678, 679, 680, 681, 682, 683, 684: n = A,T,C or G
  misc_feature 685, 686, 687, 688, 689, 690, 691, 692, 693, 694, 695, 696,697, 698, 699, 700, 701, 702, 703, 704, 705, 706, 707, 708,709, 710, 711, 712, 713, 714, 715, 716, 717, 718, 719, 720,721, 722, 723, 724, 725, 726, 727, 728, 729, 730, 731: n = A,T,C or G
  misc_feature 732, 733, 734, 735, 736, 737, 738, 739, 740, 741, 742, 743,744, 745, 746, 747, 748, 749, 750, 751, 752, 753, 754, 755,756, 757, 758, 759, 760, 761, 762, 763, 764, 765, 766, 767,768, 769, 770, 771, 772, 773, 774, 775, 776, 777, 778: n = A,T,C or G
  misc_feature 779, 780, 781, 782, 783, 784, 785, 786, 787, 788, 789, 790,791, 792, 793, 794, 795, 796, 797, 798, 799, 800, 801, 802,803, 804, 805, 806, 807, 808, 809, 810, 811, 812, 813, 814,815, 816, 817, 818, 819, 820, 821, 822, 823, 824, 825: n = A,T,C or G
  misc_feature 826, 827, 828, 829, 830, 831, 832, 833, 834, 835, 836, 837,838, 839, 840, 841, 842, 843, 844, 845, 846, 847, 848, 849,850, 851, 852, 853, 854, 855: n = A,T,C or G
gacgcgcgtaatacgactactataggngcgaattggagctccccgcggtggcggccgaggtacttcctgcttgcctcatgaaaagtggtcctctggaaggcccaggtgaagctcgtggtagtgttctcctcaatgatgtaggtataggactgtttgcctttggaacctttccacgtctccacaggagtgttggtcctagaattcacacccaccatgaagtagagctcacagttcacagaacagagggtctcaaagacaaatgtgattctggccacctctttattctctgtgtctgccatcaccgactgcggaggtctaaatcctggcacaaccagagtgagaatcatgaagtcattgtctgaggctccagcagctgtgtaaatgtgatcaccagccacctcccagcctgtcatgcccttgtacctgcccgggcggccgctctagaactagtggatcccccgggctgcaggaattcgatatcaagcttatcgataccgtcgacctcgagggggggcccggtacccagcttttgttccctttagtgagggttaattgcgcgcttggcgtaatcatggtcatagctgtttttcngnnnnnnnnnnnnnnnnnnnnnnnnnnnnnnnnnnnnnnnnnnnnnnnnnnnnnnnnnnnnnnnnnnnnnnnnnnnnnnnnnnnnnnnnnnnnnnnnnnnnnnnnnnnnnnnnnnnnnnnnnnnnnnnnnnnnnnnnnnnnnnnnnnnnnnnnnnnnnnnnnnnnnnnnnnnnnnnnnnnnnnnnnnnnnnnnnnnnnnnnnnnnnnnnnnnnnnnnnnnnnnnnnnnnnnnnnnnnnnnnnnnnnnnnnnnnnnnnnnnnnnn

SEQ ID NO: 8758 - DNA, 453 bp, Homo sapiens
  misc_feature 2, 3, 4, 8: n = A,T,C or G
gnnnaggnggccgcgtaatcactactatagggcgaattggagctccaccgcggtggcggccgcccgggcaggtacgcggggactccagacagacggctttggaatccaccagctacatccagctccctgagagttgagaatggagagaatgttacctctcctgactctggggctcttggcggctgggttctgccctgctgtcctctgccaccctaacagcccacttgacgaggagaatctgacccaggagaaccaagaccgagggacacacgtggacctcggattagcctccgccaacgtggacttcgctttcagcctgtacctcggccgctctagaactagtggatcccccgggctgcaggaattcgatatcaagcttatcgataccgtcgacctcgagggggggcccggtacccagcttttgttccctttagtggagggttaattgcgcgc

SEQ ID NO: 8759 - DNA, 679 bp, Homo sapiens
  misc_feature 23, 46, 633, 645, 658: n = A,T,C or G
gactcactatagggcgaattggnagctccaccgcggtggcggccgngtacttacggagtgacaaagggaaaagtctgctttgaggcaaaggtaacccagaatctcccaatgaaagaaggctgcacagaggtctctctccttcgagttgggtggtctgttgatttttcccgtccacagcttggtgaagatgaattctcttacggtttcgatggacgaggactcaaggcagaaaatggacaatttgaggaatttggccagacttttggggagaatgatgttattggctgccttgctaattttgagactgaagaagtagaactttccttctccaagaatggagaagacctaggtgtggcattctggatcagcaaggattccctggcagaccgggcccttctaccccatgtcctctgcaaaaattgtgttgtagaattaaacttcggtcagaaggaggagcccttcttcccaccaccagaagagtttgtgttcattcatactgtgcctgttgaggagcgtgtacctgcccgggcggccgctctagaactagtggatcccccgggctgcaggaattcgatatcaagcttatcgataccgtcgacctcgagggggggccccggtacccagcttttggtnccttttagtgangggtaattgcgcnccttggcgtaattatgggcat

SEQ ID NO: 8760 - DNA, 645 bp, Homo sapiens
  misc_feature 54, 504, 597, 611, 633, 635: n = A,T,C or G
ggcgaattggagctccaccgcggtggcggccgcgttagctgaggccagcagggnacgcaaaagtttttaggccccttaggtctttaggttggcatacgtatcaaggacagtaactaccatggctcccgaagttttgccaaaacctcggatgcgtggccttctggccaggcgtctgcgaaatcatatggctgtagcattcgtgctatccctgggggttgcagctttgtataagtttcgtgtggctgatcaaagaaagaaggcatacgcagatttctacagaaactatgatgtcatgaaagattttgaggagatgaggaaggctggtatctttcagagtgtaaagtaatcttggaatataaagaatttcttcaggttgaattacctagaagtttgtcactgacttgtgttcctgaactatgacacatgaatatgtgggctaagaaatagttcctcttgataaataaacaattagcaaaaaaaaaaaaaaaaaaaaaaaaaaaagtncctcggccgctctagaactagtggatccccccgggctgcaggaattcgatatcaagcttatcgataccgtccacctcgagggggggcccggtncccagcttttgttncctttagtgagggttaattgcncncttggcgtac

SEQ ID NO: 8761 - DNA, 644 bp, Homo sapiens
  misc_feature 271, 434, 464, 501, 513, 522, 524, 532, 545, 549, 554, 555,569, 570, 578, 598, 606, 641: n = A,T,C or G
cctcactaagggaacaaaagctgggtaccgggccccccctcgggtcgacggtatcgataagcttgatatcgaattcctgcagcccgggggatccactagttctagagcggccgggggatgcgaggctcggagcacccttgcccggctgtgattgctgccaggcactgttcatctcagcttttctgtccctttgctcccggcaagcgcttctgctgaaagttcatatctggagcctgatgtcttaacgaataaaggtcccatgctccacccnaaaaaaaaaaaaaaaaaaaaaaaagtacctcggccgccaccgcggtggagctccaattcgccctatagtgagtcgtattacgcgcgctcactggccgtcgttttacaacgtcgtgactgggaaaaccctggcgttacccaacttaatcgccttgcagcacatncccctttcgccagctggcgtaatagcgaanaggcccgcaccgatcgccctttccaacagttgcccancctgaaatggcnaatgggacncnccctgtancggccattaagcncggnggtgnngggggtacccccanngtgaccgnttcacttgcaaggccctaangccggtcntttggttttttccttctttttggcacgttgccggnttc

SEQ ID NO: 8762 - DNA, 648 bp, Homo sapiens
  misc_feature 581, 586, 620, 632, 648: n = A,T,C or G
cctcactaagggaacaaaagctgggtaccgggccccccctcgaggtcgacggtatcgataagcttgatatcgaattcctgcagcccgggggatccactagttctagagcggccgcccgggcaggtactaggcagaggggatagccagtgccacgccccttcagtgggatgagctttccatttcacactgggctgccttgctgtgtgtcctttgacacctcccatttaactgctccaagattgataccgtctttctttctgacccatcatcataataatggatgatttctctgttttggttaataccgtctctatccaccaccctgaaaaccctaggccagcagtctgaaaactttgtgaggggaaagacagtaaacattttcagctttgagcacagtacctcggccgccaccgcggtggagctccaattcgccctatagtgagtcgtattacgcgcgctcactggccgtcgttttacaacgtcgtgactgggaaaaccctggcgttacccaacttaatcgccttgcagcacatccccctttcgccagctggcgtaatagcgaagaggcccgcaccgatcgnccttncaacagttgcgcagcctgaatggcgaatgggacncgccctgtagcngcgcattaagcgcggn

SEQ ID NO: 8763 - DNA, 624 bp, Homo sapiens
  misc_feature 2, 5, 11, 16, 19, 376, 606: n = A,T,C or G
gnttnccctanttagngcnaattgggccctctagatgcatgctcgagcggccgccagtgtgatggatatctgcagaattcgccctttcgagcggccgcccgggcaggtacatttgaacacacggctgtgttaaagatgctgctaatgtcagtcactgggtgcactaaaggatctcttattttatgtaaaacgttgggattgacaagatagatctgatactctgttaagttaccctctgaagctacttcttgtgaaatactaatgacagcatcatcctgccaagcgaaagaggcaggcataagcaaggacaaattaaaagggggtaagagccttatcatgatgaggagtcttgttttgacatcttgggaaaagctgnccatagtgtgaagtcgtcaatttctcaccatggtttgcagtttgcctgtctctagttaggtgaagtctctgagtggcacacacctcaggcctgaggggttttccctttaaattttcattgagttgtccatctccagcatatagggcttcaggagcagagcagaccttgtttttagtggttccatgggataaaatgggattggaggagctagaagaattcaaggtctgggnccaatctgcagtctttct

SEQ ID NO: 8764 - DNA, 437 bp, Homo sapiens
  misc_feature 2, 3, 4, 5, 8: n = A,T,C or G
gnnnnagnttcccgtaatatactactatagggcgaattgtagctccccgcggtggcggccgcccgggcaggtacgcggggtggacagactgctttgcctgttgttgctcttcggaggcggcgatccccgaaggcgagctgaaatacggctgcaggctacaatttgcagccgaccattatggatgacaaggagccgaagaggtggcccaccctcagggaccgcttgtgctcggatggcttcttatttccccaataccccattaaaccgtatcatctgaaggggatccacagagctgtcttctatcgtgatctggaggaactgaagttcgttctgctcacgcgttatgacatcaataagagagacaggaaggaaaggaccgccctacatttggcctgtgccactggccaaccggaaatggtacctcggccgctctagaa

SEQ ID NO: 8765 - DNA, 648 bp, Homo sapiens
  misc_feature 23, 460, 572, 598: n = A,T,C or G
gactcactatagggcgaattggnactccaccgcggtggcggccgcccgggcaggtacttttttttttttttttttttgacatgcaggcagggaccagctcaacccttctttaatgtcatccagggagggggccagggatggaggggaggggttgaggagcgagaggcagttatttttgggtgggattcaccacttttcccatgaagaggggagacttggtattttggtcaatcattaagaagacaaagggtttgttgaacttgacctcgggggggatagacatgggtatggcctctaaaaacatggccccagcagcttcagtccctttctcgtcgatggtcagcacagccttatgcacggccttggagagcttcaggggtgcctcctctgtgaccccggagaggtcagccccattgctgaagaccttagtgatgcccagttgacccaggacgctcttcanatcataggttccagtaatggacagtttgggtaaatgtaagctggcagaccttctgtcttcattttccaggaacttggtgatgacccgcgtacctcggccgctctagaactantggatccccccggctgcaggaattcnatatcaagcttatcgataccgtcgacctcgagggggggcccggtacccac

SEQ ID NO: 8766 - DNA, 613 bp, Homo sapiens
  misc_feature 3, 4, 5, 7, 9, 16, 24, 38: n = A,T,C or G
ccnnncntncgatcancacgtggnggagcaatccaggnaaatgactgtggaggctgagaaaaaacacaaacgatttcaggaacttgacagatttatgcactattatacaagatttaaaaaccatgagcatagttatcagctagaacaacgccttcttaaaacagccaaagaaaagatggagcaattgagcagagctctcaaagaaactgaaggaggctgtccagataccactttcattgaagatgcagttcatgtgctcttaaaaactcggcgcattctcaagtgttcttatccatatggatttttcttggaacctaaaagcacaaagaaagaaatttttgaactaatgcaaacagacctagaaatggtcactgaagaccttgcccagaaagtcaataggccttaccttcgcacaccccgccacaagatcatcaaagcagcatgccttgtacagcagaagaggcaagaattcctggcatctgtggctcggggagtagctcctgcagactcaccagaagctccaaggcgcagctttgctggtggaacatgggattgggaatatttaggatttgcatcaccagaggaatatgctgaatttcagtatcgggaggag

SEQ ID NO: 8767 - DNA, 648 bp, Homo sapiens
  misc_feature 21, 29, 602: n = A,T,C or G
gcattaaccctcactaagggnaacaaagnctgggtaccgggccccccctcgggtcgacggtatcgataagcttgatatcgaattcctgcagcccgggggatccactagttctagagtcgagcggccgcccgggcaggtacatgtgcacaacatgcatatagtatgcagccttttttttcttattttctgggatcattctgcttccttatagacccaattcatgttccagtcccccctatattgtaatcacatgctgggtttttaaacatcttggattgctatcttgggcagccaaaaaggaaaaaaaaatcaaatgtgaatgataatttttaagaaaacagcttcaaatgaatgggatgcctatgcacttccaagaatggggcagcaatcaacaaatgaataatggccacagctgagctctaacaaacacgggatgatccagctgaagcaaaggctacaattggactaatttggcactaggtccattttagtcctggcattaggaccacattttatttctcccgcgtacctcggccgccaccgcggtggagctccaattcgccctatagtgagtcgtattacgcgcgctcactggccgtcgntttacaacgtcgtgactgggaaaaccctggcgttacccaacttaac

SEQ ID NO: 8768 - DNA, 636 bp, Homo sapiens
  misc_feature 50, 601, 606, 615, 624: n = A,T,C or G
gcattaaccctcactaagggaacaaagctgggtaccgggccccccctcgnggtcgacggtatcgataagcttgatatcgaattcctgcagcccgggggatccactagttctagagcgggtggatttggagaccgaagactgggatgcctgtcttgagtagacttggacccaaaaaatcacctcaccttgagcccacccccaccccattgtctaatctgtagaagctaataaataatcatccctccttgcctagcgaaaaaaaaaaaaaaaaaaagtacctcggccgccaccgcggtggagctccaattcgccctatagtgagtcgtattacgcgcgctcactggccgtcgttttacaacgtcgtgactgggaaaaccctggcgttacccaacttaatcgccttgcagcacatccccctttcgccagctggcgtaatagcgaagaggcccgcaccgatcgcccttcccaacagttgcgcagcctgaatggcgaatgggacgcgccctgtagcggcgcattaagcgcggcgggtgtggtggttacgcgcagcgtgaccgctacacttgccagcgccctagcgcccgctcctttcgctttcttnccttnctttctcgncacgttcgncggcttttcccg

SEQ ID NO: 8769 - DNA, 630 bp, Homo sapiens
  misc_feature 22, 29, 52, 394, 406, 416, 476, 523, 527, 531, 532, 540,546, 548, 558, 578, 583, 586, 590, 596, 599, 612, 614, 625: n = A,T,C or G
gcaattaaccctcactaaaggnaacaaanctgggtaccgggccccccctcgngtcgacggtatcgataagcttgatatcgaattcctgcagcccgggggatccactagttctagagcggccgcccgggcaggtacattatttacaccaaaagcacagggctcgtgtgggtgaacagtctgcagtcaaagccgatgctgggtgtcctgtagtgtagcagcccccgcgccgggggctcaggctcaactgagggttttgtcattttcaagtctgaaagtggctgttctcctgcctttgttgtttcttcttttcctggcgtctgggtttttctcccaatggggtgggtgaaggttttgccttttcggaaaagtccttctcaggctccccgcgtacctnggccgccaccgnggtggagctncaattcgccctatagtgagtcgtattacgcgcgctcactggccgtcgttttacaacgtcntgactgggaaaaccctgcgttaccaacttaatcgccttgcagacatncccntttnncagctggntaatancnaaaaggccgnaccgatcgcccttccaaaanttgcncancctnaatggnaangggacccccctgnancgggcattaancccgg

SEQ ID NO: 8770 - DNA, 487 bp, Homo sapiens
  misc_feature 300, 332, 356, 398, 406, 432, 477: n = A,T,C or G
cgaatacgactactatagggcgaattggagctccaccgcggtggcggccgaggtacttttttttttttttttttttttttggcactacctccccgggtcgggagtgggtaatttgcgcgcctgctgccttccttggatgtggtagccgtttctcaggctccctctccggaatcgaaccctgattccccgtcacccgtggtcaccatggtagggcacggcgactaccatcgaaagttgatagggcagacgttcgaatgggtcgtcgccgcccccgcgtacctgcccgggcggccgctctanaactagtggatcccccgggctgcaggaattcnatatcaagcttatcgataccgtcnacctcgagggggggcccggtacccagcttttgttccctttantgagggtnaattgcgcgcttggcgtaatcaaggncatagctgtttcctgtgtgaaattgttatccgctcacaattccanacaacataca

SEQ ID NO: 8771 - DNA, 408 bp, Homo sapiens
gcgccccgtaataccgactcactatagggcgaattggagctccaccgcggtggcggccgaggtactgttcccttctgatttggtctagataccagaatccattctcttccgtcaaacggaagacacaaggcacctgaggctgatccttcccagaaattaactccagaggctgccacatctggtatgagcgtccaaacccagcatcgacaatgtagttcctgccatcaatggtcacctgcaggagaaggtgaatcatgccagtgctgtatttttttggctggagtgctgtaaacataccctcccaacatcgtggtctcaaaaccaatagtggtcagagcccagtacctgcccgggcggccgctctagaactagtggatcccccgggctgcaggaattcgatatcaagct

SEQ ID NO: 8772 - DNA, 640 bp, Homo sapiens
  misc_feature 22, 549, 630: n = A,T,C or G
gcaattaaccctcactaagggnaacaaagctgggtaccgggccccccctcgggtcgacggtatcgataagcttgatatcgaattcctgcagcccgggggatccactagttctagagcggccgcccgggcaggtacaaggccactgattatctagacctggctttcttcttcagtctcatcatccatccccaccccacattctctctcctcatcaggtttgtgcaaatgttgtttgggatactcttctctctttggaatccctcctgtttggaatactcttctcttcttgcctttggcatctcctcaccacgcacgttctgctaattcctaaactgcttatagattgtggcttagctttgacttttttcaggatgcctctgctaacccctaaattcaaggtaggtgctcctcttaggtgctccaatagttccctgtacctcggccgccaccgcggtggagctccaattcgccctatagtgagtcgtattacgcgcgctcactggccgtcgttttacaacgtcgtgactgggaaaaccctggcgttacccnacttaatcgccttgcagcacattcccctttcgccagctggcgtaatagcgaagaggccccgcaccgatcgccctttccaanagttgcgcag

SEQ ID NO: 8773 - DNA, 479 bp, Homo sapiens
  misc_feature 2, 8, 13, 18, 22, 280: n = A,T,C or G
gngcccgngaccntatcnactnctatagggcgaattggagctccccgcggtggcggccgaggtacgcgggaggcattgaggcagccagcgcaggggcttctgctgagggggcaggcggagcttgaggaaaccgcagataagtttttttctctttgaaagatagagattaatacaactacttaaaaaatatagtcaataggttactaagatattgcttagcgttaagtttttaacgtaattttaatagcttaagattttaagagaaaatatgaagacttanaagagtagcatgaggaaggaaaagataaaaggtttctaaaacatgacggaggttgagatgaagcttcttcatggagtaaaaaatgtatttaaaagaaaattgagagaaaggactacagagccccgaattaataccaatagaagggcaatgcttttagattaaaatgaaggtgacttaaacagcttaaagtttagtttaa

SEQ ID NO: 8774 - DNA, 590 bp, Homo sapiens
  misc_feature 3, 551: n = A,T,C or G
ggngatctcatcgctccccgcgtccgtctggctctctgggacaagtcctgtttacagtgcccattcctggagcttgcctctgtcttttgttcgattacatgatgtattacttttcccaacaggccagtgctagcatattggaagagtgatttaataaagctggcaaccttgacgctatgccaccagtccaaccttacttgcctcatttaccatttccattattgtggcagccctccattccagccacagcagcccctcaccaaaccccagtcacaccacccacatttctgcttttgtctgtgtgtctgtccatctaaaatgcccttatttcactctgcctgtgggagtcctatgcatctctcaaaagccaactcaagttcatctttcttcttgacaccttccctgaatattccagccctgctgagcctagtccctttgtgagatttgtcaccatttcttggacaccatatgagagacttcagaggctgaagtgggaggatcgcttgagcctgggaggtcgaggatgcagtgagctgtggtcgtaccactgnactctagcctgggcaacacagctaggccctgtcttaaaa

SEQ ID NO: 8775 - DNA, 657 bp, Homo sapiens
  misc_feature 2, 32, 34, 592, 593, 639, 641, 651: n = A,T,C or G
gngtcgcccacgcgtccgcccacgcgtccgananacctttttctaggcctacatgctttgtgaacaagtccctgtaattgttgtttgtatgtataattcaaagcaccaaaataagaaaagatgtagatttatttcatcatattatacagaccgaactgttgtataaatttatttactgctagtcttaagaactgctttctttcgtttgtttgtttcaatattttccttctctctcaatttttggttgaataaactagattacattcagttggcctaaggtggttgtgctcggagggtttcttgtttcttttccattttgtttttggatgatatttattaaatagcttctaagagtccggcggcatctgtcttgtccctattcctgcagcctgtgctgagggtagcagtgtatgagctaccagcgtgcatgtcagcgaccctggcccgacaggccacgtcctgcaatcggcccggctgcctcttcgccctgtcgtgttctgtgttagtgatcactgcctttaatacagtctgttggaataatattataagcataataataaagtgaaaatattttaaaactaaaaaaaaccannaaaaaaaaaaaaaaaaaaaaaaagggcggccgctagactagtctananaaaaaacctnccacac

SEQ ID NO: 8776 - DNA, 608 bp, Homo sapiens
  misc_feature 564, 589, 600, 603: n = A,T,C or G
cctcactaagggaacaaaagctgggtaccgggccccccctcgggtcgacggtatcgataagcttgatatcgaattcctgcagcccgggggatccactagttctagagcggccgtatattcttgcggggccgcgcagcgtggcacggcctgattctgttaaatagtgtaggacgataatttctgacaggcaagatgtttgcgaaaaaaaccatttgtccagcaacgcttgccgtgcggtcaaaaaaaatgccccggcgtgcggggcatggggcttacgcgggccggtccggccctgatgctcaggcgcgcaaggtggacaggataggctgcagtacggccgccaccgcggtggagctccaattcgccctatagtgagtcgtattacgcgcgctcactggccgtcgttttacaacgtcgtgactgggaaaaccctggcgttacccaacttaatcgccttgcagcacatccccctttcgccagctggcgtaatagcgaagaggcccgcaccgatcgcccttcccaacagttgcgcagcctgaatggcgaatgggacgcgccctgtancggcgcattaagcgcggcgggtgtngtggttacccncancgtgc

SEQ ID NO: 8777 - DNA, 672 bp, Homo sapiens
  misc_feature 94, 96, 118, 293, 306, 397, 565, 597, 598, 599, 610, 621,648, 661: n = A,T,C or G
gactcactatagggcgaattggaagctccaccgcggtggccggccgcccgggcaggtactttttttttttttttttttttttttttttttaaangnctcatcgcagtttattagcctntacagttctaaatttactaaagagggcaaaaatacaggttttgaaagcactccttcccaggctcacaggcagcagacatgacttagaaggaaaaagggcatacagcggttcttcaagatttaatgagctgactctcctggctcccagcaggcaggctggctgtcaggtaagcctnttccatccaaggnggaaggatcacagtccctccagttagacaggaggaaaattaggacccaaaaagatgaagttcccgcgtacctcggccgctctagaactagnggatcccccgggctgcaggaattcgatatcaagcttatcgataccgtcgacctcgagggggggcccggtacccagcttttgttccctttagtgagggttaattgcgcgcttggcgtaatcatggtcatagctggtttcctgggtgaaattgttatccgctcacaattncacacaacatacgagccggggagcataaaagnnnaagcctggggngcctaatgagngggcctaacttacattaattgcgttgngcctactgcccgnttttccagtcg

SEQ ID NO: 8778 - DNA, 675 bp, Homo sapiens
  misc_feature 21, 24, 32, 559, 627, 662: n = A,T,C or G
gcgcaattaaccctcactaanggnaacaaagnctgggtaccgggccccccctcgaggtcgacggtatcgataagcttgatatcgaattcctgcagcccgggggatccactagttctaatagcggccgcccgggcaggtaccatagaacaaggcttcctccaacaggccgaggttgatgcaggcatccatggcgcagtcgagcaccttcagctggtagatgttgatatcgggaagccgttcagaattgctgcttatgatcgcctggcacatggccagaacctgctcccacttccagtgtgccttcagttcttcaatttttttcagggattcttgaacttccttccatacttgctcatcaccagttagcatatcagcatccttgtcctgggtttggcaacggaaacagtcacattcaaagcagtacctcggccgccaccgcggtggagctccaattcgccctatagtgagtcgtattacgcgcgctcactggccgtcgttttacaacgtcgtgactgggaagaccctggcgttacccaacttaatcgccttgcagcacatnccccttttcgccagctggcgtaatagcgaaaaggcccgcaccgatcggcctttccaacagttgcgcancctgaatggcgaatgggacgcgccctgtagcgggncattaagcgcggc

SEQ ID NO: 8779 - DNA, 924 bp, Homo sapiens
  misc_feature 2, 3, 9, 12, 18, 19, 23, 31, 38, 138, 566, 581, 650, 670,685, 708, 710, 733, 738, 776, 780, 781, 813, 816, 820, 828,834, 835, 841, 850, 878, 886, 893, 899, 905, 908, 912, 921: n = A,T,C or G
gnngggganganattctnnatanctcctatntggcgantggggccctctagatgcatgctcgagcggccgccagtgtgatggatatctgcagaattcgccctttcgagcggccgcccgggcaggtacgcggggaggcnttgaggcagccagcgcaggggcttctgctgagggggcaggcggagcttgaggaaaccgcagataagtttttttctctttgaaagatagagattaatacaactacttaaaaaatatagtcaataggttactaagatattgcttagcgttaagtttttaaccgtaattttaatagcttaagattttaagagaaaatatgaagacttagaagagtagcatgaggaaggaaaagataaaaggtttctaaaacatgacggaggttgagatgaagcttcttcatggagtaaaaaatgtatttaaaaagaaaattgagagaaaggactacagaaccccgaattaattccaatagaaaggcaatgcttttagattaaaatgaaggtgacttaaacagcctttaaaagtttaatttaaaagttggtagggtggattnaaaataattttgaangccatcttttttaaaaagaagattaaaacccgaagggtgattaaaagacctttgaaaatccattgaccncagggggaggaaattgcgtnattttaaaagcctanttaaccgcatttttcctaaaccncngaaccaaaaatgggaaagaattnatttngggagtgggtagggaatgaaaccaattttgggaaaaanatannaaaccttgaaagtggggaaaaaactggaaganaanaaantacccttngggccnngaaccncccctttanggggggaattttccagcccaccttgggngggcccgnttctttntggggntcccanccncggntcccaaccntgg

SEQ ID NO: 8780 - DNA, 498 bp, Homo sapiens
ctatagggcgaattggagctccccgcggtggcggccgcccgggcaggtacgcgggaccacttctctgggacacattgccttctgttttctccagcatgcgcttgctccagctcctgttcagggccagccctgccaccctgctcctggttctctgcctgcagttgggggccaacaaagctcaggacaacactcggaagatcataataaagaattttgacattcccaagtcagtacgtccaaatgacgaagtcactgcagtgcttgcagttcaaacagaattgaaagaatgcatggtggttaaaacttacctcattagcagcatccctctacaaggtgcatttaactataagtatactgcctacctatgtgacgacaatccaaaaaccttctactgggacttttacaccaacagaactgtgcaaattgcagccgtcgttgatgttattcgggaattaggcatctgccctgatgatgctgctgtaatccccatcaaaaaca

SEQ ID NO: 8781 - DNA, 621 bp, Homo sapiens
  misc_feature 16, 75, 422, 458, 459, 466, 470, 496, 503, 524, 541, 544,564, 572, 581, 584, 588, 589, 600, 601, 602, 603: n = A,T,C or G
tatagggcgaattggnagctccaccgcggtggcggccgagtacgcggggcatcggaaatttgaattacctctagnaccaggatttgtcagtctctttactattgacattttgggtcagatcattctttcattctttcttggttgaggggttgatattgtttggtgtgtcctcatccaaatctcaaattatagctcccatagttcccatgtgtcatgggagggacccggtgggaggtaactgaaacataagcaaaggtctttcccttgctcctctcatgacagtgaatttctcatgatatctaatggttttataaaggggagttcccctgcacacgctctctctcttccccgttgccatgaaagatgtgactttgctcctccttccccatgattgtgaggcttccccagtcacaaggaactgngagtccattaaacctttttctttgtaaattacccannctcaagnaggnctttattagcagcttgagaacagacnaaacaangggctggcttgggcattttangaagtttacagcatccntgnctccaccaaatagctgcaanagcaaccncactttctncanttannaaacaaacaannnntcggacattttacctatc

SEQ ID NO: 8782 - DNA, 693 bp, Homo sapiens
  misc_feature 1, 2, 3, 4, 5, 6, 11, 12, 22, 62, 129, 153, 555, 619, 672,685, 691, 692, 693: n = A,T,C or G
nnnnnnccttnnggcgattggnactccccgcggtggcggccgcccgggcaggtacgcggggnaggcattgaggcagccagcgcaggggcttctgctgagggggcaggcggagcttgaggaaaccgcagnataagtttttttctctttgaaagnatagagattaatacaactacttaaaaaatatagtcaataggttactaagatattgcttagcgttaagtttttaacgtaattttaatagcttaagattttaagagaaaatatgaagacttagaagagtagcatgaggaaggaaaagataaaaggtttctaaaacatgacggaggttgagatgaggcttcttcatggagtaaaaaaaaaaaaaaaaaaaaaaaaaagtacctcggccgctctagaactagtggatcccccgggctgcaggaattcgatatcaagcttatcgataccgtcgacctcgagggggggcccggtacccagcttttgttccctttagtgagggttaattgcgcgcttggcgtaatcatggtcatagctgtttcctgtgtgaaattggtnatccgctcacaaagccccacaaacatacgaagccggggagcataaagtggtaaaggcctggggnggcctaatgagtgagctaactcccattaatttgcggttgggcttcactgcccnctttccattcggnaaaccnnn

SEQ ID NO: 8783 - DNA, 866 bp, Homo sapiens
  misc_feature 533, 546, 565, 614, 646, 658, 660, 663, 675, 691, 710, 727,749, 752, 753, 758, 766, 782, 786, 790, 794, 797, 798, 804,808, 811, 812, 817, 822, 831, 833, 838, 839, 841, 846, 847,860: n = A,T,C or G
gtgggcgcgcgtaatacgactcactatagggcgaattggagctccaccgcggtggcggcccgaggtaccagctggccctggctagcacacagcatgattaaccatttctgagcaccaatcctaatgtcctttaagaatcaccccctaatataagccctggcaggaaatcagctgcttcttgatcccaactttttatgaaagttagaatggtaatagaatttgaattttcagtaggaatcagttctcttcctttccatgctttttcttccttgacttcctttggattcaaacatctttaattgagcagacagggaatctgaaaaggaagcccgcgtacctgcccgggcggccgctctagaactagtggatcccccgggctgcaggaattcgatatcaagcttatcgataccgtcgacctcgagggggggcccggtacccagcttttgttccctttagtgagggttaattgcgcgcttggcgtaatcatggtcatagctgtttcctgtgtgaaaatggtatcccgctcacaattncacacaacatacnaagcccggagcataaaagngtaaaagcctggggtgccttaatgaggtgagcttactcacattaattgncgttggcgccttactggcccgctttccaagancgggaaaacctngncgngccagctggcantaatggaatccggccnaccccccgggggaaaggcnggtttgcgttattgggncgcttttttccgctttcttggnttnnttaantcctttgncttcgggccgtttggnttgngggnaagnggnnttaagnttanatnnaaagncgggnaattccggntnttccnncnaattnnggggatacctccngaaaat

SEQ ID NO: 8784 - DNA, 907 bp, Homo sapiens
  misc_feature 2, 9, 17, 41, 42, 44, 80, 81, 82, 84, 87, 99, 102, 107, 125,134, 151, 168, 169, 170, 171, 172, 208, 225, 231, 237, 244,247, 248, 273, 286, 290, 294, 306, 307, 309, 314, 315, 316,318, 329, 336, 351, 353, 358, 362, 368, 373, 379: n = A,T,C or G
  misc_feature 406, 425, 452, 454, 458, 467, 468, 482, 505, 506, 511, 512,517, 526, 527, 530, 553, 554, 559, 560, 562, 563, 564, 570,571, 582, 584, 587, 593, 597, 600, 603, 605, 607, 608, 611,613, 615, 619, 622, 627, 628, 629, 632, 633, 636, 639: n = A,T,C or G
  misc_feature 640, 644, 645, 646, 650, 651, 653, 661, 662, 663, 664, 669,670, 674, 675, 680, 684, 686, 690, 692, 693, 696, 697, 698,699, 701, 703, 706, 707, 708, 709, 711, 715, 719, 721, 722,731, 733, 735, 737, 738, 740, 742, 744, 746, 748, 758: n = A,T,C or G
  misc_feature 761, 764, 765, 773, 776, 777, 778, 780, 783, 784, 789, 790,793, 794, 795, 802, 804, 805, 806, 809, 810, 811, 813, 816,821, 823, 824, 825, 828, 830, 832, 834, 835, 836, 837, 839,841, 843, 846, 849, 850, 852, 855, 866, 872, 879, 882: n = A,T,C or G
  misc_feature 883, 885, 886, 889, 892, 894, 896, 905: n = A,T,C or G
tnagcgctnaacgactnactataagtcgacatagtatctgnntnattggagctccaccgcggtggcggcccgatgtactnnntnttntttatgactgancangatgngggaaggcacttgttgtncacaacccngcccatcagggaggcanccccataaacgtattgnnnnncgaatctgttctgcaaggtcccatgtaagagttgtngcctaagacacatggangaaagncaacanacccccnccnnacacattttttttaatttttttaanaagagagagattntttntcantcacccaggctnnanaacannnanccgaactcccnccactgngctcccacctgggcnanaagancaangacttnatctnaaaatnaattaggccggcccgctctataactangtggatcccccgggctgcnggaattctatctcagggcttatcgatncnaaanacctcaacnnggggcccggaaccnaacttttgtccctttaatgaggnntaatnncgcgnggggggccnncanccccatttttgtttcctttagannggggnnannncccccnngggggaaaaangnganaaattntttnccnggnantnnaantntngagnganaagcnnnaannganggnnttgnnngatnnanggactaannnnactannatgnntatgnatgnanaatnanntcnnnnananttnnnntngttntgantnnttatgatantngnanntnangntntntgatacatanacntanngatattgntcnnntnttnngatanngannngtattanannnctnnnanggnattgngnnnganantnannnntngngnctntgnnangangagaagagaanaatgtngttaganaanncnnttngtntntntagtgattncc

SEQ ID NO: 8785 - DNA, 893 bp, Homo sapiens
  misc_feature 1, 19, 24, 104, 402, 403, 407, 409, 410, 413, 414, 415, 417,418, 419, 421, 503, 530, 573, 635, 645, 688, 727, 747, 756,764, 770, 809, 825, 828, 836, 848, 868, 880, 889, 891: n = A,T,C or G
nctttaaccccattttaanactcnagggcgaattgttctccccgcggtggagcggccgcccgggcaggtacaggccacgatattatctttacaagcatgccttnttttatcctcatttaaaacgatttccagttcagggcagtagtgactcatccgaagaaaatggagatgacagttcagaagaggaggaggaagaagaggagacttcaaatgaaggagaaaacaatgaagaatcgaatgaagatgaagactctgaggctgagaataccacactttctgctacaacactgggctatggagaggacgccacgcctggcacagggtatacagggttagctgcaatccagcttcccaagaaggctggggatataacaaacaaagctacaaaagagaagggaaaannttanannaannnannnanggtacctcggccgctctagaactagtggatcccccgggctgcaggaattcgatatcaagcttatcgatccgtcgacctcganggggggcccggtacccagcttttgttncctttagtggagggttaatttgcccgcttggcgtaatcatggncataactgtttcctgtgtgaaaattgttattccgttcacaattccacaccaacattaccaanccgggagcantaaaagtgttaaaagccctgggggtgccctaatggagtgggcntacctcaccatttaatttgcgttgcccctcctggccccntttccaatccgggaaacctnttcgtgccnaacttganttaatnaattcggccaacccccggggaaaaggcggttttgcgttnttgggccctttttcgnttnttggttanatgattccttgngctttggtcgtttcggttgnggggaagcggtnttagcttantnat

SEQ ID NO: 8786 - DNA, 637 bp, Homo sapiens
  misc_feature 5, 7, 35, 90, 156, 165, 167, 168, 177, 182, 184, 189, 190,191, 205, 210, 213, 221, 225, 230, 234, 236, 244, 250, 252,261, 263, 265, 268, 274, 277, 278, 280, 285, 305, 307, 308,310, 320, 323, 324, 329, 330, 337, 343, 345, 350, 355: n = A,T,C or G
  misc_feature 362, 366, 368, 369, 373, 379, 380, 390, 400, 402, 410, 415,416, 426, 432, 437, 446, 448, 452, 453, 455, 458, 463, 467,468, 469, 482, 488, 492, 493, 495, 500, 504, 506, 508, 514,523, 534, 535, 544, 553, 560, 570, 571, 579, 581, 582: n = A,T,C or G
  misc_feature 584, 587, 603, 613, 617, 620, 630, 633: n = A,T,C or G
gcgtnanacgactcactatagggcgaaattggganctccaccgcggtggcggccgaggtacttttttttttttttttttttttttttttnaatttttttttttttttttttttttttttttttttttttttttttttttttttttttttttttttngggggggancnngggaccctnattcntnaaaannncaggccccaaaaanaaacnttnaacaaaancccntgccnggancnaagggacnaaaaancngaaaaaaanangnccnggcaanaannanaaccnggcaagggggccccaaaccncnnancccccggccnctnnaaaannaagggancccccngnccgcnggaantcaaaancaancnnaacnaaaccnncaaccccaanggggggcccngnacccaacntttgnnccctttaagnagggtnaaatncccccctgncnaaannanggncaaanccgnnncctgggggaaaantggaancccnncncaaantgcnananaaaaanacaacccgnaaaccaaaaanngaaaacccngggggcccnaagaganaaacccaccnnacattaantnngngancccacccacccccctnatcaaacaanaaanccngaagaacccnaanaaac

SEQ ID NO: 8787 - DNA, 490 bp, Homo sapiens
  misc_feature 1, 223, 464: n = A,T,C or G
nagccctatcgactactatagggcgaattggagctccaccgcggtggcggccgaggtacgcggggacctcattcatttctaccggtctctagtagtgcagcttcggctggtgtcatcggtgtacttcctccgctgccgcccccgcaaggcttcgccgtcatcgaggccatttccagcgacttgtcgcacgcttttctatatacttcgttccccgccaacccgnaaccattgacgccatgtcgggttattcgagtgaccgagaccgcggccgctctagaactagtggatcccccgggctgcaggaattcgatatcaagcttatcgataccgtcgacctcgagggggggcccggtacccagcttttgttccctttagtgagggttaattgcgcgcttggccgtaatcatggtcattagctgtttcctgtgtgaaattgttatcccgctcacaattccacacaacantacgaagcccggggagcataaaagtg

SEQ ID NO: 8788 - DNA, 646 bp, Homo sapiens
  misc_feature 603, 622, 645: n = A,T,C or G
gactcactatagggcgaattgggagctccaccgcggtggcggccgcccgggcaggtaccagcagaaatcaggacagtcccctaagctactcacttactgggcatctacccgggaatccggggtccctgaccgattcagcggcagcgggtccgggacagaattcactctcaccatcaacaacctgcaggctgaagatgtggcagtttattactgtcagcaatattatactactcctctcactttcggcggagggaccaaggtggagatcaagcgaactgtggctgcaccatctgtcttcatcttcccgccatctgatgagcagttgaaatctggaactgcctctgttgtgtgcctgctgaataacttctatcccagagaggccaaagtacctcggccgctctagaactagtggatcccccgggctgcaggaattcgatatcaagcttatcgataccgtcgacctcgagggggggcccggtacccagcttttgttccctttagtgagggttaattgcgcgcttggcgtaatcatggtcatagctggttcctgtgtgaaattgttatccgctcacaatttcacacaacatacgagccgggagcatnaagtgtaaagcctgggggngcctaatgagtgagctaactcant

SEQ ID NO: 8789 - DNA, 631 bp, Homo sapiens
  misc_feature 2, 4, 8, 10, 29, 30, 41, 44, 55, 60, 81, 579: n = A,T,C or G
tntnaggnanacccccccttcgtccgggnncagtatcatgnaancctaaacgcgnatggnatatatgtttttgaaggcagnaaagcaaaattatgtttgccactttgcaaaggagctcactgtggtgtctgtgttccaaccactgaatctggaccccatctgtgaataagccattctgactcatatcccctatttaacagggtctctagtgctgtgaaaaaaaaaaatgctgaacattgcatataacttatattgtaagaaatactgtacaatgactttattgcatctgggtagctgtaaggcatgaaggatgccaagaagtttaaggaatatgggagaaatagtgtggaaattaagaagaaactaggtctgatattcaaatggacaaactgccagttttgtttcctttcactggccacagttgtttgatgcattaaaagaaaataaaaaaaagaaaaaagagaaaagaaaaaaaaagaaaaaagttgtaggcgaatcatttgttcaaagctgttggcctctgcaaaggaaataccagttctgggcaatcagtgttaccgttcaccagttgccattganggtttcagagagcctttttctaggcctacatgctttgtgaacaagtccctgt

SEQ ID NO: 8790 - DNA, 476 bp, Homo sapiens
ctactatagggcgaattggagctccccgcggtggcggccgcccgggcatggtacctcagaagcaaacccagttcctgcacacagaaaccccattcaggctcctactgcactgagaagcacgtgttctccatttccctgggggagaccattgtattgggcagtttggaacaaaacaccatggactgggaggcttacacaacagaaatttatttcttgctgttctagaggctgggaagctcaaggtgctggctgcatattcattctgaggtctcttctgatgtgcaggcagctgccttctgacttgtgctcacattggagagagggagtcagctttggtgtctcttcttgtaaggacactaaccccattcactagggccccaccctcatgacctaatcacccccaaaggtcctgtctccagacatatcacatggggcagagcttcaatgtacctcggccgctctagaactagtggatc

SEQ ID NO: 8791 - DNA, 812 bp, Homo sapiens
  misc_feature 546, 770, 787, 809, 811: n = A,T,C or G
atggtatcactactatagggcgaattgggccctctagatgcatgctcgagccggccgccagtgtgatggatatctgcagaattcgccctttgagcggccgcccgggcaggtacgacacccctcaagaggtggccgaagctttcctgtcttccctgacagagaccatagaaggagtcgatgctgaggatgggcacggcccaggggaacaacagaagcggaagatcgtcctggacccttcaggctccatgaacatctacctggtgctagatggatcagacagcattggggccagcaacttcacaggagccaaaaagtgtctagtcaacttaattgagaaggtggcaagttatggtgtgaagccaagatatggtctagtgacatatgccacataccccaaaatttgggtcaaagtgtctgaagcagacagcagtaatgcagactgggtcacgaagcagctcaatgaaatcaattatgaagaccacaagttgaagtcagggactaacaccaagaaggccctccaggcagtgtacctcggccgcgaccacnctaagggcgaattccagcacactggcggcccgttactagtggatccgagctcggtaccaagcttggcgtaatcatggtcatagctgtttcctgtgtgaaattgttatccgctcacaatttcacacaacatacgacccggaagcataaagtgtaaagcctggggtgcctaatgagtgaacctaacttacattattggcgttgcctcacttgccgcttttcaatcnggaaacctgtcttggcnacttgcattaattgaattcggncnt

SEQ ID NO: 8792 - DNA, 654 bp, Homo sapiens
  misc_feature 389, 426, 440, 452, 453, 473, 506, 516, 521, 524, 532, 537,540, 542, 545, 546, 566, 573, 586, 598, 599, 607, 610, 613,617, 624, 633, 640, 651: n = A,T,C or G
tatagggcgaattggagctccaccgcggtggcggccgcccgggcaggtaccttctctgttttaataaggcctcatccctgcaccagcatcctaaccatttttctcaaatggagagacgggtgctataaacaacccaatttaggctagaaagggaaactaaatattttgtgtaacatccaaatactctctggttgccaattttggttctaaagaaatggacaaaatttctcccaacctcaggcctggcacagtggctcacacctataatcccagagctttgggaggccaggtaggcagctcacttgaggtcaggagttcaagaccagcctggccaacatggtgaaaactcatttactaaaaatacaaaaatcagctggacatggtggctnccagcttcctcgggaggctgaggcaggagaaactgcntgaattccagaagngggagactgcanngagccaagatcccagtcctnggcccgttttaaactaggggatccccgggccgnaaggaattcnatatncancttattgnaaccngcnanctnnagggggggcccgggccccancttttgnttccctttatggngggtattgggcnnctggcggnatnatnggcntagctgnttcccgggngaaaatnttttccccccnatc

SEQ ID NO: 8793 - DNA, 379 bp, Homo sapiens
  misc_feature 4, 32, 38, 45: n = A,T,C or G
ttcntttttggcgaaatttggcccttttttantctttnttttacngccccagtgatggatatctgcagaattcgcccttcgagcggccgcccgggcaggtacacctgtcttctctggctgcccaccagcggcctctggaccgtccaggccatggatcctaacgctgcttatgtgaacatgagtaaccatcaccggggcctggcttcagccaacgttgactttgccttcagcctgtataagcacctagtggccttgagtcccaaaaagaacattttcatctcccctgtgagcatctccatggccttagctatgctgtccctgggcacctgtggccacacacgggcccagcttctccagggcctgggtttcaacctcactg

SEQ ID NO: 8794 - DNA, 417 bp, Homo sapiens
ggcgaattggagctccaccgcggtggcggccgcccgggcaggtactcacatcacaatgtcattttgataggagcgttttgttatttttacaaggcggaatggggtgtaacagttgaattaaacttagcaatcacgtgctcagagcttttgcctgtcagttgtgtgtgtcccttatagtcccttcccccacagctcttgctgaaagagtttgccttgttttgttttgttgttttgtatttagccagaggatgccaaaattagtcttctcaaagctttgagtagagtaagtgtgggaataagccagtttttttttctgtttctgtaacttaaatgaacgggtttttttcccttgtatgccacttgtcctaacatgtccttaaggtgtttaacctgcctctgacctggcttgcaatgcat

SEQ ID NO: 8795 - DNA, 928 bp, Homo sapiens
  misc_feature 20, 283, 371, 372, 373, 374, 375, 376, 377, 378, 379, 380,381, 382, 383, 384, 385, 387, 388, 390, 391, 392, 393, 394,395, 396, 397, 398, 399, 400, 401, 402, 403, 404, 405, 406,407, 408, 409, 410, 411, 412, 413, 414, 415, 416, 417: n = A,T,C or G
  misc_feature 418, 419, 420, 421, 422, 423, 424, 425, 426, 427, 428, 429,430, 431, 432, 433, 434, 435, 436, 437, 438, 439, 440, 441,442, 443, 444, 445, 446, 447, 448, 449, 450, 451, 452, 453,454, 455, 456, 457, 458, 459, 460, 461, 462, 463, 464: n = A,T,C or G
  misc_feature 465, 466, 467, 468, 469, 470, 471, 472, 473, 474, 475, 476,477, 478, 479, 480, 481, 482, 483, 484, 485, 486, 487, 488,489, 490, 491, 492, 493, 494, 495, 496, 497, 498, 499, 500,501, 502, 503, 504, 505, 506, 507, 508, 509, 510, 511: n = A,T,C or G
  misc_feature 512, 513, 514, 515, 516, 517, 518, 519, 520, 521, 522, 523,524, 525, 526, 527, 528, 529, 530, 531, 532, 533, 534, 535,536, 537, 538, 539, 540, 541, 542, 543, 544, 545, 546, 547,548, 549, 550, 551, 552, 553, 554, 555, 556, 557, 558: n = A,T,C or G
  misc_feature 559, 560, 561, 562, 563, 564, 565, 566, 567, 568, 569, 570,571, 572, 573, 574, 575, 576, 577, 578, 579, 580, 581, 582,583, 584, 585, 586, 587, 588, 589, 590, 591, 592, 593, 594,595, 596, 597, 598, 599, 600, 601, 602, 603, 604, 605: n = A,T,C or G
  misc_feature 606, 607, 608, 609, 610, 611, 612, 613, 614, 615, 616, 617,618, 619, 620, 621, 622, 623, 624, 625, 626, 627, 628, 629,630, 631, 632, 633, 634, 635, 636, 637, 638, 639, 640, 641,642, 643, 644, 645, 646, 647, 648, 649, 650, 651, 652-928: n = A,T,C or G
aagcgtatcgactactatanggcgaattggagctccaccgcggtggcggccgcccgggcaggtaccatatcagtggagagctgcagcaaggtggcccctacagccgcaaaccagcctgcacattacctctccatactgcagccctttatatggaaacttcttacatcactttgctgtgtgtgtttacacaggtgggttttgctgtacctcggccgctctagaactagtggatcccccgggctgcaggaattcgatatcaagcttatcgataccgtcgacctcnagggggggcccggtacccagcttttgttccctttagtgagggttaattgcgcgcttggcgtaatcatggtcatagctgtttcctggannnnnnnnnnnnnnncnngnnnnnnnnnnnnnnnnnnnnnnnnnnnnnnnnnnnnnnnnnnnnnnnnnnnnnnnnnnnnnnnnnnnnnnnnnnnnnnnnnnnnnnnnnnnnnnnnnnnnnnnnnnnnnnnnnnnnnnnnnnnnnnnnnnnnnnnnnnnnnnnnnnnnnnnnnnnnnnnnnnnnnnnnnnnnnnnnnnnnnnnnnnnnnnnnnnnnnnnnnnnnnnnnnnnnnnnnnnnnnnnnnnnnnnnnnnnnnnnnnnnnnnnnnnnnnnnnnnnnnnnnnnnnnnnnnnnnnnnnnnnnnnnnnnnnnnnnnnnnnnnnnnnnnnnnnnnnnnnnnnnnnnnnnnnnnnnnnnnnnnnnnnnnnnnnnnnnnnnnnnnnnnnnnnnnnnnnnnnnnnnnnnnnnnnnnnnnnnnnnnnnnnnnnnnnnnnnnnnnnnnnnnnnnnnnnnnnnnnnnnnnnnnnnnnnnnnnnnnnnnnnnnnnnnnnnnnnnnnnnnnnnnnnnnnnnnnnnnnnnnnnnnnnnnnnnnnnnnnnnnnnnnnnnnnnnnnnnnn

SEQ ID NO: 8796 - DNA, 657 bp, Homo sapiens
  misc_feature 46, 401, 425, 603, 616: n = A,T,C or G
gactcactatagggcgaattggagctccaccgcggtggcggccgangtactttttttttttttttttttttttttggtctcccagggacctctttacactcttaaaaatgacatcctaaatggcttttatttatatggatatctactgatatttaccatattcaaatttaaaacaaatgtttgaaaatattcactaattcctttaaaaatagctcattaaaaatatgaaaaagatacttttacaaatttagtgagaatatcactgttttataattttgcaaatctcttaatgcctggcttaaatgaaaactgctggagtcccatatctgtttctgcattaaatttgctgctatatgatttttttgcttaaaacatatgaggaaaatctggcttcacctaanaatgtagttgtgaaaaggataagnattttaatagccttttctgataattatagatattctatgaaattacaccaaaaactcaacgagtggtacctgcccgggcggccgctctagaactagtggatcccccgggctgcaggaattcgatatcaagcttatcgataccgtcgacctcgagggggggcccggtacccagctttgntccctttagtganggttaattgcgcgcttggcgtaatcatgggcatagccgttt

SEQ ID NO: 8797 - DNA, 647 bp, Homo sapiens
  misc_feature 445, 468, 475, 497, 512, 531, 539, 555, 558, 571, 577, 582,585, 587, 588, 593, 602, 603, 619, 622, 626, 632, 634, 639,640, 644: n = A,T,C or G
gcaattaaccctcactaaggggaacaaagctgggtaccgggccccccctcgggtcgacggtatcgataagcttgatatcgaattcctgcagcccgggggatccactagttctagagcggccgaggtacttttttttttttttttttttttggtctacaaacagatcctgttcagggttctctacagaagaatcttctgtttctacagtggtctttttgcctttttctgtagtgcaatcttcccgatcgggatattctttgttctgagaagaaaactggaactcaggcagcctcacagtccacccactgctgaaagttcctgagattttcacattagctgattcttgcaatccctcaggagttttttgcctttgatgcccaatttcaaccacttttggaggacttgtttgatcccgcgtacctgcccgggcggccgccaccgcggnggagctccaattcgccctatagngagtcgnattacgcgcgctcactggccgncgttttacaacgtcntgactgggaaaaccctggngttacccnacttaattcgccttgnagnacatacccctttngccagnttgcntantnncgaanaagcccccnnccgatcgccttcccanagntgcncagtcntnaatgnnaaanggg

SEQ ID NO: 8798 - DNA, 640 bp, Homo sapiens
  misc_feature 20, 23, 30, 54, 495, 509, 540, 561, 578, 602, 618, 623, 628,636, 639: n = A,T,C or G
gcgcattaaccctcactaanggnaacaaantctgggtaccgggccccccctcgngtcgacggtatcgataagcttgatatcgaattcctgcagcccgggggatccactagttctagagcggccgcccgggcaggtacaactccttttctgaagttttgctcatttccaacaaggaaggcaagttttcctgcttccatgacaaagggagagcaggcacctcctttcctgagtttcagcttgcttctgacaggcaaggtgagtgtaagttttttccagcatctaagatggcagagaacaatcaccagcctgagccttatttccaggtaagtagctgaattagagtttgtcttaaaatttttccttaatgactaaaatttaagatgacccaccagctgcttttaatttctccttaccattagaacactcagtaatcatatgaattgtgcatttgtttgttttgcttaactctttttgtttatgtttggggtttattgntgctgattcacttnttcccccatctgttcctgacttgggcaaatncaaaggaatgttccaaattgnggggagcaaggcacctnaattggctaaaactcctgtggctnccaaaaaaacccccangggancaaanaacaaacnttng

SEQ ID NO: 8799 - DNA, 626 bp, Homo sapiens
  misc_feature 2, 5, 21, 42, 75, 79, 566, 574, 586, 601, 610, 625, 626: n = A,T,C or G
cngtntggctagcttctatgngggtcctcttgcggttgcagnacagccggcttcttggctcctcacatggcaggnaagnaagtgcgcaagctctctggcctcttcttacaagggcattaattaccttctgaaggctccacccccaaacaccatcacattgctgacttccattaacttccttgtcattttttaatgtttttctcttcttatgtttttctactgttgggcaaggtgggaaatgtgtattctgacatatagactcattttcctgcaggatgtttataaatagttcctggcaaaggaggttgccgtatagggtcctacaagtaacctaggtgacagtatctcctcccagcgtcaggtctaagcacacaagttcttccttccatctacccccgcgtacctcggccgccaccgcggtggagctccaattcgcccctatagtggagtcgtattacgcgcgctcactggccgtcgttttacaacgtcgtgactggggaaaaccctggcgttacccaacttaatcgccttggcacacaatcccccctttcgccagctggcgtatnagcgaaangcccgcaccgantcgcccttcccaacngttgcgcanccctgaatggcaaann

SEQ ID NO: 8800 - DNA, 362 bp, Homo sapiens
  misc_feature 1, 3, 21, 28, 30, 78, 82, 90, 91, 92, 93, 104, 108, 112,115, 117, 121, 124, 128, 129, 132, 133, 134, 137, 138, 139,142, 157, 158, 162, 165, 169, 170, 172, 173, 185, 191, 196,199, 212, 216, 225, 226, 228, 234, 241, 250, 255, 257: n = A,T,C or G
  misc_feature 258, 259, 262, 264, 265, 266, 268, 270, 279, 281, 285, 286,289, 290, 294, 297, 311, 319, 323, 328, 329, 333, 336, 340,341, 351, 359, 360: n = A,T,C or G
ngnacttcactatgagggccnaattggnanctccaccgcggtggcggccgaggtactttttttttttttttttttttngggnagggattnnnntttttcccccngggngganggnangggnccnaatnnggnnnaannnaancccccccccccgggnnaaanccntttnncnncccaaacccccnaaaaanggggnaanaaagggccccccnaaancccccgggnnantttttnttttttnaaaaaaaanggggntnnnccngnnnancnaaaaagggncnaaannccnnaccntgnaaaccccccctttnggcccccnaaangggtnngaanaangggnnaaaccccccnccccgggnntt

SEQ ID NO: 8801 - DNA, 635 bp, Homo sapiens
  misc_feature 3, 6, 9, 34, 87, 89, 175, 186, 187, 191, 201, 202, 203, 209,210, 211, 212, 213, 214, 215, 219, 229, 248, 250, 252, 254,255, 256, 259, 262, 263, 270, 271, 273, 274, 282, 283, 285,290, 291, 292, 298, 299, 300, 302, 303, 304, 305: n = A,T,C or G
  misc_feature 308, 309, 310, 316, 320, 321, 322, 326, 327, 328, 330, 336,338, 339, 341, 343, 352, 356, 364, 365, 366, 367, 368, 372,376, 378, 386, 388, 390, 391, 392, 393, 395, 416, 434, 435,440, 442, 445, 446, 455, 457, 464, 467, 468, 476, 479: n = A,T,C or G
  misc_feature 484, 485, 487, 488, 489, 492, 504, 505, 506, 507, 516, 519,525, 527, 530, 537, 538, 539, 550, 551, 558, 567, 573, 586,588, 592, 606, 607, 610, 625, 630, 632: n = A,T,C or G
gtnaancgnacttcacttataggggcgaattggnaactccaccgcggtggcggccgagtacttttttttttttttttttttttttantnattttttttttttttttttttttttttttttttttttttttttttttttttttttttttttttttttttttttttttttttttttnggggggggggnngggncccctttttnnnaaaaannnnnnncccnaaaaaaaaancttaaaaaaaaaccccccncngngnnnaanggnnaaaaaanngnnaaaaaaanngncccgnnnaaaaannnannnnggnnngggggncccnnncccnnnancccccngnncntnaaaaaaaangggncccccccnnnnngggnaaancnaaaaaaancntnnnnanccccccccccccggggggggncccccccccccctttttnnccccntnaannggggaaaangnccccccnggnnaaaaaaanggnaaaanngnnnccnggggaaaaaaannnnccccccaanaantcccananaanaaaaggnnnggaaaaaaaannaaacccnggggccccnaaaganggccccccccccnanttantgggggggcccccnnacnccccttaaaaaaagnaaaancnggg

SEQ ID NO: 8802 - DNA, 586 bp, Homo sapiens
  misc_feature 489, 549, 586: n = A,T,C or G
ggcctgagacagtcctcatatcctcttgagccaaactgtttgggtctcgttgcttcatggtatggtctggatttgtgggaatggctttgcgtgagaaaggggaggagagtggttactgccctcagccggcttgaggacagagcctgtccctctcatgacaactcagtgttgaagcccagtgtcctcagcttcatgtccagtggatggcagaagttcatggggtagtggcctctcaaaggctgggcgcatcccaagacagccagcaggttgtctctggaaacgaccagagttaagctctcggcttctctgctgagggtgcaccctttcctctagatggtagttgtcacgttatctttgaaaactcttggactgctcctgaggaggccctcttttccagtaggaagttagatgggggttctcagaagtggctgattggaaggggacaagcttcgtttcaggggtctgccgttccatcctggttcagagaangccgagcgtggctttctctagccttgtcactgtctccctgcctgtcaatcaccacctttncttcagaggaggaaaatatcttccctgcaagccccgn

SEQ ID NO: 8803 - DNA, 761 bp, Homo sapiens
  misc_feature 3, 4, 6, 8, 9, 10, 11, 12, 14, 16, 17, 18, 19, 20, 21, 22,23, 24, 25, 26, 28, 29, 33, 34, 35, 36, 37, 40, 41, 42,43, 44, 45, 46, 47, 48, 51, 53, 54, 56, 58, 59, 60, 61,62, 65, 66, 67, 69, 70, 71, 72, 73, 74, 75, 77, 78, 81,82: n = A,T,C or G
  misc_feature 84, 85, 86, 87, 89, 90, 91, 93, 94, 95, 96, 97, 99, 100,102, 103, 104, 105, 106, 107, 108, 109, 110, 111, 112, 113,115, 120, 123, 134, 276, 314, 365, 368, 374, 389, 411, 455,485, 497, 547, 576, 581, 582, 625, 628, 630, 634, 677: n = A,T,C or G
  misc_feature 686, 688, 708, 710, 715, 719, 725, 728, 729, 736, 759, 760: n = A,T,C or G
ccnncntnnnnntntnnnnnnnnnnntnnctannnnnttnnnnnnnnnatnanntntnnnnntannnannnnnnntnnttnnannnntnnntnnnnnanntnnnnnnnnnnnngncgtantcnttcgggagtcnacccacgcgttcgcgcttcccacagagcggagccccagaccccaactgcgtcactgtgacggggctcccagagaatgtggaggaagccatcgaccacatcctcaatctggaggaggaatacctagctgacgtggtggacagngaggcgctgcaggtatacatgaaacccccagcacactnaagaggccaaggcaccttccagaggctttgtggtgcagggtaccgcacccntgnacccgncagcagccagtgagnaaggcttccttggacatggagncagctcttgagggaattttcccagcctttggggggctcaagggngggctcccaaggaccctccctttggggggnccccaaaaccgnataaaatggaatccaaaaaaagaaaccaggaaccccttttcccagccctngcttgaccccggaaccccaaaccaaccancaaanngggtttttggtcctaaaaattttggacccccaagcgggggttnggnancccnttcccgtaaaaattttggtttggaccgccttcttttccccccnttttccccngnagggggcccccgcaaggggnanggccntaancccccntgnntttgttnatttagccggccccgttaaaaanna

SEQ ID NO: 8804 - DNA, 482 bp, Homo sapiens
  misc_feature 2, 82, 214, 236, 341, 343, 441, 443, 457, 461, 478: n = A,T,C or G
anttgaatccttcaagcctccaaaaatttgtttgatttcttaaataatttcaacttttcttgtcaggtttctactattgggngttcattttcctgatttcattgaattgtttctctgttttttattaaagctcaataagatttcctaaaacaaatattttaaattctttatcagatcatttatatatctcattttctttaggatcagctaccanaagattactatgttcttttggnggtatatcccattgttttttatatacttcttattggattatattgatgtctgcatatttgatggaacagtcacctcttgcagactttatgggttagtttcattgnanaaatatcttttcctacgaggaggaggagtgtgagggttcttcctgtgtgtggtccagcagttccagcatcagtgagggtgctagctatagagtctgcntncagttcagtcaggntganaacagtgttaaccaaanaatg

SEQ ID NO: 8805 - DNA, 459 bp, Homo sapiens
  misc_feature 2, 3, 7, 8, 22, 24, 44, 47, 51, 72, 101: n = A,T,C or G
gnnaggnnttcgacgcatttcnantaccgggcgaatttttgcgnaangtcntggcggccgaggtacagcatnatcaaccttacatttcaaccaaatttttngagatcagggactctctgaaggggagaagctccacaacctcagcaaattatcctattcgtttgggcaatacaaatagcccaggttggtatcaagcaataatgagatttatcaaaggtcaggaccacctttgtaatgtccttctctttttttatctttattggtcccgcgtacctgcccgggcggccgctctagaactagtggatcccccgggctgcaggaattcgatatcaagcttatcgataccgtcgacctcgagggggggcccggtacccagcttttgttccctttagtgagggttaattgcgcgcttggcgtaatcatggtcatagctgtttcctgtgtgaaattgttatccgc

SEQ ID NO: 8806 - DNA, 645 bp, Homo sapiens
  misc_feature 623: n = A,T,C or G
cctcactaagggaacaaaagctgggtaccgggccccccctcgggtcgacggtatcgataagcttgatatcgaattcctgcagcccgggggatccactagttctagagcggccgggttaaacgagctgttcttggggaagtcctccagtgagtcatgcacttttttgcactttttggatttgctagacatttttcggtttctggtctggatgccttccttcttcatagtcaggggtctgttaatattgtgaagcttgtagtagagcccacaggcattgcagacacatgctgaccacgcccacgccgatgcacccgccatccagcctgtcctttggaccacaccacccccccgcgtacctcggccgccaccgcggtggagctccaattcgccctatagtgagtcgtattacgcgcgctcactggccgtcgttttacaacgtcgtgactgggaaaaccctggcgttacccaacttaatcgccttgcagcacatccccctttcgccagctggcgtaatagcgaagaggcccgcaccgatcgcccttcccaacagttgcgcagcctgaatggcgaatgggacgcgccctgtagcggcgcattaagcgcggcgggtgtgggtgggtacncgcagcgtgaccgctacacttt

SEQ ID NO: 8807 - DNA, 657 bp, Homo sapiens
  misc_feature 446, 533, 535: n = A,T,C or G
ggcgaattggagctccaccgcggtggcggccgcccgggcaggtacgcggggacattttctcggccctgccagcccccaggaggaaggtgggtctgaatctagcaccatgacggaactagagacagccatgggcatgatcatagacgtcttttcccgatattcgggcagcgagggcagcacgcagaccctgaccaagggggagctcaaggtgctgatggagaaggagctaccaggcttcctgcagagtggaaaagacaaggatgccgtggataaattgctcaaggacctggacgccaatggagatgcccaggtggacttcagtgagttcatcgtgttcgtggctgcaatcacgtctgcctgtcacaagtacctcggccgctctagaactagtggatcccccgggctgcaggaattcgatatcaagcttatcgataccgtcgacctcnagggggggcccggtacccaacttttgttccctttagtgagggttaattgcgcgcttggcgtaatcatggccataagctgtttcctgngngaaattgttatccgctcacaattccacacaacatacgaacccgggagcataaagtgtaaaagcctggggtgcctaatgaagtgagctaactcacattaattgccgttgcgctcactggccct

SEQ ID NO: 8808 - DNA, 665 bp, Homo sapiens
  misc_feature 10, 34, 39, 79, 607, 630, 665: n = A,T,C or G
ataccgcgtnctggtactcacttgttgtgcctgnttggnactccaccgcggtggcggccgcccgggcaggtacgcgggnaggcattgaggcagccagcgcaggggcttctgctgagggggcaggcggagcttgaggaaaccgcagataagtttttttctctttgaaagatagagattaatacaactacttaaaaaatatagtcaataggttactaagatattgcttagcgttaagtttttaacgtaattttaatagcttaagattttaagagaaaatatgaagacttagaagagtagcatgaggaaggaaaagataaaaggtttctaaaacatgacggaggttgagatgaagcttcttcatggagtaaaaaatgtatttaaaagaaaattgagagaaaggactacagagccccgaattaataccaatagaagggcaatgcttttagattaaaatgaaggtgacttaaacagcttaaagtttagtttaaaagttgtaggtgattaaaataatttgaaggcgatcttttaaaaagagattaaacccgaaggtgattaaaaagaccttgaaatccatgacgcaggagaattgcgtcattttaagccctanttaacccattttacttaaccccnaacgaaaatgggaaagattaattgggagtggtagn

SEQ ID NO: 8809 - DNA, 873 bp, Homo sapiens
  misc_feature 376, 377, 378, 379, 380, 381, 382, 383, 384, 385, 386, 387,388, 389, 390, 391, 392, 393, 394, 395, 396, 397, 398, 399,400, 401, 402, 403, 404, 405, 406, 407, 408, 409, 410, 411,412, 413, 414, 415, 416, 417, 418, 419, 420, 421, 422: n = A,T,C or G
  misc_feature 423, 424, 425, 426, 427, 428, 429, 430, 431, 432, 433, 434,435, 436, 437, 438, 439, 440, 441, 442, 443, 444, 445, 446,447, 448, 449, 450, 451, 452, 453, 454, 455, 456, 457, 458,459, 460, 461, 462, 463, 464, 465, 466, 467, 468, 469: n = A,T,C or G
  misc_feature 470, 471, 472, 473, 474, 475, 476, 477, 478, 479, 480, 481,482, 483, 484, 485, 486, 487, 488, 489, 490, 491, 492, 493,494, 495, 496, 497, 498, 499, 500, 501, 502, 503, 504, 505,506, 507, 508, 509, 510, 511, 512, 513, 514, 515, 516: n = A,T,C or G
  misc_feature 517, 518, 519, 520, 521, 522, 523, 524, 525, 526, 527, 528,529, 530, 531, 532, 533, 534, 535, 536, 537, 538, 539, 540,541, 542, 543, 544, 545, 546, 547, 548, 549, 550, 551, 552,553, 554, 555, 556, 557, 558, 559, 560, 561, 562, 563: n = A,T,C or G
  misc_feature 564, 565, 566, 567, 568, 569, 570, 571, 572, 573, 574, 575,576, 577, 578, 579, 580, 581, 582, 583, 584, 585, 586, 587,588, 589, 590, 591, 592, 593, 594, 595, 596, 597, 598, 599,600, 601, 602, 603, 604, 605, 606, 607, 608, 609, 610: n = A,T,C or G
  misc_feature 611, 612, 613, 614, 615, 616, 617, 618, 619, 620, 621, 622,623, 624, 625, 626, 627, 628, 629, 630, 631, 632, 633, 634,635, 636, 637, 638, 639, 640, 641, 642, 643, 644, 645, 646,647, 648, 649, 650, 651, 652, 653, 654, 655, 656, 657-873: n = A,T,C or G
gcccgtatcgactactatagggcgaattggagctccccgcggtggcggcccgaggactttgactggggaaaccttggccaggtttgacctgcttctccttgcaatttcaaagagccctgctctcactcaggcctctcactagggccagccttagacctagttgtaagtctgctttaggaatggaactgtcgcagcacgagggaatggctattttcttcagagtccaactctaagcacaaaatgctaggatttcctcaaggtgcatccatattggtgagcatcatggttaagattaatgacccaacttacttgtaaatttcaggttgactaagaatcaggaatttcaggttactgtaaggcccagtacctgcccggnnnnnnnnnnnnnnnnnnnnnnnnnnnnnnnnnnnnnnnnnnnnnnnnnnnnnnnnnnnnnnnnnnnnnnnnnnnnnnnnnnnnnnnnnnnnnnnnnnnnnnnnnnnnnnnnnnnnnnnnnnnnnnnnnnnnnnnnnnnnnnnnnnnnnnnnnnnnnnnnnnnnnnnnnnnnnnnnnnnnnnnnnnnnnnnnnnnnnnnnnnnnnnnnnnnnnnnnnnnnnnnnnnnnnnnnnnnnnnnnnnnnnnnnnnnnnnnnnnnnnnnnnnnnnnnnnnnnnnnnnnnnnnnnnnnnnnnnnnnnnnnnnnnnnnnnnnnnnnnnnnnnnnnnnnnnnnnnnnnnnnnnnnnnnnnnnnnnnnnnnnnnnnnnnnnnnnnnnnnnnnnnnnnnnnnnnnnnnnnnnnnnnnnnnnnnnnnnnnnnnnnnnnnnnnnnnnnnnnnnnnnnnnnnnnnnnnnnnnnnnnnnnnnnnnnnnnnnnnnnnnnnnnnnnnnnnnnnnn

SEQ ID NO: 8810 - DNA, 642 bp, Homo sapiens
  misc_feature 2, 8, 10, 12, 14, 16, 24: n = A,T,C or G
anggaatnancnantnctttacancaccgcgtccgcggacgcgtggggtccaggtaagtgaatctgtccaaggtcacccagcaaggtatcagtagccctgagggtaaggactctgataaggctcgggagggtcctggaaagcctgaggcggcaggaagagtgtgcagagttgagcgtgtctggaaggctgatccactgctgggcccacatcaaagcccccatggggagcagacccgactgcacatggctcttttgctggaagaagagcatggctgcgcagaggactaaaatttcatctgggaaggcttcttttgactgtcagtagcaggatgtcaccagatgagggtgctatgggaccacagctgtctttgttcccattgcaactcaaccctgcgggaggccgcctacatccctgagagccttctggagcctacagaggagacattggccagccaaaaggaaaggagtggccagggtacgacctggagtagggaagggaaaaaagttcccggaaagaagagaattggatgagaggtctcggtggaaataaaggttttctggcattggtcaaggaaaaaaaaaaaaaaaaaaagggcggccgctagactagtctagagaaaaaacctccacaccttccctgac

SEQ ID NO: 8811 - DNA, 667 bp, Homo sapiens
  misc_feature 260, 300, 346, 372, 384, 405, 478, 501, 581, 590, 614, 615,620, 625, 637, 638, 646, 647, 652, 653, 654, 655, 656, 659,660, 665: n = A,T,C or G
ctcactaagggaacaaaagctgggtaccgggccccccctcgggtcgacggtatcgataagcttgatatcgaattcctgcagcccgggggatccactagttctagagcggccgaggtacttttttttttttttttttttttcgggcatttgaactttaggaaattgcacctcaagctgtagtttactaggggatccatccatcttcccttcaaagcaatgtttttccttccatattggttcctttgataaacagtgttganagagtattggcagctgggggcacattccaatttttttcanattatcttaaaatgttgaaatcttgaactagttccacatggctggngaggcctcacaatcatagtggaaggngaaaggcacatntcacgtggtggcagacagganaaggcagcttgtgcagggaaactcccccttataaaaccccccgcgtacctgcccgggcggccgccaccgcggnggagctccaattcgccctatagngagtcgtattacgcgcgctcactggccgtcgttttacaacgtcgtgactgggaaaaccctggcgttacccaacttaatcnccttgcagnacatccccccttcgccagctggcnnaaaanccaanaggccccccccnnaccccccnnccacnnnnncgnngcctnaa

SEQ ID NO: 8812 - DNA, 445 bp, Homo sapiens
  misc_feature 1, 7, 9, 10, 20, 35, 92, 98, 99: n = A,T,C or G
nggaatntnnataccgacancactatagggcgaanttgggccctctagatgcatgctcgagcggccgccagtgtgatggatatctgcagaantcggcnnagcgtggtcgcggccgaggtacatgggctgggattgatgggaagggacagatgtagttggcaaccatggttagcatcggatgcccatcccaatggccatgaatgtgccaaaggtgccgccactctgcatcatggttttcccaatgccgcccatcagctctcgaccccgcattccgatcctgagacaggaaaaggtgccgaagagcgccccggccgccatgcccacggcgcaacccatcacgaagcccattttgacacggtcgaagcagcttggctgggactgtccgtagggacccacggccaccggcacctgcccgggcgccgctcgaaagccgaattccagcaca

SEQ ID NO: 8813 - DNA, 665 bp, Homo sapiens
  misc_feature 665: n = A,T,C or G
tcactatagggcgaattggagctccaccgcggtggcggccgaggtactagctgcttgttacaaacaaaatatttgtgttcccccaaaattcctatgaagttctgacctgcaatgtgatagtatttggaggtagggcctttagaaggtaattagggctagatgagatcatgtgggtggggcacccatgatggaattagtgtccttataaaaagaggaagagctggtgttctctgtctaccaactgaggacacagggagaaggctgccgtctgcaggccaggaaaagagccctccccagagctcaaccatgctggcaccataatctcaactcctagcctccagaagtatgaaaaataaatgtctgttgtttaagcccccagtctatggtattttactatgacagctcaagcagactaagatgctagtacctgcccgggcggccgctctagaactagtggatcccccgggctgcaggaattcgatatcaagcttatcgataccgtcgacctcgagggggggcccggtacccagcttttgttccctttagtgagggttaattgcgcgcttggcgtaatcatggtcatagctgtttcctgtgtgaaattgttatccgctcacaattccacacaacatacgagccgggagcataaagtgtaaagcctgggn

SEQ ID NO: 8814 - DNA, 469 bp, Homo sapiens
  misc_feature 2, 3, 4, 5, 6, 9, 10, 14: n = A,T,C or G
gnnnnnagnnacgncgaaacactactatagggcgaattggagctccaccgcggtggcggccgatacctcaccgtggctgctgtcttccgtggtcggatgtccatgaaggaggtcgatgagcagatgcttaacgtgcagaacaagaacagcagctactttgtggaatggatccccaacaatgtcaagacagccgtctgtgacatcccacctcgtggcctcaagatggcagtcaccttcattggcaatagcacagccatccaggagctcttcaagcgcatctcggagcagttcactgccatgttccgccggaaggccttcctccactggtacctcggcccgctctagaactagttggatcccccgggctgcaggaattcgatatcaagcttatcgaataccgtccgacctcgagggggggggcccggtaccccaagcttttgttcccctttagtgagggttaattgccgcg

SEQ ID NO: 8815 - DNA, 451 bp, Homo sapiens
  misc_feature 2, 3, 7, 8, 11, 451: n = A,T,C or G
gnngcgnnacntactatagggcgaattggagctccccgcggtggcggccgaggtactggaccatgatgttatcactggatgctgcctcctgagcctcattcacccagcgcttgaccacgtcaaagctgcacttcagcaggtgcaaggaagacacgagggcagagctggagacactgggcaccttgtccacaatggcttgtttcatgtagcgctcaatagcctgcagcatggtgctatcaagtgatctggcagagggctcgcacggccgctctagaactagtggatcccccgggctgcaggaattcgatatcaagcttatcgatacccgtcgacctcgagggggggccccggtacccagcttttgttccctttagtggagggttaattgcgccgcttggcgtaatcatgggtcataagctgtttcctgtgtgaaaattgtttatcccgctcn

SEQ ID NO: 8816 - DNA, 586 bp, Homo sapiens
  misc_feature 9, 11, 13, 15, 17, 210, 212: n = A,T,C or G
agggatatngngngncnccacccgtcacgcgttcggggatgcgcttgggctccctgttcgttcccacatgcagggcagcacaaggagaatgggcgtcatgactgatgtccaccggcgcttcctccagttgctgatgacccatggcgtgctagaggaatgggacgtgaagcgcttgcagacgcactgctacaaggtccatgaccgcagtgncnccgtatataagttggaggacttcatcaacaacattaacagtgtcttggagtccttgtatattgagataaagagaggagtcacggaagatgatgggagacccatttatgcgttggtgaatcttgctacaacttcaatttccaaaatggctacggattttgcagagaatgaactggatttgtttagaaaggctctggaactgattattgactcagaaaccggctttgcgtcttccacaaacatattgaacctggttgatcaacttaaaggcaagaagatgaggaagaaggaagcggagcatgtgctgcagaagtttgttcaaaacaagtggctgattgagaaggaaggggagttcaccctgcacggccggccatct

SEQ ID NO: 8817 - DNA, 617 bp, Homo sapiens
  misc_feature 13, 18, 53, 192, 215, 216, 217, 218, 219, 228, 229, 230,236, 237, 256, 257, 258, 259, 262, 270, 272, 273, 280, 281,287, 288, 289, 290, 291, 292, 296, 299, 300, 304, 305, 307,310, 311, 312, 313, 314, 317, 322, 324, 325, 326, 328: n = A,T,C or G
  misc_feature 329, 330, 331, 333, 334, 339, 341, 345, 346, 357, 358, 359,360, 361, 362, 363, 364, 366, 377, 378, 379, 380, 381, 384,386, 389, 390, 393, 396, 397, 411, 425, 426, 431, 432, 440,447, 454, 461, 475, 482, 490, 503, 505, 506, 520, 521: n = A,T,C or G
  misc_feature 526, 535, 539, 545, 552, 559, 561, 562, 583, 584, 585, 588,589, 590, 591, 593, 594, 595, 596, 607, 609: n = A,T,C or G
gtgacactatagnaaaanctatgacgtcgcatgcacgcgtacgtaagcttggnatcctctagaagcggccgccctttttttttttttttttttttttttttttttttttttttttttttttttttttttttttttttttttttttttttttttttttttttttttttttttttttttttttttttttttttnttttttttttttttttttggggnnnnnggggggggnnnaaaaannaaaaaaaaaaaaaaaaaannnnccnaaaaaaanannaaaaaanngggggnnnnnngggnaanncccnnanttnnnnnttnggggnannnannnngnntcccngngggnnaaaaaaaaaannnnnnnncnaaaaaaaaaannnnnggngnggnnaanccnntttaaaaaaaaaangggggggggggggnnaaaanncccccccnaaaaaanggggggnccccccnaaaaaaaaaaaaantttgggngaaaaaanatacccccccccncnngggggggggggggnngaaanaaaaaaagngggnggaaanaaccccngggcccncnnaaattttttggaaaaaaaaannnttnnnnannnncaaaagagggngnggcccccc

SEQ ID NO: 8818 - DNA, 672 bp, Homo sapiens
  misc_feature 4, 5, 18, 28, 29, 36, 157, 159, 160, 161, 184, 185, 193,194, 195, 196, 197, 198, 199, 200, 201, 202, 203, 206, 214,228, 229, 237, 248, 249, 257, 258, 259, 260, 266, 267, 268,269, 275, 294, 308, 309, 310, 311, 312, 313, 317, 318: n = A,T,C or G
  misc_feature 340, 341, 342, 343, 351, 365, 378, 379, 380, 396, 397, 399,400, 401, 417, 427, 440, 447, 449, 451, 452, 458, 466, 477,496, 497, 498, 499, 500, 504, 506, 507, 508, 509, 510, 511,512, 513, 514, 515, 516, 517, 518, 519, 520, 521, 522: n = A,T,C or G
  misc_feature 523, 524, 525, 526, 527, 528, 529, 530, 531, 532, 533, 534,535, 536, 537, 538, 539, 540, 541, 542, 543, 544, 545, 546,547, 548, 549, 550, 551, 552, 553, 554, 555, 556, 557, 558,559, 560, 561, 562, 563, 564, 565, 566, 567, 568, 569: n = A,T,C or G
  misc_feature 570, 571, 572, 573, 574, 575, 576, 577, 578, 579, 580, 581,582, 583, 584, 585, 586, 587, 588, 589, 590, 591, 592, 593,594, 595, 596, 597, 598, 599, 600, 601, 602, 603, 604, 605,606, 607, 608, 609, 610, 611, 613, 614, 615, 616, 617: n = A,T,C or G
  misc_feature 618, 619, 620, 621, 622, 623, 624, 625, 626, 627, 628, 629,630, 631, 632, 633, 634, 635, 636, 637, 638, 639, 640, 641,642, 643, 644, 645, 646, 647, 648, 649, 650, 651, 652, 653,654, 655, 656, 657, 658, 660, 662, 663, 664, 666, 667: n = A,T,C or G
  misc_feature 670, 671, 672: n = A,T,C or G
gcgnncaacgtactcacncagagggccnnaattggnaactccaccgcggtggcggccgagtacttttttttttttttttttttttttttgggttttttttttttttttttttttttttttttttttttttttttttttttttttttttttttttttncnnngaaaaaaaaaaaaaaaaaaaaanntttttttnnnnnnnnnnnccngggggggnaaaaaaaaaaaaanncccccccnaaaaaaaaaanncccccccnnnncccccnnnngggggnaaaaaaaaaaaaaaaaaancccccccccccccnnnnnnaaanncccccccccccccccccccccnnnngggggggnaaaaaaaaaaaaanccccccccccccnnnaaaaaaaaaaaaaaanncnnncccccccccccccccngggggggggnccccccccccccnttttttncntnnaaaaanaaaaaaanccccccccccnaaaaaaaaaaaaaaaaaannnnncccncnnnnnnnnnnnnnnnnnnnnnnnnnnnnnnnnnnnnnnnnnnnnnnnnnnnnnnnnnnnnnnnnnnnnnnnnnnnnnnnnnnnnnnnnnnnnnnnnnnnnnnnnnnannnnnnnnnnnnnnnnnnnnnnnnnnnnnnnnnnnnnnnnnnnnnnanannnannaannn

SEQ ID NO: 8819 - DNA, 640 bp, Homo sapiens
  misc_feature 342, 344, 365, 369, 371, 377, 389, 398, 409, 413, 414, 415,421, 434, 438, 440, 441, 442, 451, 463, 466, 476, 478, 489,494, 496, 497, 499, 502, 506, 512, 517, 520, 525, 542, 543,546, 547, 551, 555, 560, 562, 576, 595, 602, 615, 616: n = A,T,C or G
  misc_feature 617, 624, 637, 640: n = A,T,C or G
cctcctaagggaacaaagctgggtaccgggccccccctcgggtcgacggtatcgataagcttgatatcgaattcctgcagcccgggggatccactagttctagagcggccgaggtacactgcagcctccaactcctagcctcaagtgatcctcctgtctcaacctcccaagtaggattacaagcatgcgccgacgatgcccagaatccagaactttgtctatcactctccccaacaacctagatgtgaaaacagaataaacttcacccagaaaaaaaaaaaaaaaaaaaaaaaaaaaaaaaaaaaaaaaaaaaaaaaaaaaaaaaaaaaaaaaaaaaaggtncntgcccgggtgcctgcccgggngggngncaccgngggggaccttcnagtgggccntatagggagcnttannnggcccnctaattggccgtntttnannnggaaaacgntggggaaacccnggnagttacccangnttaaccccctngaatnanncnctntttngccagnggggnggnaaggnaggaggcccctaccganngtnnttcnaaanagttngncaaattggaagggnaatgggacccccctttaancgccccnttaagggcggttnnnggggggnttaccccaaattnccn

SEQ ID NO: 8820 - DNA, 663 bp, Homo sapiens
  misc_feature 2, 3, 18, 27, 38, 43, 320, 327, 352, 355, 356, 376, 379,381, 384, 386, 388, 390, 410, 418, 420, 430, 433, 435, 437,438, 440, 443, 447, 449, 452, 457, 468, 470, 471, 475, 476,478, 482, 485, 487, 491, 494, 497, 499, 501, 504, 505: n = A,T,C or G
  misc_feature 514, 518, 521, 522, 525, 527, 530, 533, 547, 550, 554, 558,560, 561, 562, 563, 565, 571, 578, 582, 583, 585, 589, 590,592, 594, 595, 601, 606, 608, 609, 616, 617, 619, 623, 628,629, 630, 638, 639, 644, 646, 648, 649, 650, 651, 653: n = A,T,C or G
  misc_feature 657, 658, 659, 660, 663: n = A,T,C or G
gnncgcgcgttattacgnattcacttntaggggcgaanttggnaactccaccgcggtggcggccgtcgccaccaacgcgctctcccaaccctcgggagtcagttccaaaaccaaaccaaaaaggtaggagagcagacaaggcttcagcctgcgactgagaacagggaggcggcacgccttggggaacgagggcccgaggccatacgcgctaatacaggccagtgtcggcgtaaactttctccgttaccggcccggccgctctagaactagtggatcccccgggctgcaggaattcgatatcaagcttatcgataccgaangacctcnagaggggggcccggaacccaacttnagnnccctttaatgagggtaaatngcncnctngncntnatgtttggtcttatctgtanttctgttntntaatttgttnagnantnngntantttncnttnttttnttagttcttgntnntttnntntttntanantttntanttnantntanncttttttantatntannttnanttnttntttgtgtgtatgtnttngttnttantnnnngntttttntttttantttnntnattnntntnntttatnttatnanntcttttnnantttnggaannngcgagtgnnaaatntnannnntnatannnnaan

SEQ ID NO: 8821 - DNA, 899 bp, Homo sapiens
  misc_feature 4, 6, 667, 679, 681, 702, 711, 755, 764, 778, 780, 798, 819,856, 864, 869, 893: n = A,T,C or G
tcgngncgcgtatcgactcactatagggcgaattggagctccaccgcggtggcggcccgaggtacatctttccaaactgggacatcaaggaattgctacacagaagaaccacatccaggatagaaaggaccagccagagctcgttcagtagtgtatttcagaatcatcagggaggagccggtagcagaattatcccgttaacactgagaccacatttcacctgttacttatttttctaaatggagtaggagagaaagatgctaaaatgtgatcttgggaggagtcccccagtcccccgaaaaagaagaagaaaaaaaaaagcagagctccaaacccctgtggtcatggcaatttcccatcaaaactgcccatgtaaaataaacacaagctgctaaaagtgaatgttaagaaggaaggcactggttagtgggtggtcctgaccaatcccctggagctggagaggggttttcccacggcctttggtttaatgtgtctgtaaactcaacaaacctccgtttccctgaggtaatctgcaaaaacatcagttttcagtccccagagaccatttccaattaaacctcaccccccaaatcattcaatgtaacatttgccttatttttagaagaaacaaatgttcccatattattcccagtttttgagaagaatnctgaggcagctntntcgggttgctcttgaagttgnaattcttgnaaaaatcttatgtaaacagaaagcttaggccaggttaaggagtnaaaatgcantcaaaagctgtttntnaataaccaggtgattacngggttagctcttgccctattnaaagacaatctggttccattcctttttttgaccaganttttaaanacaantgggcaacaaaaacaagccttggncaacaa

SEQ ID NO: 8822 - DNA, 637 bp, Homo sapiens
  misc_feature 26, 28, 49: n = A,T,C or G
tacgactcactatagggcgaattggnanctccaccgcggtggcggccgngtaccatagccaaatctgggacaagcgagtttttaaacaaaatgactgaagcacagggaagatggccagtcaacttctgaattgattggccagtttggtgtcggtttctattccgccttccttgtagcagataaggttattgtcacttcaaaacacaacaacgatacccagcacatctgggagtctgactccaatgaattttctgtaattgctgacccaagaggaaacactctaggacggggaacgacaattacgtgagtatgaccaattccttataagaattaatagtcatggtgaggatcttgactctccagttctattctctgagcaaatgacttattctgggccttaattttcctgccttataaaatgaggaaacagaactgttgtcacttgaagaaatgtttgaggacctgcaaagggccaggcacaaaggtttgtgattgctgttgtacctgcccgggcggccgctctagaactagtggatcccccgggctgcaggaattcgatatcaagcttatcgataccgtcgacctcgagggggggcccggtacccagcttttgttccctttagtgagggttaattgc

SEQ ID NO: 8823 - DNA, 685 bp, Homo sapiens
  misc_feature 606, 629, 671: n = A,T,C or G
tcactatagggcgaattggagctccaccgcggtggcggccgaggtacttttttttttttaacagttaagaatgtgtgacgttatttatgaccagaaagttcagattgagtctaaaaatcacagtagaggctaacccgtattattattatttaaacacaattaaacatttaaagatgagttctgggggagtaattactcagatgttaacactagtgcccatcaaagaaggatttttaaaagatacattttcacatttcatttattgtaaaatcttgattgtgctactctattaataccatgaataatcttaagtagcaggtaagcaaataaaatacataattgtattttggcttattctgtgtaagtttacaaatctgtttaccttattcaacaacaaaatatttattgatcaacacactctgtgccagttactgttttagacactggaaatgtaacagtaagcaacacacatacaaatccctgtccttggttattctctttaggttactgttaaaatatctgtggtcctttgcttgggtgcagatgtgattggttgatgcagggggaagccataggctatgctgggtgtgagaggaagctaacacngggttaaaatgggaacatattgngaacatggatttagcaagagcgggctgggtttacaagcaganagaaaggggagaac

SEQ ID NO: 8824 - DNA, 448 bp, Homo sapiens
  misc_feature 2, 3, 4, 5: n = A,T,C or G
gnnnnagggccctatacactactatagggcgaattggagctccaccgcggtggcggccgggggcagctggaggtgcctcagaaggtgcattctgcttcctgcaggggcttgaaacaccaaggcactccagggatcctggagtcaaagcagcagccccggttgttgcactccttgggggtgacatgggggtagccgcagtccaccctgtccttggctggcacggcacactggtttgcagacaggcccacgtacctcggccgctctagaactagtggatcccccgggctgcaggaattcgatatcaagcttatcgataccgtcgacctcgagggggggcccggtacccagcttttgttccctttagtgagggttaattgcgcgcttggcgtaatcatggtcatagctgtttcctgtgtgaaattgttatccgctcacaattccacacaac

SEQ ID NO: 8825 - DNA, 661 bp, Homo sapiens
  misc_feature 621, 625, 628, 637: n = A,T,C or G
cgcgtaatacgactcactatagggcgaattggagctccaccgcggtggcggccgaggtacagaagatgattgacctggagacaccatccaccccgatttcttctcacaacttgatcaaaaatggcctctaagcctaagtccatggcatccccacaatggatgttaaggttctcaaagggaacagctcggatctggtgttgaagaatgtcagttaatgtttccaagtccaatttgttcctagacttcttatagccaattctttcaagatatgcttcaatgtccatgatcccctttcttagtaagttgaaagtaggttgatcttcagttttaatccagaagacagattgctgcttcttcctggcttgaattcaggttatttcagccggcaaccaggaactagactgaatgcaatcctcccacatccaaggtcccccgcgtacctgcccgggcggccgctctagaactagtggatcccccgggctgcaggaattcgatatcaagcttatcgataccgtcgacctcgagggggggcccggtaccccagcttttgttccctttagtgagggttaattgcgcgcttgggcgtaatcatggtcatagctgtttcctgtgtgaaattgntatnccnttacaattncccacaacataccaagcccggagc

SEQ ID NO: 8826 - DNA, 681 bp, Homo sapiens
  misc_feature 57, 549, 561, 639, 657: n = A,T,C or G
tatagggcgaattggagctccaccgcggtggcgctttgcacacacgtcatcaacagnacagcagtcaacaagctgcctagggcctctgcagagccagatcaaccccacagcctgtgagccaggccttaagctgcctatttgtgctgaagcgggctgcagaacgacccgtgttatccaccctgagcaccaccaacactaagcacaaatgacaacaccatctcacctgaaccctgtccaactcacagctgcctcactggcctttgccactgccctctctgatggagcaagggtctggccttccaagcaaatgtcagcctcagattcaaaagacacataggaaggagcaacacccaacacactgaaaactcctgcccgatccacaaagaccccagtgcaagcgatgggcagcatcagattgatggaaaccacaccctttcatttagaatttttatgcacacgagtaaccttagtttccaagttcacatgacaacaagcaaaagtgacatacagtgcagccaaacagttcacttataacttagctttttttgntggtttttttgntttttggttttttccaaagaatagttccttaaaatggatgctcctgggatgtgaataaagaaaatacgtctgaaaggngaggatttcaaacagtanatttcttcatccttcaaatttctg

SEQ ID NO: 8827 - DNA, 639 bp, Homo sapiens
  misc_feature 16, 251, 401, 404, 416, 425, 426, 428, 431, 440, 441, 442,444, 445, 446, 447, 448, 450, 451, 452, 453, 455, 456, 457,458, 459, 460, 461, 462, 463, 464, 465, 466, 467, 468, 469,470, 471, 472, 473, 474, 475, 476, 477, 479, 480, 481: n = A,T,C or G
  misc_feature 482, 483, 484, 485, 486, 487, 488, 489, 490, 491, 492, 493,494, 495, 496, 497, 498, 518, 539, 544, 561, 563, 568, 569,576, 580, 581, 583, 584, 609, 610: n = A,T,C or G
ccagcgtccgcccaancctccttggccccagtatagtgttgggaactctctgccagcttcctgagttctgcctaaagatggccccccagcactggttggggacaagggccaaattggtgaccaccagtcatgcctaggacctggggcccaaaagccgggcaacctctggctacaggggccattgggtgccctcccagttgagaggggccgctgtttcgccttgtccgtcagtgccagtgcctgtgccagangtggcgaggtgagtcctccagagcttcctggccgggccctcctcctgcctgttctggctcctctgctcccacgctagctgtcccttttctgattctggtggatcctccctcccctaattaaagtctctttttgcccctttggggctgccnaanaaaaaaaaaaanaaaaaaaannanaanaaaaaaaannnannnnnannnnannnnnnnnnnnnnnnnnnnnnnnannnnnnnnnnnnnnnnnnnnaagggggggccgttaaactnttttaaaaaaaaacccccccnccccncccccggaacctgaaananaaaannaaggcanttgnngnngtaaacttgtttttggccctttaannggttccaaataaagcaattccctcccaat

SEQ ID NO: 8828 - DNA, 898 bp, Homo sapiens
  misc_feature 184, 527, 610, 623, 633, 647, 650, 658, 662, 703, 706, 707,710, 711, 712, 715, 717, 718, 719, 720, 721, 722, 723, 724,725, 726, 727, 728, 729, 730, 731, 732, 736, 755, 764, 784,818, 838, 839, 849, 861, 870, 888, 889, 898: n = A,T,C or G
ggtatcgactactatagggcgaattggagctccccgcggtggcggccgcccgggcaggtacgcgggggcaacctgcttgggtccctttccacaccgcggaagctttgttcttttgctctttgcaataaatcttgctgctgctcactctttgggtccacactgcctttatgagctgtaacaccgngaaggtccacagcttcactcctgagccagcgagaccacgaaccccaccagaaggaagaatctgtgaacacatccgaacatcagaaggaacaaactctagacatgccgcctttaagaactgcaacactcactgcgagtgtccgcggcttcattcttgaagtcagtgagacgaagaacccaccaattccagacacattttggcgacctagatgggacaatcgcctatcaccgagtggtgagaccatcgcctatagctgagcggcgagacaatcacctatcgccaagcaaatgagcaaacagttgtcttcaccatcccagacaagcagatgaatggtgaaacgatncagcagagaaagagagaaagaggaacatttgaacgccgagaggagttcaaccgaaggtggtccgagaggtttggcccccacangaagaatatcttnccgtgccatncccgctttcagctntgnatttcatncttnagagaaccacttccccacttaataaaccctggattcaaccnttnnaannnaangnnnnnnnnnnnnnnnngggnccgttcccgctgatggttncctgggggnccagaaggatacagccttangtccggggcctgtgctggtctgagggccgaactnatgacggtggcccctttccnncctagctggntaatcctttggntttaggggnggggagagtgcttttttnnaactctttn

SEQ ID NO: 8829 - DNA, 655 bp, Homo sapiens
  misc_feature 568, 596, 642, 655: n = A,T,C or G
cctcactaaagggaacaaaagctgggtaccgggccccccctcgggtcgacggtatcgataagcttgatatcgaattcctgcagcccgggggatccactagttctagagcggccgaggtaccccggaccttctcagttcgctggcacataaggctccgccaataaagcgtggttctctctctctctctctgtcacacacacacacacacacacacacacacacacacacacacacacaatgattggagggctatatgatccagcattagcttcctggtgtgccaagcatgcttgatcgggaatttttttttattattattattttttagctgtagctgaaggcatttctcggatgtggagaggagaatggaaatcgcagaaccaaatcagtttgccctgccatatttggctgtggtctgtcattgggcatttctgatgtgcttttctggattcaggaagagctgattgtcctccgagggttgaaaaaaaaaaaacagtttcagaaacctgaatccagggccttatagttctcctcattatctatcttcttctcccttccctcgcccaanggagtgggggaaacactttttactgcanagttgctttaaagtttttcccatctttgcgtgcattatcccttganattaaaattattn

SEQ ID NO: 8830 - DNA, 641 bp, Homo sapiens
  misc_feature 611: n = A,T,C or G
actactatagggcgaattggagctccaccgcggtggcggccgaggtacaatgacggggaggaagagggttggttaaagcatccctctaagcagttttctgctgtcccttctttccaatcagagatttgtggatgtgagggatcacaccacccccagctatggtagccttgataagagaatccaactcttcatcaccacggattgcaagctgcaagtgacgcggagtgatacgctttactttgagatccttagaagcattacctgccagctccagcacctctgcagtgaggtacctgcccgggcggccgctctagaactagtggatcccccgggctgcaggaattcgatatcaagcttatcgataccgtcgacctcgagggggggcccggtacccagcttttgttccctttagtgagggttaattgcgcgcttggcgtaatcatggtcatagctgtttcctgtgtgaaatttgttatccgctcacaattccacacaacatacgagcccgggagcataaagtgtaaagcctggggtgcctaatgagtgagctaactcacattaatttgcgtttgcgctcacttgcccgctttccagtcgggaaaccctggcgngcccagctgcattaatgaatcgggccaacg

SEQ ID NO: 8831 - DNA, 634 bp, Homo sapiens
  misc_feature 9, 10, 11, 21, 22, 25, 32, 93, 94, 102, 108, 109, 113, 116,117, 118, 119, 125, 126, 130, 131, 132, 133, 135, 137, 138,141, 142, 148, 153, 156, 162, 166, 167, 172, 175, 177, 186,187, 188, 201, 202, 205, 207, 208, 216, 231, 233, 234: n = A,T,C or G
  misc_feature 235, 249, 258, 263, 268, 270, 273, 274, 277, 280, 282, 283,286, 293, 299, 304, 305, 309, 319, 320, 321, 327, 334, 335,338, 341, 348, 349, 368, 371, 375, 376, 381, 383, 384, 397,398, 399, 400, 401, 402, 403, 404, 405, 406, 407, 408: n = A,T,C or G
  misc_feature 409, 410, 411, 412, 413, 414, 415, 416, 417, 418, 419, 420,421, 422, 423, 424, 425, 426, 427, 428, 429, 430, 431, 432,433, 434, 435, 436, 437, 438, 439, 440, 441, 446, 448, 450,451, 452, 455, 456, 457, 458, 459, 460, 461, 462, 463: n = A,T,C or G
  misc_feature 464, 465, 466, 467, 469, 470, 471, 472, 473, 474, 475, 476,477, 479, 480, 481, 482, 483, 484, 485, 486, 487, 488, 489,490, 491, 493, 494, 495, 496, 497, 498, 499, 500, 501, 502,503, 505, 506, 507, 508, 509, 510, 511, 512, 513, 514: n = A,T,C or G
  misc_feature 515, 516, 517, 518, 519, 520, 521, 522, 523, 524, 525, 526,527, 528, 529, 530, 531, 532, 533, 534, 535, 536, 537, 538,539, 540, 541, 542, 543, 544, 545, 546, 547, 548, 549, 550,551, 552, 553, 554, 555, 556, 557, 558, 559, 560, 561: n = A,T,C or G
  misc_feature 562, 563, 564, 565, 566, 567, 568, 569, 570, 571, 572, 573,574, 575, 576, 577, 578, 579, 580, 581, 582, 583, 584, 585,586, 587, 588, 589, 590, 591, 592, 593, 594, 595, 596, 597,598, 599, 600, 601, 602, 603, 604-618, 620-625, 628-629, 634: n = A,T,C or G
ccgcgatannngtacatcacnntgntgtgccnaattggaacctccaccgcggtggcggccgaggtactttttttttttttttttttaaaaaannaatttccnttttcnncccnggnnnnaaggcnngggnnnnantnnaannaaaggnaaccnttncccccnaggnnaaaanaantnccccccccnnnccccccaaaaacnnggntnnaaagggcnccccccccccccccnannnattttttttttttnaaaaaaaanggggnccccncnttnnggnaangnnggntttaaancccccnccttnnaaancccccccccnnncccccnaaaaggnnggnaanaaagggnnaaacccccccccccccccnggnaaannccccngnncccccccccgggnnnnnnnnnnnnnnnnnnnnnnnnnnnnnnnnnnnnnnnnnnnnnggggncncnnnccnnnnnnnnnnnnncnnnnnnnnngnnnnnnnnnnnnncnnnnnnnnnnnannnnnnnnnnnnnnnnnnnnnnnnnnnnnnnnnnnnnnnnnnnnnnnnnnnnnnnnnnnnnnnnnnnnnnnnnnnnnnnnnnnnnnnnnnnnnnnnnnnnnnnnnnnnnnnnnnannnnnnaannaaaan

SEQ ID NO: 8832 - DNA, 731 bp, Homo sapiens
  misc_feature 2, 4, 7, 642, 673, 686, 709, 715, 726, 729: n = A,T,C or G
angngantgtaatacgactcactatagggcgaattgggccctctagatgcatgctcgagcggccgccagtgtgatggatatctgcagaattcgccctttcgagcggccgcccgggcaggtactcagctgtcttaataggatgaagccttaagcagtggaaatttcagttattttccacagtattccattttggaggatttggggtgtttactttttaaattcttgaacaacttaacctccatgaggctttgtgaagtcagctgtgaccaccctcctcttactgtgttctcagtattcattcacttccagggaagaatgacagccacagggagatggtggtgggcaagaatgagagtcccaggatccagatttagcctcagatcttccccattcaggaagggttttccatttaacaagagcactagtatgaaaacattagggacaaatcccccatgtctttgaaattcggattctcctcttgagatccccttcctcacctgccaatcaactttataaggccacaagtggtcactggttttccttccacaggtttgaggttcttagctttccttaagcgacccaacagcttccgctgttttcagagtgaaatatgttaagctttgatgagattctatttttcangtaatttaatgcttttggggacacttggganaaaagcttgtganaagtcaattggctaccccaaagnacaacnaaaacttgatnctnaa

SEQ ID NO: 8833 - DNA, 658 bp, Homo sapiens
  misc_feature 4, 13, 16, 17, 18, 53, 107, 130, 131, 142, 147, 151, 157,160, 161, 166, 168, 169, 172, 178, 181, 186, 187, 189, 196,199, 201, 202, 206, 207, 209, 212, 216, 219, 221, 222, 225,226, 229, 232, 234, 235, 236, 238, 247, 253, 254, 255: n = A,T,C or G
  misc_feature 257, 262, 263, 264, 266, 267, 268, 274, 277, 280, 282, 283,286, 288, 290, 291, 292, 296, 297, 298, 300, 301, 307, 312,315, 318, 323, 326, 331, 334, 341, 342, 343, 349, 351, 356,363, 368, 369, 371, 376, 379, 386, 387, 389, 392, 393: n = A,T,C or G
  misc_feature 401, 404, 409, 410, 412, 413, 415, 416, 417, 422, 423, 424,428, 430, 431, 433, 435, 438, 448, 449, 450, 457, 458, 464,467, 473, 484, 489, 495, 500, 501, 507, 508, 517, 518, 519,520, 525, 531, 533, 534, 535, 538, 539, 541, 543, 545: n = A,T,C or G
  misc_feature 546, 547, 550, 551, 555, 558, 559, 560, 561, 563, 564, 566,569, 570, 574, 575, 576, 578, 581, 588, 597, 598, 599, 606,607, 609, 610, 611, 613, 614, 617, 619, 623, 624, 626, 629,632, 635, 636, 637, 638, 639, 640, 644, 646, 647, 652: n = A,T,C or G
  misc_feature 653, 656, 658: n = A,T,C or G
gtgncactatagnaannnctatgacgtcgcatgcacgcgtacgtaagcttggnatcctctaaagcggccgcccttttttttttttttttttttttttttattttttnaccagaggtaatgcaagcatggnnacctggatctnacaanacgnggggcnggnnaactncnnacngggaangcntttgnntncaggtanacngnnaganncnggnaatnatnannacnntanatnannngncaaaaaaanaaaatnnncntttgnnntnnntatatnaanagnanntcngntnnncatnnnannaaaaanagagnatntangaaanaanacgcnaanaaaaaannnaaaaangnaaagnaaaatanacttnntnttaantcntaaatannantanntcttaatnatnataannannannnatggnnngtangnngnanatnaagaggatannntttttannaggaantanaaatanactatataaanaatantggtgnttaanncaaagnntatagatannnnatatnccattntnnnatnnangngnnntanntatncannnntnnanatnnatannnanaanataatanaatgaactnnnaaacaannannnannatnanttanntnatnaanttnnnnnnaaancnnatcanntanan

SEQ ID NO: 8834 - DNA, 452 bp, Homo sapiens
  misc_feature 2, 3, 12, 14, 65: n = A,T,C or G
gnngcgccgcgnancactactatagggcgaattggagctccccgcggtggcggccgaggtaccangatggaaaatgtttttggtgatctggctgctgcttaaagccagttttccctaagaactccaaaggctaaagtctactaggggcagagtgtgaggatagatttctaatcagagaaaagtggcctccaggagctttcatttatgtcttctccagaccaggttttcctgttatcttcctttaatcccctttcaaccaacaggtgaagttcttccagcccacagaggtagtaatatcatcttttctatctcctcctctcctttggccatgtaatgaagcaaaatattatttatttagcccaggcttgagagccactgtttgtggacagtcttcatctagattccataccctggcctaggcgaggtaaggctctctggttattgccaggatg

SEQ ID NO: 8835 - DNA, 449 bp, Homo sapiens
  misc_feature 2, 16, 18, 19, 24, 188, 442: n = A,T,C or G
gncgctatcactactntnnggctnattggagctccccgcggtggcggccgcccgggcaggtacgcggggacccgagatctaatctctgtgctctgtgtattggcgacgagcagggtgagaataagtgcgtgcccaacagcaatgagagatactacggctacactggggctttccggtgcctggctganaatgctggagacgttacatttgtgaaagatgtcactgtcttgcagaacactgatggaaataacaatgacgcatgggctaaggatttgaagctggcagactttgcgctgctgtgcctcgatggcaaacggaagcctgtgactgaggctagaagctgccatcttgccatggccccgaatcatgccgtggtgtctcggatggataaggtggaacgcctgaaacaggtgttgctccaccaacaggctaaatttggganaaatgga

SEQ ID NO: 8836 - DNA, 501 bp, Homo sapiens
  misc_feature 2, 6, 20: n = A,T,C or G
gnatcngtcctctaatacgnctactatagggcgaattggagctccaccgcggtggcggccgcccgggcaggtacacgtaaagcttggctaagcagacgcatcaggagcaaaccatttgtgttcaccaatctgtctcggcaagtcccagggccactatcttgctagaagccactgtgtgcttttgaaagcatgaaattagttttatactgagcacatggtttctcgtttagcagctctttttatggtaatggtcaatttatggttcactgccaggatttcggtgtacctcggccgctctagaactagtggatcccccgggctgcaggaattcgatatcaagcttatcgataccgtcgacctcgagggggggcccggtacccagcttttgttccctttagtgagggttaattgcgcgcttggccgtaatcatggtcataagctgtttcctgtgtgaaattgttatcccgctcacaattccaccaccaacataccgagcccggg

SEQ ID NO: 8837 - DNA, 644 bp, Homo sapiens
  misc_feature 29, 334, 343, 347, 375, 410, 418, 479, 533, 550, 553, 563,574, 587, 593, 606, 609, 610, 611, 614, 616, 617, 618, 619,620, 622, 624, 625, 627, 630, 636, 638, 639, 640: n = A,T,C or G
gccagcgcgcattaaccctcactaagggnaacaaagctgggtaccgggccccccctcgaggtcgacggtatcgataagcttgatatcgaattcctgcagcccgggggatccactagttctagagcggccgggggatgcgaggctcggagcacccttgcccggctgtgattgctgccaggcactgttcatctcagcttttctgtccctttgctcccggcaagcgcttctgctgaaagttcatatctggagcctgatgtcttaacgaataaaggtcccatgctccacccaaaaaaaaaaaaaaaaaaagtacctgcccgggacctgcccgggcggncgccaacgngggnggagctccaatttcgccctatagtgagncggattaacgcccgcctcactggcccgcggtttanaaacgtcngggactggggaaaacctgggggttcccaactttaatcgctttggagcacattccccctttngccagctgggcggaaaaaccaaaaaggcccgcacccgatcgcccttccaaaaanttgcgcaaccctgaatnggnaaatgggacncgcccctgtancggcgcattaaancgcggnggtgggggggggntannnccnannnnnancnntnaantttgcnannnccct

SEQ ID NO: 8838 - DNA, 846 bp, Homo sapiens
  misc_feature 504, 517, 606, 657, 662, 678, 693, 701, 705, 711, 713, 722,750, 763, 787, 808, 812, 813, 830, 832, 845: n = A,T,C or G
gctatcactgacgcgcgtaatacgactactatagggcgaattggagctccaccgcggtggcggccgggcagttgaaggccttcagagcaaaactgaggtttctcggtcatgcggttatgtcttcaacacctgcgtcccccaccggaggccagctcccagggcgcgttctagtgtgtggcgttcgcttcatattcccaggcgtcgcttgccccagcacgcctgtgtgctcagtaacaatgtgttaagcacaggattttgggagaagtgtatatggacgtctgaagaagggttgtgcttgtggaagagccccgcgtacctcggccgctctagaactagtggatcccccgggctgcaggaattcgatatcaagcttatcgataccgtcgacctcgagggggggcccggtacccagcttttgttccctttagtgagggttaattgcgcgcttggcgtaatcatggtcatagctgtttcctgtgtgaaattgttatccgctcacaattncacacaacatacnagccgggagcataaagtgtaaagcctggggtgcctaatgaagtgagctaactcacattaattgcgttgcgcttactggccgcttttcantcgggaaacctgtcggccactgcattaatgaatcggccacgcccgggagangcggnttgggtatgggcgctnttccctttctccttncttaatcnttcnctcggncnttcggttgnggggagcgggatcagcttaatcaaaggnggaatacgggttntcccaaaattagggggataccccnggaaaaaaattttaaccaaanggcnncaaaaggccaagaaccntnaaaaaggccggtng

SEQ ID NO: 8839 - DNA, 483 bp, Homo sapiens
  misc_feature 4, 480: n = A,T,C or G
actnctatagggcgaattggagctccccgcggtggcggccgcccgggcaggtacgcggggagatcagtgatagcactagatactcattggagcatgaaccctgttgtgaactgctcatctgagggatctaggttgtgtgcttcatatgagaatctaatgcctgatgatatgtcactgtctcactttgcccccagatgagaccatctagttgcaagaaaaataagctcagagtttccacggattctacattatgatttgatcttcaacaaagctgacactggggaaaggacacactcttcaataaatggtgctgggaaaattggatagccacatccagaaaaatgaaactgggccactatctcactatatacaagaatcaactcaaagtacgattaaaaacttaaacagaagacctgaaactataaaaatacttgaagaaaacctagggaaaaatttcctggccttttgtctaggcaaaanaat

SEQ ID NO: 8840 - DNA, 653 bp, Homo sapiens
  misc_feature 478, 531, 556, 558, 571, 573, 581, 586, 589, 591, 592, 594,595, 604, 610, 611, 612, 617, 618, 620, 622, 623, 625, 628,634, 635, 636, 640, 645, 651, 652, 653: n = A,T,C or G
cgcgtaatacgactcactatagggcgaattggagctccaccgcggtggcggccgcccgggcaggtacaccactgtgcctgctttgaatcctttacgaagagaaaaaaaaattaaagaaagcctttagatttatccaatgtttactactgggattgcttaaagtgaggcccctccaacaccagggggttaattcctgtgattgtgaaaggggctacttccaaggcatcttcatgcaggcagccccttgggagggcacctgagagctggtagagtctgaaattagggatgtgagcctcgtggttactgagtaaggtaaaattgcatccaccattgtttgtgataccttagggaattgcttggacctggtgacaagggctcctgttcaatagtggtgttggggagagagagagcagtgattatagaccgagagagtaggagttgaggtgaggtgaaggaggtgctgggggtgagaatgtcncctttccccctgggttttggatcactaattcaaggctcttctggatgtttctntgggttggggctggagttcaatgangnttatttttagctngnccacccanatacnctnanncnnaatacctanatttannnccctnngncnntntanaactannngatnccccnggctgnnn

SEQ ID NO: 8841 - DNA, 654 bp, Homo sapiens
  misc_feature 631, 650, 653: n = A,T,C or G
tcctttagggcgaattggagctccaccgcggtggcggccgcccgggcaggtacaaacagctgagacagatctgcgaagatcacatcaaagcacagattcatcaattcagagaggattcattggatagcgttctttttttaaagaagattgatagatgctggcaaaaccattgcagacaaatgatcatgatcaggagcatttttttgtttctggatagaacttacgttcttcagaattcaatgctaccctccatttgggacatgggactggagttatttagggctcatattataagtgatcagaaagtgcagaataagacaattgatggcattcttctcttgattgagagggaaaggaatggtgaagcaattgatagaagtttacttcgaagccttttaagcatgctgtctgatttgcaaatttatcaagattcttttgaacaacgatttttggaagaaactaaccggctctatgcagctgaaggccaaaaattaatgcaagaaagagagggtcctgaatatctacatcatgttaacaaacgtctagaagaagaagcagacagacttattacttacttagatcagaccacccagaagtcattaattgctcctgtagaaaaacacttctaggngaacacttaacagcaattnttnc

SEQ ID NO: 8842 - DNA, 457 bp, Homo sapiens
  misc_feature 2, 3, 4, 5, 6, 14: n = A,T,C or G
gnnnnnagggccgncgccgaatacgactactatagggcgaattggagctccccgcggtggcggccgtggtaggtaagcatctgcagctcatctggaatactacagtcttgaggacgtgctttccatacgccctgtgtctggtctacatgcaggcgtgtcttgtgataaatcctgttacgggcatgtgtgtgtgagggcttctatgtggccccccgactccattttattagagtttggcataagtgactccattttggttccagcaactttcacataaggaaactgaggctcagagaagtcaagggacttgcccccaggtcccactaacactgtgcagtggagtgatgcaaaccccagttttcccagtggatggagctgctgtgggtgagtgcagggtgccggtgtgaaccagaggggtggtgcagagaccagtgtgggatgtgagaggatccctggg

SEQ ID NO: 8843 - DNA, 889 bp, Homo sapiens
  misc_feature 2, 7, 10, 15, 16, 25, 28, 423, 436, 452, 453, 454, 456, 457,459, 460, 461, 462, 463, 473, 474, 475, 486, 489, 490, 496,498, 510, 519, 541, 552, 554, 559, 564, 569, 570, 578, 579,589, 605, 611, 613, 614, 619, 620, 624, 625, 627: n = A,T,C or G
  misc_feature 628, 629, 630, 631, 632, 633, 635, 640, 641, 642, 643, 644,645, 646, 647, 650, 652, 653, 655, 656, 657, 658, 660, 662,663, 664, 666, 667, 668, 669, 672, 674, 675, 676, 678, 679,681, 682, 685, 687, 688, 692, 695, 696, 697, 698, 699: n = A,T,C or G
  misc_feature 701, 702, 703, 705, 707, 708, 711, 712, 717, 718, 719, 720,721, 722, 725, 726, 727, 729, 730, 731, 732, 736, 737, 738,739, 740, 741, 743, 744, 745, 746, 747, 748, 749, 750, 752,754, 755, 757, 759, 761, 762, 763, 765, 766, 768, 769: n = A,T,C or G
  misc_feature 770, 776, 777, 785, 786, 788, 789, 790, 793, 795, 797, 800,801, 803, 805, 806, 808, 809, 810, 811, 812, 817, 821, 822,823, 824, 826, 827, 831, 833, 835, 836, 837, 841, 842, 843,844, 845, 846, 847, 849, 850, 852, 853, 855, 856, 857: n = A,T,C or G
  misc_feature 859, 860, 861, 862, 863, 865, 868, 869, 871, 872, 875, 876,877, 879, 882, 884, 885, 886, 888, 889: n = A,T,C or G
gntagtngangcgcnntcatggacntanttgttggctgattggagctccaccgcggtggcggccgaggtacgcgggatggtggttaaaacttacctcattagcagcatccctctacaaggtgcatttaactataagtatactgcctgcctatgtgacgacaatccaaaaaccttctactgggacttttacaccaacagaactgtgcaaattgcagccgtcgttgatgttattcgggaattaggcatctgccctgatgatgctgctgtaatccccatcaaaaacaaccggttttatactattgaaatcctaaaggtagaataatggaagccctgtctgtttgccacacccaggtgatttcctctaaagaaacttggctggaatttctgctgtggtctataaaataaacttcttaacatgcgttnaaaaaaaaaaaanaaaaaaaaaaaaaggnnncnngnnnnnttttaaaaannnggggccccccnggnngggggnantttttttttaantttttttantccccccaccccgggggggggncccgggccccncnttttngcccntttannggggggtnnattccccctnggggaaaaaaaggggnaaaaangnnttttnntggnnannnnnnnantaatnnnnnnnnttntnnannnntntnnntnnnnatntnnntnntnnttngnntaanttnnnnnannntntnntgnnatttnnnnnntannntnnnnattnnnnnnannnnnnnntntnnantnannntnntnnntttttnnattatttnntnnnatntntnttnntnanntnnnnntaatnattnnnnannattntntnnnaaannnnnnnanntnntnnntnnnnntnttnntnnatnnnantgntnnntnn

SEQ ID NO: 8844 - DNA, 658 bp, Homo sapiens
  misc_feature 23, 539, 578, 603, 616, 646: n = A,T,C or G
gactcactatagggcgaattggnagctccaccgcggtggcggccgagtacacacccccatgctacacacactccttcatctccttctcagtgttttcataccccagccgcattacacacaccaggcacatcttctctttcacagagcttatcaggatggtatctccttttggcttaaaccaaccaccttgtgtttataaataacccccccaccccagtgcctgaattcatccacatcttctgccttcataggcagcctccccttggctccagttccagcaggacaggccttcctctgaaaggaagcctggggcagtgaggccacactagtcagcgttcggccctccctacaccaatcccagctgggctcctagttgcctagcacctttgcactcaagaaagttatattgtttttctctctcttcctcatttcttgccagtattctgccttttcataacatttatgccaacaagatatctggtcacccgcgtacctgcccgggcggccgctctagaactagtggatcccccgggctgcangaattcgatatcaagcttatcgataccgtcgacctcganggggggcccggtacccagcttttgntccctttagtganggttaattgcgcgcttggcgtaatcatggncatagctgtttc

SEQ ID NO: 8845 - DNA, 680 bp, Homo sapiens
  misc_feature 564, 640: n = A,T,C or G
tcactatagggcgaattggagctccaccgcggtggcggccgcccgggcaggtacgcgggcaactattgcaatgaaaaatttcaacaattttttaatgaaaggattctgaaggaggaacaagaactttatcaaaaagaaggtttaggtgttaatgaagtgcattatgtggataatcaggactgtatagatttaattgaagccaaattagtgggaatactggatattttggatgaagaaaatcgccttccccagccaagtgatcaacactttacatctgcagttcaccaaaagcacaaggatcattttcgactcactattcccagaaaatctaagctggcagttcataggaatatcagagacgacgaaggcttcattatcaggcattttgcgggggcagtgtgctatgaaacaacccagtttgtggagaaaaataatgatgctttacatatgtctcttgaatccttaatatgtgaatccagagataagtttatacgggaattatttgaatcatccacaaataacaaaaaaaaaaaaaaaaaaaaaaaagtacctcggccgctctanaactagtggatcccccgggctgcaggaattcgatatcaagcttatcgataccgtcgacctcgagggggggcccggnacccagcttttgttccctttagtgaggggtaattgcgcgc

SEQ ID NO: 8846 - DNA, 625 bp, Homo sapiens
  misc_feature 16, 18, 21, 46, 122, 140, 175, 178, 180, 181, 203, 207, 219,228, 243, 245, 246, 282, 300, 304, 305, 306, 314, 318, 322,324, 330, 336, 342, 344, 350, 360, 361, 362, 367, 372, 373,377, 380, 383, 384, 386, 390, 394, 395, 396, 399: n = A,T,C or G
  misc_feature 400, 403, 404, 407, 410, 419, 425, 430, 431, 434, 437, 438,441, 442, 443, 448, 449, 452, 453, 454, 455, 456, 461, 462,463, 464, 465, 466, 467, 470, 471, 472, 473, 474, 475, 477,478, 479, 480, 484, 485, 486, 487, 488, 490, 491, 492: n = A,T,C or G
  misc_feature 495, 496, 497, 498, 500, 501, 502, 503, 504, 505, 506, 507,508, 509, 510, 511, 512, 513, 514, 515, 516, 517, 518, 519,520, 521, 522, 523, 524, 527, 528, 529, 530, 531, 532, 533,534, 535, 536, 537, 538, 539, 540, 541, 542, 543, 544: n = A,T,C or G
  misc_feature 545, 546, 547, 548, 549, 550, 551, 552, 553, 554, 555, 556,557, 558, 559, 560, 561, 562, 563, 564, 565, 567, 568, 569,570, 571, 572, 573, 574, 575, 576, 577, 579, 580, 581, 582,583, 584, 585, 586, 587, 588, 589, 590, 591, 592, 593: n = A,T,C or G
  misc_feature 594, 596, 597, 599, 600, 601, 603, 604, 605, 606, 609, 610,611, 612, 614, 615, 616, 617, 618, 619, 620, 621, 622, 623,624, 625: n = A,T,C or G
gttctcttccccattntncgnagcagctgcatcacctcgtcacagnaaggtatgatgttggattgcagggcacggcacaagtctcccactaagcccacagccgccaaacaaacctgccaagnaatcaaggaaataatctnctaacagaaaaggctgcctgctggggcaagatatnatntnnaactagctgctgagcttttatnactngaacctagagtnaaatccctntgccgagattaattntnnaacaaccaacatggcaggcagggaacaaagactatncgagagagatcactgatnaagnnnaaaaaaanaaanaaananagcctngctctncagggngnttaatnagctcaactnnnatagnctgtnnctgnatnagnncntggnccgnnncgnncgnnctnagnactaagtgnaatccnccggnntgnagnnatnnnatatnnagnnnnnatttnnnnnnncgnnnnnncnnnnaggnnnnngnnnggnnnncnnnnnnnnnnnnnnnnnnnnnnnnnagnnnnnnnnnnnnnnnnnnnnnnnnnnnnnnnnnnnnnnngnnnnnnnnnnngnnnnnnnnnnnnnnnngnntnnntnnnnttnnnntnnnnnnnnnnnn

SEQ ID NO: 8847 - DNA, 478 bp, Homo sapiens
  misc_feature 2, 7, 11, 23, 100, 103, 104, 105: n = A,T,C or G
gngtctnttanagtttcttgttnacccccgccccgcggacgcgtgggcggacgcgtggggtggcgttcaagatgtcgaccaagaatttccgagtcagtgnttnnnactggatttgccctgacaaaaaatgtggaaatgtaaactttgctagaagaaccagctgtaatcgatgtggtcgggagaaaacaactgaggccaagatgatgaaagctgggggcactgaaataggaaagacacttgcagaaaagagccgaggcctatttagtgctaatgactggcaatgtaaaacttgcagcaatgtgaattgggccagaagatcagagtgtaatatgtgtaatactccaaagtatgctaaattagaagaaagaacaggatatggtggtggttttaatgaaagagaaaatgttgaatatatagaaagagaagaatctgatggtgaatatgatgagtttggacgtaaaaagaaaaaatacagagg

SEQ ID NO: 8848 - DNA, 658 bp, Homo sapiens
  misc_feature 505, 542: n = A,T,C or G
tatagggcgaattggagctccaccgcggtggcggccgagtacggaggagttcctggaagccttcatggatctgagcctccggaatctccgtgaggttgaaattcaggccctccaggatttcatcgtgagtgtcagccttggtccccagggagagcattgcaaaggctgtagcgatgctcactggggagaagaagatattggtgctgttggactggtgtgccagctggcggtataggctgaaggcgaactcagccaggttgggggtgatcttgttgaaggttgggtgatcctgatcatggtgggatgtatctgtcttctgggcagcatctccctggggatcctcagccagggagacagggaccaggcagcacaggcctgccagcaggaggatgccccacgagacagaagacggcattgtcgattcactgtcccaggtcagtggtggtgcctgaagctgaggagacagggccctgtcctcgtccgtatttaagcagtggatccagangggcaacgggggaggctgctggtgaatattaaccaangtcaccccagttatcggaggagcaaacaggggctaagtccactggctgggatctgagtcgcccgcctacgttgcccggacgctttgcctgggcagcgtacctgcccgggcggccgt

SEQ ID NO: 8849 - DNA, 616 bp, Homo sapiens
  misc_feature 15, 16, 28, 34, 35, 36, 37, 47, 589, 604, 615: n = A,T,C or G
tttttttggctgggnnaccgggtctttncctcgnnnntacttctcgnattaattaacgcgggtgggaggctgaggcgggtggatcgcctgaggtcaggagttcgagacaagtctgaccaacatggtgaaaccctgtctctgctaaaaatacacaaaaaattagtcaggcctgggagcaggcgcctgtagtcccaacaacttgggaggctgagacaggagaatagcttgaacctgggagacggaggttgcagtgagcttagattgtgccactgcactccagcctgggcaatagagtgaggctctgtctcaaaaaaagaaaaaaagaaagaaaattaaagataattctatgttaactccttaaatgtaattcctagttcttctatcacctttagccgactcttctaccttcagagtggacactgctgttatcaagcagagagtgccgatcttactcaagtacctagactcagatacagagaaggaactgcaagcactttatgcactacaagcatcgatagtaaaacttgatcaaccggccagtaagtttatctcatgttacagttaatctaaccaatgagtgagatttatncaagccaggacttanagatgatttang

SEQ ID NO: 8850 - DNA, 660 bp, Homo sapiens
  misc_feature 84, 102: n = A,T,C or G
tatagggcgaattggagctccaccgcggtggcggccgggtacgcgggcgcgaaggtccacagcttcactcctgagccagcgagnaccacgaaccccaccagnaaggaagaatctgtgaacacacccgaacatcagaaggaacaaactctagacatgccgcctttaagaactgcaacactcactgcgagtgtccgcggcttcattcttgaagtcagtgagacgaagaacccaccaactccagacacattttggcgacctagatgggacaatcgcctatcaccgagtggtgagaccatcgcctatagctgagcggcgaggcaatcacctatcgccaagcagctccagaagcagatgagcagatgaggagacgcctctattccgtgtcgtttagaatgagcaaacagttgtcttcaccatcccagacaagcagatgaatggtgaaacgatacagcagagaaagagagaagaggaacatttgaacgccgagaggagttcagccgagggtggtcggagaggtttggccacccagcaggaagattatcttcccgtgccatccccgcttccagctctgcatccatccttcagagaaccgctctagaactagtggatcccccgggctgcaggaattcgatatcaagcttatcgataccgtcgacctca

SEQ ID NO: 8851 - DNA, 679 bp, Homo sapiens
  misc_feature 20: n = A,T,C or G
tcactttagggcgaattggnagctccaccgcggtggcggccgagtaccttggttcagtccagtaaggtgggacaacccttaagtgggggcttcctggttgtagtagataagagacaaaaggttgcattcttttgagttcttgatcagccttccactgaacacacaatttagtctggctcagtgagtctgcatttttacagaagcgataggggaaaggaagcaatcagctatgcaggtgagcctcagggggatgactgtgaatagaatgggaggcagctttgccctaagcagttcccagcttgactttttcctttagcttggtgattgtggagtctcaagatttgttttctttccacaatctgaaattcaaagttccctgggtatcctgtattttcatttgtacactttggcgccctagtcccagagtcctggagcggcatactgggggtggctgtgcagtcccagcatccccaacccagcatgtatagagagcatccatccttacatccagctgacccatgcccatgctcctccctgtggctggaggttcaacaataacataagtctcttctttgccctccagatatttctccctcgagtgactgggaaacttggcaagagaccagaggacccaaatgcagacccttcaagtgaggccaaggcaatggctgtgcccctc

SEQ ID NO: 8852 - DNA, 683 bp, Homo sapiens
  misc_feature 612, 677: n = A,T,C or G
tatagggcgaattggagctccaccgcggtggcggccgagtactggctttggtgccttgtctaccaggcagttgagttggttactgctggtgcctttgtgggcaaaactaggttgtaaaagcagccaaaaaatttccagatgggagagtttcatagcgggcatattttggcttgtgaattgactgttatgtctcaaggtagtctcttggtgggagagagttctgctctgtagcgtctaactaagagcacatagttagatgaacttgccctgttgggagtgtctggtgaaggggagataaaagattataattgcatttctaaagagctaagtaggaagcagagaaaaggagagagaagtgaagacagaataattttaaataatgaagagagaaatgaagaaggaataattttcctgcttttccattggttctttggacataacaggcaaaagtgtcaatcagggtgagactgttccttcaagggcagagatcagacaagtgtcctgaaactctgcctccattgtgggggcaaccatttggccatgttccccactgtcagtgagatgaatagctctgctgctgcctgcaaaagcctctgaaacctgtcaggaaangacattaattaaggtcccataatgctaggatgaagctcttttcctatttgctactttgaattatngcctga

SEQ ID NO: 8853 - DNA, 394 bp, Homo sapiens
cgcgtaatacgactcactatagggcgaattggagctccaccgcggtggcggccgcccgggcaggtacttcaggaccatgcttaggggccattttaaacagcaaaatcatcaacagggattatgaaaatgcaaaaatcataacacgaagtagatagcaagagggacacttgtttatagtctgagggctgcaaggagaagtgagccttgctcagcctcagctgggaacatatacgtcatataactcaaatttttttgccattccacacgtctgcaaaggactgagaaagcaccgtgagtgttgactcgaaggttacaaataaacgtcagtaagtcagcgaatttgcaaatacagaatccatgaataatgagggccgactgtacctcggccgctcta

SEQ ID NO: 8854 - DNA, 667 bp, Homo sapiens
tatagggcgaattggagctccaccgcggtggcggccgcccgggcaggtacaccacacaatggtgacacagcctaatgtgtggtcagtgtgtgccacgttttctgcactatacccaggtttgatggcttgatgttaacttctgaaaatgtagctacagtgttcttcattataaacagaaacagaaaagaattactcctaataattcctgtatcaaactgtaactttatgaatataaatttagaaatgaacagatggcaagcatgaatattttcccgaagcgttctagtgcaaaatgcattagcactactgacattttcttcctatgccctgctcccagattaaaaacttaacacttacatgctcaccactagcagaaagggatttccagggaccagaatctcagagaaaaggagggttcattcaaacataactggtgctgaatccttgcagctgaaaattatcttgcaagtatatatgctggcccttcatttaaaatgaacttgcagtttattaaaagcgatcaaagagctctggaatcttattttcaagaaccagaatatggcacacattttaaatttggacagacttctagcggacagttacttctcaagaattttctatacaaaagctgtgccaggcatatattttctcaccaggacacatgggg

SEQ ID NO: 8855 - DNA, 647 bp, Homo sapiens
  misc_feature 3, 8, 457, 545, 550, 595, 622, 635, 639: n = A,T,C or G
ttngggcnaattgggcccctctagatgcatgctcgagcggccgccagtgtgatggatatctgcagaattcgcccttagcgtggtcgcggccgaggtacaagccttgaacatcgtcctgcttcccagtgggttcagacctcacctctcagggagcgacctgggcaaagacagagaagctcccagaaggagagattgatccatgtctgtttgtaggacggagaaaccgcttgggtaacttgttcaagatatgatgcatgttgctttctaagaaagccctgtattttgtgattgcctttttttttttttaagatgctttaattttgccaaaataaaacagataatgtggatggtttaagggttatagtattatagtttaaataataacaacaaaattcttcccaggaactctgctggaaggtaaattaaaatacttgtttttccattggtaaaatattgntgcactctgtgaaccaaaagacagtctaagttggaggacatagaacggaactcatcttaaacatactccccacccccgtcttggcctnctcanaccactttggccatccctgcattttgggggccgttttggtaatgngaatgcactggggtacctgcccgggcnggccgttcgaaanggcnaatttcca

SEQ ID NO: 8856 - DNA, 664 bp, Homo sapiens
  misc_feature 20, 43, 66, 85, 488, 489, 490, 491, 492, 493, 494, 495, 496,497, 498, 499, 500, 501, 502, 503, 504, 505, 506, 507, 508,509, 510, 511, 512, 513, 514, 515, 516, 517, 518, 519, 520,521, 522, 523, 524, 525, 526, 527, 528, 529, 530: n = A,T,C or G
  misc_feature 531, 532, 533, 534, 535, 536, 537, 538, 539, 540, 541, 542,543, 544, 545, 546, 547, 548, 549, 550, 551, 552, 553, 554,555, 556, 557, 558, 559, 560, 561, 562, 563, 564, 565, 566,567, 568, 569, 570, 571, 572, 573, 574, 575, 576, 577: n = A,T,C or G
  misc_feature 578, 579, 580, 581, 582, 583, 584, 585, 586, 587, 588, 589,590, 591, 592, 593, 594, 595, 596, 597, 598, 599, 600, 601,602, 603, 604, 605, 606, 607, 608, 609, 610, 611, 612, 613,614, 615, 616, 617, 618, 619, 620, 621, 622, 623, 624: n = A,T,C or G
  misc_feature 625, 626, 627, 628, 629, 630, 631, 632, 633, 634, 635, 636,637, 638, 639, 640, 641, 642, 643, 644, 645, 646, 647, 648,649, 650, 651, 652, 653, 654, 655, 656, 657, 658, 659, 660,661, 662, 663, 664: n = A,T,C or G
tcactatagggcgaattggnagctccaccgcggtggcggccgngtacgcggggtctgatgccaagnaaagaattcaggacacagnacacacatgaggagtgggtttaggagtggaaagtttaatagataaagaagagagtgagaaaacttcctcatgttgagaaagacagttgctcaagagagggttttctgggtttggggcaagatttgattgatttcatacagaggcttgaggaggcggtgattgatatacatagggcccggggattggtttaaccaggtatactacttacatagccggtgaaaagactggccctcccaccctaaccttttattatgcaaatgcatcttctacctggctgtcaccatgacatttgcacacgtggcttcacttcaccagtgccatgtcacccacacacctggtgacaaggaaaagggagcaggaatcaccatattgaatgtgcctggcttccaggtccttgcccggnnnnnnnnnnnnnnnnnnnnnnnnnnnnnnnnnnnnnnnnnnnnnnnnnnnnnnnnnnnnnnnnnnnnnnnnnnnnnnnnnnnnnnnnnnnnnnnnnnnnnnnnnnnnnnnnnnnnnnnnnnnnnnnnnnnnnnnnnnnnnnnnnnnnnnnnnnnnnnnnnnnnnnnnnnnnnnnnn

SEQ ID NO: 8857 - DNA, 447 bp, Homo sapiens
  misc_feature 6, 439, 447: n = A,T,C or G
ctaacnctacttagggcgaattggagctcaccgcggtggcggccgaggtacggacagtgagctcaccctaggcctggacccaggcccagtttccaaagcaagcagcacacagcgcatgttcacataagcatgggggctggggggacactggggcttactgatctttttctaggggcctccagcccctggcaccacctagaggggaaagtgagtcacccaaaccattgcccctgggcttacgtcgctgtaagctcacactggccctgctgtgccctctttagtcacagacagcgtgtgagctgactctgtccctttaatgcccaggctgagcccagtgcctccttgagtatctgctccatcactggcgacgccacaggtaggtgtgaatggagtagccaggtgagattgtctccaggaagcccacagcagggatccttgnatggtaan

SEQ ID NO: 8858 - DNA, 653 bp, Homo sapiens
  misc_feature 20, 70, 82: n = A,T,C or G
tcactatagggcgaattggnagctccaccgcggtggcggccgcccgggcaggtacaggtttgggcccagnagcctgacaggnaagggcagtaggagaggtggtcgtagatgatgggccagagggcgcagggcctagcaggccatggaaaggactctaggttttacgctaggtaaaatgaggaggcactgcagggctttgagcagcagagtaacacagtctaacttactttttttttttaatggatcctaccagctgctaagttaagaataatttccagtgagggcttttgtagtaaattagagatgatgctggtttgtcaatctccccttccagcagaggaatgtgtgggtaagagagtcacaatgtttctgaacaaagccatagctcctaagtggtgaagctgggcctagagcccctgtttcctgacagctggcctggcggtgggctctgtacctcggccgctctagaactagtggatcccccgggctgcaggaattcgatatcaagcttatcgataccgtcgacctcgagggggggcccggtacccagcttttgttccctttagtgagggttaattgcgcgcttggcgtaatcatggtcatagctgtttcctgtgtgaaattgttatccgctcacaattccacacaacatc

SEQ ID NO: 8859 - DNA, 615 bp, Homo sapiens
  misc_feature 34, 77, 113, 146, 227, 349, 358, 432, 472, 509, 518, 552,573, 592, 608, 614: n = A,T,C or G
ggagctccaccgcggtggcggccgaggtactgcntgttgccgtgtgagccctgtgaaaggggagcatataaggaggntatccacatactgtagaagttatgcccacctcaagnagattgctcagttagatttttgctagagcttgnctgaataaatgtgggcaatttctaaacccctgagttaggactgaccaggatgaagttaatagataaagatttaggtagctntcccaggagaaacagggctattaaagggaaagatgaattcagagatcatgtgaatattaagcagacacccatcttggaaagtatatttttgcaccaaagaggtgtgggatatttagacattnattacccanggactgatgggagaatggtaattggtcccttaaataatataaaggagtgtgaatcttttcttttggagggaagnggtgccatttgcccccattacctggcaggattcggagganagttgtttagaaaagattagcacagagtaggcagctnttaaacccnaaggggaaatttataattttacttgccacctccngagttgcccttggctttgttntgttgatggtgaggtctgntttgggaactggccanagcgtng

SEQ ID NO: 8860 - DNA, 502 bp, Homo sapiens
  misc_feature 89, 90, 94, 96, 99, 104, 108, 117, 124, 125, 126, 131, 139,146, 147, 155, 162, 165, 169, 171, 181, 182, 189, 195, 212,214, 219, 226, 228, 237, 239, 241, 242, 244, 246, 249, 252,256, 259, 290, 293, 307, 308, 320, 321, 328, 337, 341: n = A,T,C or G
  misc_feature 355, 359, 362, 363, 374, 390, 401, 404, 409, 413, 414, 415,417, 420, 428, 443, 452, 454, 459, 477, 480, 481, 486, 487: n = A,T,C or G
taatacgactcactataggggcgaaattggcagctccaccgcggtggcggccgcccgggcaggtacccgggcgtgtgaggtgtcattcnntagncnatnttttntaantatataatnttttttnnngattntttttatnttttttnntattattntaattanttnaaananaatttaaaannttttaantatttnatacttttatatatatntnatttnaaatatnanttttttttntnanntntntanaanttanatnaattatataataaatatgattaatttacttnttnatttttataatatnnttaatttattanntttaatnattttttanaatnaaataattttattntttnttnnttttataatantttttattaatatatnaaaatttaatntanttttnattnnnanatnacaaattnattcacttatttaantattttaantnatttnataattttataatattanaanntaccnntataatatacataaa

SEQ ID NO: 8861 - DNA, 642 bp, Homo sapiens
  misc_feature 602, 637: n = A,T,C or G
gcgtaataccgactcactatagggcgaattggagctccaccgcggtggcggccgcccgggcaggtacagggccctggaaagtgggatggggctcgaaaagctatcctcaccacagatgatcgcatcaggaagcctctgatgacaagagtagttgaaaggagtagttctatgacttcgacaatgacaataggcaagtttatgctagctcttgccttctttgctataattatagcttacttctagttgtcctattgtcactgccctgtttttcattgggaagcttatctacagatgccttcagaatctgacgagattgaccctcagtttcatattgcccagaaatctactttaatgtctctttcgaaagcattaattcactttcctttttcctacaatgaaacctgttttccatttgtattaactcatctcccttccactcatgatccgtcactcttccttgtggtaatccctagactgggagctcaggtacctcggccgctctagaactagtggatcccccgggctgcaggaattcgatatcaagcttatcgataccgtcgacctcgagggggggcccggtacccagcttttgttccctttantgagggttaattgcgcgcttggcgtaatcatggtntagct

SEQ ID NO: 8862 - DNA, 677 bp, Homo sapiens
  misc_feature 20, 91, 112, 200, 228, 234, 236, 239, 241, 244, 245, 249,255, 259, 273, 276, 278, 282, 284, 287, 293, 305, 308, 319,324, 336, 339, 341, 343, 344, 348, 353, 357, 363, 371, 383,391, 400, 402, 409, 414, 417, 419, 425, 430, 432, 437: n = A,T,C or G
  misc_feature 440, 442, 450, 451, 455, 457, 468, 470, 476, 479, 481, 490,492, 494, 496, 502, 510, 518, 536, 541, 557, 559, 584, 600,628, 634, 638, 647, 649, 653, 664, 668, 677: n = A,T,C or G
tcactatagggcgaattggnagctccaccgcggtggcggccgggtactttttttttttttttttttttttttttcataacaaagctcaagngtttattaagaattaaaaatnctgtaaataagccatacagttcatttcacagtaaactaaacaaaacttttttttttttttacttttcgggtttttttttttttttttnaatttttttgggaggggcaagacagccnttaaanancantncanntcanagggangggngatccagcaaacanttncncaancncantttgcnccctccttgccnacngggctgcccanacggnaaaccttttaanggncntnntgtnaaaanaaanggactnggcctgcnttccccaggganaccccctnttccactgnanacagctntcctnacnantttttngaaanancccanggncncccctttnnggangncaaaacctggncnttcctnggngncctccgganananancatggnccggcagnggggacanagggccccgggactctgntgggngtagggcttaacattnanaaccgcctggatgctttgcatagtnacctctgaatcacaanatgcgtcaggaagagaaaccaccccccnccctgngggnggcgccctnangcanggatttctttnaaanaagacccan

SEQ ID NO: 8863 - DNA, 617 bp, Homo sapiens
  misc_feature 8, 10, 17, 29: n = A,T,C or G
tattcagnantctaagnctcatataattnccctatactttctttgtgacctttgctatttctcttggaggcttataactatccatattacctcagggttttaaaatagtgaattgtgccttccaatcctatgttctttctttcaagaaattcctgttacttgggatgggactacatagacttgactggctttctaattttcttagcttttttctccattaaaaaagacctcttattctttttgctttagtctctggatgattccttgacttcattttacaaatttttgattgagtttctcatttatgctatcttatttttaaatctcaagaattatttttgtgttactctgtgaatgggtttttattaatagcattctcatattgcttcctgaacagataatcattttttacccctctaagaatattgataacagttttttaaaaagttttcttctctccaagattgtttcatccaaattgatcttttaaaaaaattgtttgttctttaaaaaaacaacatatgaagggtaaataaaataaaaagttggttttttgaaaggataaacaagattgatagaccactagctagattaacaaagaaaaaagaaagaagatc

SEQ ID NO: 8864 - DNA, 662 bp, Homo sapiens
  misc_feature 22, 82, 616, 633: n = A,T,C or G
cctcactatagggcgaattggnactccaccgcggtggcggccgcccgggcaggtactttccatttgccttcctggttaaagnattggtgcctggccagaaatgcctgtgaaacagctgtggtttaagcttcaactgtaaaagacagacggaatcctgctgcatcacagaagctggaagttctgatgttccactgaaatcacaatggaaagtcttgacttgactggtcacagtaatgaaaggcagtaatagaaataaggatcattcagcagaaggagaaggggttggaaaacgaccaaaacgaaagtgtcttcagtggcatccattgctagcaaagaaacttcttgatttttcagaagaggaagaagaggaagacgaagaggaggatattgataaggttcaacttcttggggccgatggcctagagcaagatgttggtgaaactgaagatgatgaatcaccagagcagcgagcccggagaccaatgaatgcatttcttttattttgcaaacgccatcgctctcttgtacctcggccgctctagaactagtggatcccccgggctgcaggaattcgatatcaagcttatcgataccgtcgacctcgagggggggcccngtacccagcttttgttncctttagtgagggttaattgcgcgcttgg

SEQ ID NO: 8865 - DNA, 867 bp, Homo sapiens
  misc_feature 3, 607, 649, 750, 754, 803, 815, 818: n = A,T,C or G
ggnccgtatacgactcactatagggcgaattggagctccccgcggtggcggccgaggtactacttgctaaaacgaaaacaggtaaaaacaatgaacagacggttcacgttaagaggaatacgaaaagccaataacaatactgacataacaatcttatttgtaatgaaagaaatacaaattttaaaaatgacataccattttttaattacattggcaaaaattaaaccaaaaagaatacctacaattgaccaaggagtattctggcagggggagggaagtcacatacatatagtacctgcttttgccgcttctggtttttgcagacatccactactccccagctgattacaccaacttgaatgaaacgacttctcttgtgaactatcaaggggccgccagaatcacctctgcaagtattggggtcagcatagggactcactcctccagtacctgcccgggcggccgctcgaggtcgcggccgaggtacacccagcagcactctccactgcccacaggcaagggaaagaatattgattgattagctacaaggagaaaacagtagtgactagtggaaaacaccctggagagggccagaggaacctggctntaccacattccctctgttccagcttggtgaaggggccgggangtcattgtcaacctctctccttggtggtgaaacttaaaacaagggttccttggccgactcaagcccaagtcactgttaagggaagaggatcaagaaagaancggnggcctggggggcacccccctgttgggaccccagggccatggggaaccanttgctaaaaggnggncagctgaaataaaaggtacattccgggagtcctgccggcggccgtttaa

SEQ ID NO: 8866 - DNA, 634 bp, Homo sapiens
  misc_feature 5, 6, 7, 8, 9, 10, 11, 12, 13, 14, 15, 22, 35, 36, 37, 38,45, 48, 63, 66, 67, 163, 311, 551: n = A,T,C or G
ttttnnnnnnnnnnnccccccnttcttccggccgnnnnctcctgntantggtgttgagtaacnacnnttttgatgatgaagaacaaccacagctgtctgatgaagagaaaatgcaaaattctgatgatgaaaggccacaggcctcagatgaagaacacaggcnttcagatgatgaagaggaacaggatcataaatcagaatctgcaagaggcagtgatagtgaagatgaagttttacgaatgaaacgcaagaatgcgattgcatctgattcagaagcggatagtgacactgaggtgccaaaagataatagnggaaccatggatttatttggaggtgcagatgatatctcttcagggagtgatggagaagacaaaccacctactccaggacagcctgttgatgaaaatggattgcctcaggatcaacaggaagaggagccaattcctgagaccagaatagaagtagaaatacccaaagtaaacactgatttaggaaacgacttatattttgttaaactgcccaactttctcagtgtagagcccagacctttngatcctcagtattatgaagatgaatttgaagatgaagaaatgctggatgaagaaggtagaaccaggttaaaattaaagggtag

SEQ ID NO: 8867 - DNA, 622 bp, Homo sapiens
  misc_feature 9, 30, 41, 270, 622: n = A,T,C or G
actcactanagggcgaattgggccctctanagcatgctcgncggccgccagtgtgatggatatctgcagaattcgcccttgtagttttttttttttttttttgtgctgaaagtggttactttattggttgggaaagggagaagctgtggtcagcccaagagggaatacagagtcccgaaaaaggggagggcaggtgggctggaaccagatgcagggccaggcagaaactttctctcctcactgctcagcctggtggtggctggagctcanaaattgggagtgacacaggacaccctcccacagccattgcggcagcatttcatctggccaggacactggctgtccacctggcactggtcccgacagaggccgagctggggaaagttaatgttcacctgggggcaggaaccctccttattgctgggtcgactctagagcacgtgaagggcgaattccagcacactggcggccgttactagtggatccgagctcggtaccaagcttggcgtaatcatggtcatagctgtttcctgtgtgaaattgttatccgctcacaattccacacaacatacgagccggaagcataaagtgtaaagcctggggtgcctaatgagtgagctan

SEQ ID NO: 8868 - DNA, 635 bp, Homo sapiens
  misc_feature 2, 3, 9, 12, 24, 30, 31, 35, 85, 91, 99, 100, 106, 107, 111,112, 116, 118, 120, 121, 122, 123, 133, 139, 146, 152, 157,158, 164, 166, 168, 172, 178, 179, 181, 183, 189, 190, 196,197, 198, 199, 200, 201, 206, 207, 210, 220, 223: n = A,T,C or G
  misc_feature 224, 229, 233, 235, 242, 258, 262, 265, 266, 267, 270, 274,278, 281, 282, 287, 293, 294, 296, 297, 299, 303, 305, 317,321, 324, 334, 335, 339, 341, 343, 344, 348, 349, 355, 363,365, 368, 372, 378, 383, 384, 385, 390, 393, 394, 395: n = A,T,C or G
  misc_feature 397, 398, 399, 402, 405, 407, 415, 418, 420, 422, 423, 427,430, 431, 435, 436, 444, 454, 456, 464, 470, 472, 473, 474,475, 478, 484, 485, 495, 500, 503, 507, 514, 515, 516, 521,524, 525, 526, 527, 528, 529, 530, 531, 532, 533, 534: n = A,T,C or G
  misc_feature 535, 536, 537, 538, 539, 540, 541, 542, 543, 544, 545, 546,547, 548, 549, 550, 551, 552, 553, 554, 555, 556, 557, 558,559, 560, 561, 562, 563, 564, 565, 566, 567, 568, 569, 570,571, 572, 573, 574, 575, 576, 577, 578, 579, 580, 581: n = A,T,C or G
  misc_feature 582, 583, 584, 585, 586, 587, 588, 589, 590, 591, 592, 593,594, 595, 596, 597, 598, 599, 600, 601, 602, 603, 604, 605,606, 607, 608, 609, 610, 611, 612, 613, 614, 615, 616, 617,618, 619, 620, 621, 622, 623, 624, 625, 626, 627, 628: n = A,T,C or G
  misc_feature 629, 630, 631, 632, 633, 634, 635: n = A,T,C or G
anncgcgtnctngtactcacttgntggctnntggnactccaccgcggtggcggccgagtactttttttttttttttttttttttnaaaaanggattttnntttttnncccnnggtngnannnnagggggggantttggnttaattnaaaccnccccnnccgggntnancccntttttnntncntaaccnnccaaannnnnnggaannaanggcccccccnatnnccccnggtnanttttttnttttttaaaaaaaaangggnttnnnccntttnaccnggnngggtntaaatnncnnancctngnaacccccccccntggnccnccaaaagggnnggantnanngggnnaacccncccccccngnccntttnaaaatnagggnnnccccnggnnngnnnaanttnantttaaacnttntnanncccnccnncctnngggggggncccggccccnantttttttncctttnannnnggntaaatnnccccctgggnaaaanaangganatttttnnnccccnggnnnnnnnnnnnnnnnnnnnnnnnnnnnnnnnnnnnnnnnnnnnnnnnnnnnnnnnnnnnnnnnnnnnnnnnnnnnnnnnnnnnnnnnnnnnnnnnnnnnnnnnnnnnnnnnn

SEQ ID NO: 8869 - DNA, 537 bp, Homo sapiens
  misc_feature 1, 94, 153, 273, 287, 328, 351, 403, 474, 479, 497, 513,526, 535: n = A,T,C or G
ntcgggtgtcgccccgcgtccgccccccccccttttttttttttttttttttttgagacggagtcttgctctgtcgcccaggctggagtgcagnggcgcgatgtccgctcactgcaagctccacctcccaggttcacgccattctcctgcctnagccttccgagtagctggcaatacaggcacccgccaccacgcccggctaattttttatatttttagtagagacggggtttcaccgtgttagccaggatggtctcgatctcctgaccttgngatccgcccgcctnggcctcccaaagtgctgggattacaggcgttgagccaccgngcccggctggaggagtatcttanaaaggcctggactgggtcctccccaatccctcaagggaaaagcagagactanatcagcatcaccccacttcgtgggtgagagataggggcggtgcaccccaccctttcccctataactatgtnagganaaaagggaagggcggctnaactggaggacaggtncctggcggcccgntagactagnca

SEQ ID NO: 8870 - DNA, 636 bp, Homo sapiens
  misc_feature 413, 447, 451, 533, 573, 581, 582, 602, 608, 610, 613, 619,631, 633: n = A,T,C or G
gtgcgccccgcgtccggtcagcttcttggacaacacagatgatgaacaaccaaaacaaccaattaaaactacaatgttattgaaaattcagcaaaacataggtgtgattgcagcatttacagttgcagtccttgctgcgggtatctcctttcattacttcagtgattagggtgaggcacaaagagtttcttgatcatccagagaacattgacagacaattatgaataataaagatgttaacaatccatctgtatttaaaacactagcagccagatctgctgccatgatgcctatttggtgtgtttctgattaaaatgaaatcacaagctgccttgtttagcctgctttacattgtaggtggcccgcatttcagaaataaccgttatgcatctagatggaagctgcatgtaacnaatcattattatctatttttaaaagcttcaaaangatnggatatgatcatagattttagtcttactaatctgaatcacatattaatcaaggacattaaaaaacttttaacagaggcatgntggctcccccgtttaatcctaatgctttgagagggctganggaagganncatcacctggggcctgggangggagntnganacccanctggatggcatntnggg

SEQ ID NO: 8871 - DNA, 592 bp, Homo sapiens
  misc_feature 4, 6, 8, 28, 29, 32, 36, 87, 163: n = A,T,C or G
tggngntnagctgcttccttgggggacnnctngggnctccccgcggtggcggccgggtacgcgggtatagtcaataggttactaagnatattgcttagcgttaagtttttaacgtaattttaatagcttaagattttaagagaaaatatgaagacttagaagnagtagcatgaggaagggaaaagataaaaggtttctaaaacatgacggaggttgagatgaaagcttcttcatggagtaaaaaatgtatttaaaagaaaattgagagaaaggactacagagccccgaattaataccaatagaagggcaatgcttttagattaaaatgaaggtgacttaaacagcttaaagtttagtttaaaagttgtaggtgattaaaataatttgaaggcgatcttttaaaaagagattaaaccgaaggtgattaaaagaccttgaaatccatgacgcagggagaattgcgtcatttaaagcctagttaacgcatttactaaacgcagacgaaaatggaaagattaattgggagtggtaggatgaaacaatttggagaagatagaagtttgaagtggaaaactggaagacagaagtacct

SEQ ID NO: 8872 - DNA, 1177 bp, Homo sapiens
  misc_feature 2, 5, 11, 40, 289, 468, 473, 507, 590, 611, 658, 692, 747,757, 758, 759, 764, 773, 777, 785, 788, 800, 814, 829, 835,841, 843, 860, 863, 874, 875, 880, 889, 894, 907, 922, 924,926, 930, 939, 946, 950, 954, 962, 966, 970, 972, 973: n = A,T,C or G
  misc_feature 975, 976, 1002, 1006, 1008, 1018, 1040, 1044, 1049, 1055,1057, 1072, 1085, 1089, 1097, 1112, 1115, 1118, 1119, 1120,1131, 1143, 1147, 1148, 1155, 1156, 1157, 1159, 1171, 1177: n = A,T,C or G
gnggnctggcncatattttacccaagctatgcatcaggcntggtaccgagctcggatccactagtaacggccgccagtgtgctctaaagaagagaaacattccatttggccgcatatatagcgcaaatgtttcatggagtagggaaagactgaaacaaaaacaaaaactgtatccaccaccactcccagctcattttccacacagcgatcatagtgatctttaaaaattaatttggtggctgggcgctgtggcgtactcctgtaatcccagcactttggggaagccgangctggtgaatcacttgaagtcaggcattcggcaccagtttgaccaacatggagaaactccgtctctactaaaaatacaaaaattagccaggcgtgatggtggcacacatgttatcctggctactcaggaagctgaagcaggagaattgattgaacccaggaagtggaagttgcagtganctganatagtggcattgcactccacctaggcacaagatnaaactctgtctccaaataaataaaataaaataaaataaaataaattaatatgctgggtgtggtggcttaccttgttatcccancactgtgggaggctgaagccngtggatccttgaagtcaggcattccaaaccacttaaccaacatgganaaacctgtctctactaaaaatacaaaattaactnggtgtggtggcaggcgcctgttatcccaatcttgggaagctgaaacaggaaatcncttgaacccnnnaaggnaaagttgcntganctaaggtnaanccctgccctccnccctgggcaccaanccagaatcctctccnaatttnaattananttaaaaatttaaatttnatnttatcttccannttccngcttaaaancctanttgcttaggtctnggaaacaaaaaaccntncntggncccaggggnccagcanctancccngctgcttntcanccgnanncnnccttattccctttcttttttggcccncctncnttccccttanttcttaaccggcccgtttcccncccnaaacnttgccntntgttcctcccaaaanccctccccccctncccntttatttnccccccccccaattnccnaannncccccccggtngggtttccccanggcnnttccccnnnancccccccccttnctttcn

SEQ ID NO: 8873 - DNA, 657 bp, Homo sapiens
  misc_feature 655, 657: n = A,T,C or G
gagcgcgcgtaataccgactcactatagggcgaattggagctccaccgcggtggcggccgcccgggcaggtacgcgggtattttgaggaattacgaaaggtgctagttaaggtggatgaatatcattcagtgcatcagaagctcagtgctgatatggctgatcattctaatttgatccgaagtttgctggtcggagctgaggatgctcgtctgatgagggacatgaaaacaatgaagagtcgttatatggaactctatgaccttaatagagacttgctaaatggatataaaattcgctgtaacaatcacacagagctgttgggaaacctcaaagcagtaaatcaagcaattcaaagagcaggtcgtctgcgggttggaaaaccaaagaaccaggtgatcactgcttgtcgggatgcaattcgaagcaataacatcaacacactgttcaaaatcatgcgagtggggacagcttcttcctaggtgaggaaaatacaggtcatgaagttcctggcaaagattttctgttaaaaacctatgctggtttgctttggatcacaccctggtgaaccccgggtgctaagaatgaaaataaccttggcgagttgtacctcggcccgctctagaactagtggatcccccgggctgcaggaattcnan

SEQ ID NO: 8874 - DNA, 1004 bp, Homo sapiens
  misc_feature 283, 292, 305, 309, 311, 326, 350, 353, 357, 364, 379, 389,391, 395, 402, 412, 413, 421, 428, 429, 434, 436, 437, 442,453, 459, 462, 463, 464, 472, 475, 482, 486, 489, 493, 495,497, 499, 503, 505, 508, 512, 521, 527, 530, 531, 536: n = A,T,C or G
  misc_feature 537, 539, 541, 542, 543, 546, 547, 553, 556, 560, 563, 568,569, 571, 575, 579, 585, 586, 589, 593, 594, 595, 596, 597,601, 603, 605, 614, 616, 617, 622, 623, 624, 627, 634, 637,642, 643, 648, 651, 653, 658, 661, 667, 669, 673, 674: n = A,T,C or G
  misc_feature 679, 686, 689, 706, 711, 723, 726, 728, 729, 733, 735, 737,742, 749, 753, 757, 759, 760, 761, 762, 764, 765, 766, 767,772, 778, 779, 781, 782, 795, 796, 809, 822, 827, 830, 833,834, 836, 837, 838, 839, 842, 843, 845, 846, 848, 850: n = A,T,C or G
  misc_feature 854, 869, 870, 871, 874, 875, 878, 881, 895, 896, 898, 900,910, 913, 928, 937, 940, 942, 946, 952, 955, 956, 959, 964,969, 970, 975, 980, 983, 984, 985, 987, 1004: n = A,T,C or G
ggcgaattgggccctctagatgcatgctcgagcggccgccagtgtgatggatatctgcagaattcgccctttgagcggccgcccgggcaggtacaagaggaccatcctaccagtggggccacgtctcaacggtttatccttcacccatttttctgcacgtcatcctgaggtaaaccaattttaaatgtgtttgttttcggtaaaccagctatgacaatttatactaaacaaattgaactagaacccatttgaataggttttgaatttgttttttcatttttcnttttttaanacaaaggcctgantggntntcaatccgtcaaagnctgcatgcatgaaaaaacttggtncancccnaacaggngtaattagttaattnagcgaaatgngnaaantttaaangggggtcttnntcattaangggtagnnacctncnngaccnccgaacctctncttaanggnnnaatatttncanacaacancttnttnggtncntnanactnantangtancgccgaagncatggnatnncaatnncntnnngtnnctaatnacntggnggncgatnntnttgngatnaatgtnnatnctgnnnnngtcntngnctataattntnnattannncangaccganaanaaaannatatnggntnatggnggnctaacncntggnncccgntttttangangacgggggaaaaaaacnttttntttgtccccacntgncnnttanangnatacnttggccncacnaccncnnnnannnnggggngatttnntnnattatattggggnncgctcttttcctntttgcttcgttantgacnatnatnntnnnnttnnanncnangatnattaacaatgttgannnttnnggnggngtttttaatatcanntnangatggggggnatnatgacgttgtttccntccacaatnttntnaggntagatnatnntcnagacnaaaannatttntgttnatnnngngctccataaagatgtcn

SEQ ID NO: 8875 - DNA, 412 bp, Homo sapiens
  misc_feature 2: n = A,T,C or G
cnccgtaataccgactcactatagggcgaattggagctccaccgcggtggcggccgcccgggcaggtactttttttttttttttttttttttttagtttttgttttgcagccacaggagttttagccaattcagatgccttgctccccacaatttggaacattcctttggatttgaccaagtcaggaagagatgggagaaaagtgaaacaacaataaaaccccaaacataaacaaaaagagttaagcaaaacaaacaaatgcacaattcatatgattaactgagtgttctaatggtaaggaggaattaaaagcagctggtgggtaatcttaaattttagtcattaaacaaaaattttaagacaaaactctaattcagctacttacctggaaataaggctcagactgggtgat

SEQ ID NO: 8876 - DNA, 626 bp, Homo sapiens
  misc_feature 20, 23, 30, 31, 54, 607, 617, 619: n = A,T,C or G
gcgcattaaccctcactaanggnaacaaannctgggtaccgggccccccctcgngtcgacggtatcgataagcttgatatcgaattcctgcagcccgggggatccactagttctagagcggccgcccgggcaggtacgcgggtctgaaattcattttaccgtcaccactcttacaaaggacagtttattcccaaggacagtgctgacggggagggggacaggcagggagttaggagggttttcgaggatttcagacagggggaacccatccatccctattcccaaggtccacttacaactctaagggtggttacaggattaactaccagttcattttcaaaatgctgctttgaactcagagggttgatacttttaatttgtaattttttgtaaaactttttacaaaatagtaaagtatttcaccagaataccagtttcaatccgtccatggtctgatttttatataatttagtggtgctttagaaactttgtttttgttgtttctgagctaaacagctcaatcctttttcgcctgtatctacctaagaccaatgtgaacctttgtatttttgctcctaatttttggactcagtgaaagtgtacctcngccgccaccngnggtggac

SEQ ID NO: 8877 - DNA, 633 bp, Homo sapiens
  misc_feature 23, 31: n = A,T,C or G
gcaattaacccctcactaagggnaacaaagnctgggtaccgggccccccctcgggtcgacggtatcgataagcttgatatcgaattcctgcagcccgggggatccactagttctagagcggccgaggtacttcctgtaattgacagccttgccttgttcctcatggcatcattcaaggtcatcttaaatgagagaggagggaaagaaagaaaaagaaatcatacgttatggttttcaaatgcatccagaggaaaggcagggttgtttttgaaaagtttacttctatctgaaagcttctagcaaatgaaagcaaacagtgcaaagctgaactacaaataataaagcacaattatggcaggaatctgtccacattcacccaagctactgtgccattaaagaggaaaatagacagttgagctgcaggttagtcaccaactgggaacatggaagaacgtcaacaatacatacaggatgatccattggccaccttccttatttaaaagagcttaaggacgcaacaagaaagctaaacgtgcactaaaaagtttgtattagagcctcgttcctaccccctaaattttaacactttcgatgccatatacgttgtaaccttccttataagttgcaaaattt

SEQ ID NO: 8878 - DNA, 659 bp, Homo sapiens
  misc_feature 636, 652: n = A,T,C or G
tttagggcgaattggagctccaccgcggtggcggccgaggtacattgtaggatgcttaccagatcctgcccactagaggccaatagcacctcatcatcatagcaccccttccctcagtgataataaaaaatgtctccagacattgtttaagttaataaatgtgcccagagcccaggcacagtggctcaggcctgtgattttagctctttgggagaccgaggtgggtggatcacttgaggccaggagttcctagaacgttcctctgtcaaaagacaaaattacaacaatttaaaatctaattggctgttattggccattctagaattggttgacatctcattctatgaaatacaatgagtgctcttcaataagctgagcagaggggggttagctttattggcagaaaagggctaaagaaaacagaaaaagaacaaaaagtgattggttgtttcagagttactttccttaaagaggtaaagcacagaggacccccttatcatcctggctcaagtaacggtggtgtcactccacatcagccctcattttacacgggaaggtagttgctaatttaacaagatttcatggccaataaaatatttatgatgcttttagtggtcaatgcatttatcttatagngatttattataaaaanggatttt

SEQ ID NO: 8879 - DNA, 662 bp, Homo sapiens
  misc_feature 632, 662: n = A,T,C or G
cgcgtaatacgactcactatagggcgaattggagctccaccgcggtggcggccgcccgggcaggtacacttgaaaccaaatttctaaaacttgtttttcttaaaaaatagttgttgtaacattaaaccataacctaatcagtgtgttcactatgcttccacactagccagtcttctcacacttcttctggtttcaagtctcaaggcctgacagacagaagggcttggagattttttttctttacaattcagtcttcagcaacttgagagctttcttcatgttgtcaagcaacagagctgtatctgcaggttcgtaagcatagagacgatttgaatatcttccagtgatatcggctctaactgtcagagatgggtcaacaaacataatcctggggacatactggccatcaggagaaaggtgtttgtcagttgtttcataaaccagattgaggaggacaaactgctctgccaatttctggatttctttattttcagcaaacactttctttaaagcttgactgtgtgggcactcatccaagtgatgaataatcatcaagggtttgttgcttgtcttggatttatatagagcttcttcatatgtctgagtccagatgagttggtcaccccaacctntggagagggtctggggcagtttgggtcgan

SEQ ID NO: 8880 - DNA, 890 bp, Homo sapiens
  misc_feature 122, 312, 425, 441, 580, 659, 736, 765, 787, 806, 813, 829,834, 840, 842, 849, 872, 889: n = A,T,C or G
cgccgactcactatagggcgaattggagctccccgcggtggcggccgaggtactggaaagatgaactgatcatatggagatgtcagccttgtaaatcgaaaataaaattctaagccccccantcaactgaacagactttccttttggccaaagagatcccccaaaacctgaaaataaactagttcaggaaggcagggggcaggggcggttggacatgtctcattacaccctcttccctctggaggttagacaaaattgactagtgttaacattaaaatagagatcttaaggactgacaaaacagactctgtngcaataagacaccaaattccaacctgattctagtgtaacatcacatgacagatagtgggtcctaaaggaaatcaaagtattttgctccaaaatatacttccctgacatatttngaaatgggcctgaaangctatctcttgcgggggaagttatattctatagagactctccttcccctacgaggtcttttcaggagattttgacatcttttagctctaataagaaacatgcacatctattctctctgaactctgctacttggaggctncatctacatgacaggaaccttggtttccacaactcgacctctcttaccttaccttaactcaagctgactcactcttcangaagagcttaattctttcaaccaattgccaattcaggaaatctttgactcccctatgacctggaagccccacacttntaccccggctttgagatgtcccacctttncaggccaaaccaacatataccntaaatatattgatttatgncttttgncctgtaccttctggcntcccnaaatgntnaccaatnaagctggaacccaaccggctttngggacatggtctcaaant

SEQ ID NO: 8881 - DNA, 697 bp, Homo sapiens
  misc_feature 5, 7, 8, 9, 10, 646, 663, 667, 697: n = A,T,C or G
tgggntnnnncgcgtccgatggatttgaaggagttcgacttggatgccctgttgggtatagatgacctggaaaccatgccagatgaccttctgaccacgttggatgacacttgtgatctctttgcccccctagtccaggagactaataagcagcccccccagacggtgaacccaattggccatctcccagaaagtttaacaaaacccgaccaggttgcccccttcaccttcttacaacctcttcccctttccccaggggtcctgtcctccactccagatcattcctttagtttagagctgggcagtgaagtggatatcactgaaggagataggaagccagactacactgcttacgttgccatgatccctcagtgcataaaggaggaagacaccccttcagataatgatagtggcatctgtatgagcccagagtcctatctggggtctcctcagcacagcccctctaccaggggctctccaaataggagcctcccatctccaggtgttctctgtgggtctgcccgtcccaaaccttacgatccttctggagagaagatggtagcagcaaaagtaaagggtgagaaactggatagaagctgaaaaaatggagcaaaacaagacagcagccctaggtacccgccagaanaaaaggcggaccaggangttntactgtgagtgcaagagtggaaagaaaacn

SEQ ID NO: 8882 - DNA, 678 bp, Homo sapiens
  misc_feature 25, 27, 637, 655, 663, 677: n = A,T,C or G
acgactcactatagggcgaattggnanctccaccgcggtggcggccgcccgggcaggtacttttttttttttttttttttgctgtctctctctctctctttttgacagggaaaaacagctatcaggtttctggaacattcttgaatagctaattcctggagtccttgtcctcacttcttctcctctgtacctcactggcatttgctccaagatctccttttcaaacaacgtcctggcactgagctgagatttccaaatgttaactccctggcatccatcctgtaggtgcagaaaggattcttccctgatttgcacacaaaccttttcatttcgatgcatatcagggtcatctcggctttgtgccttgcctacaaggtggtttggaggccatgtcccagagaacaaattaaagagattttcctcctccttttcagaacatctccccccagccactctcacctgggcatctggaaactcagtccttccaggctcttatttttacctccgtgggctgagtcccagggtggacactgacctacataccagcttttcagactcctttcaggaaggcctgcaaaatcctccagcagcttgcctgtgctgttctcatgcccttgctcaagggaaagcttgtctnaagctcctgtgatcaaangacctttnctttccaggtgccnt

SEQ ID NO: 8883 - DNA, 417 bp, Homo sapiens
  misc_feature 227: n = A,T,C or G
gagcgcgcgtaatacgactcactatagggcgaattggagctccaccgcggtggcggccgaggtacgcgggggaggtgagtccggtcccttttgcatccctaccccgacactgcgggttgtcacaacggcaccctcccgctttctctctgcctcggatttagtcgtgactgtgtgtctccgccgtggtgcagcttcaggcctctcccgcatctactctctcacgcttncgctgcggcctgagggagggcggcgggcggaccacggaccggggttggcatacgtatcaaggacagtaactaccatggctcccgaagttttgccaaaacctcggatgcgtggccttctggccaggcgtctgcgaaatcatatggctgtagcattcgtgctatccctgggggttgcagctttgtataagtt

SEQ ID NO: 8884 - DNA, 399 bp, Homo sapiens
  misc_feature 359, 379: n = A,T,C or G
cgcgtaatacgactcactatagggcgaattggagctccaccgcggtggcggccgaggtacttaactagggttagccgaggtcaggagggtggatgccttattatgggattagtgcccttctaagagggacagtagagggcttgttcatgctctctctctccatgcacaagaaagagtacacagtgagaaggaaagaggccctcaccagaacctgaccatgctggcaccgtgattgcagacttccagcctccaggattgtgagaagataaatatctgtggtttaagtcaccaagtctgtggtgtgttttatggcagcacaaggtaacccagatgatgcttttcaccactgggtggtccancctttcatggaagctgtcanctcctcaaccttgcaaaaaa

SEQ ID NO: 8885 - DNA, 599 bp, Homo sapiens
  misc_feature 2, 3, 161, 163, 165, 166, 171, 172, 173, 177, 180, 181, 182,183, 184, 185, 186, 198, 199, 200, 201, 202, 203, 204, 205,206, 207, 208, 209, 210, 211, 212, 213, 217, 218, 219, 220,221, 222, 224, 225, 239, 240, 241, 242, 245, 246: n = A,T,C or G
  misc_feature 247, 267, 268, 269, 270, 275, 276, 277, 280, 281, 284, 289,290, 291, 295, 301, 302, 303, 304, 329, 335, 336, 341, 342,343, 344, 345, 346, 347, 356, 362, 363, 364, 365, 373, 375,376, 383, 384, 388, 389, 390, 393, 394, 401, 402, 404: n = A,T,C or G
  misc_feature 407, 408, 410, 411, 413, 414, 416, 417, 418, 421, 422, 423,431, 432, 434, 435, 437, 446, 447, 455, 462, 463, 469, 477,485, 491, 498, 499, 500, 501, 502, 514, 516, 521, 522, 523,524, 525, 526, 529, 534, 538, 559, 560, 561, 567, 568: n = A,T,C or G
  misc_feature 569, 587, 588, 589, 590, 591, 592, 593, 594: n = A,T,C or G
gnncccagcgtccgttttttttttttttttttttttttttttttttttttttttttttttttttttttttttttttttttttttttttttttttttttttttttttttttttttttttttttttttttttttttttttttttttttttttttttttttttngnannggggnnngggnccnnnnnnnaaaaaaaacccnnnnnnnnnnnnnnnnaaannnnnntnnaaaaaaaaaaaaannnnggnnncccccccccccccccccccnnnnggggnnnggnnaanggggnnncccnaaaaannnnggggggggggggggggggggggggnaaaaannttttnnnnnnnggggggggncccccnnnncccccccnannggggggnncccnnnccnnggggggnncnggnntnncnncnnnggnnncccccccnncnnanaaaaaaaanngggggggnccccccnncccccngggggggncccccccnaaaaanccccccnnnnncccccttttttntnggggnnnnnnaanaaaangggnccccccccccccccccccccnnntttttnnnggggcccccccccgggannnnnnnnggggg

SEQ ID NO: 8886 - DNA, 636 bp, Homo sapiens
  misc_feature 2, 4, 5, 6, 11, 133, 140, 152, 157, 158, 165, 166, 167, 168,169, 172, 173, 175, 183, 184, 185, 190, 196, 211, 212, 213,217, 223, 224, 225, 250, 252, 257, 259, 260, 261, 276, 279,283, 294, 302, 303, 304, 305, 306, 307, 308, 309: n = A,T,C or G
  misc_feature 315, 318, 319, 320, 321, 322, 323, 324, 325, 341, 342, 344,345, 346, 347, 357, 358, 359, 360, 361, 362, 363, 364, 365,366, 370, 380, 389, 403, 433, 434, 438, 452, 459, 460, 461,462, 473, 480, 481, 482, 483, 484, 485, 487, 502, 503: n = A,T,C or G
  misc_feature 508, 516, 517, 518, 520, 521, 522, 523, 524, 539, 540, 541,549, 551, 553, 558, 560, 561, 576, 577, 578: n = A,T,C or G
cntnnnaggantttttttttttttttttttttttttttttttttttttttttttttttttttttttttttttttttttttttttttttttttttttttttttttttttttttttttttttttttttttttttnggggggncccccccccccnttttnnaaaaaannnnnggnntnaaaaaaannnggggnaaaaanggggggggggggggnnnaaancccccnnncccccccccccgggggggggggggngnaaaanannnaaacccccccccccnggnaaanccccccccccnaaaaaaannnnnnnncccccnaannnnnnnnggggaaaaaaaaaaanngnnnncccccccaannnnnnnnnngggncccccccccnaaaaaaaancccccccccccccnggggggggggggggccccccccccaaaaanngggnaaaaaaaaaaaaanccccccnnnnggggccccccnaaaaaannnnnncnccccagggggggggnnaaaancccggggnnntnnnnnccccccccccccccnnnaaaaaaangngntggcncnncccaaaaggggcccnnnaaattttttaaaaaaaaaacccccccccccccccccggaaaaaaaaaaaaaaaaaaag

SEQ ID NO: 8887 - DNA, 674 bp, Homo sapiens
  misc_feature 4, 5, 10, 15, 541, 542, 605, 614, 665, 672: n = A,T,C or G
gggnnatcgncttgnacccccgcgtccgaaatcagcatgtttctcggtgcagatctgaaatcacatccagctcctgatgttttcttctccctctgactgcagaggaagtgttcctacctgcaggaaggcacctgtcacacagggcgttcactcagaccatctgtgctctgccctgagttcagttgagaaaatcctattatcaaatttggatttcctggccccagaacttcccaaagacctgtaaaatggagggatttaccacctcacatatgtccagttaaacagtttgtggacttgtaaccgtcgcagcccaatgatacaacagtagtttaatcacgtgaaaaaaaaaaaaaaagggcggccgctagactagtctagagaaaaaacctcccacacctccccctgaacctgaaacataaaatgaatgcaattgttgttgttaacttgtttattgcagcttataatggttacaaataaagcaatagcatcacaaatttcacaaataaagcatttttttcactgcattctaattgtgggttgnncaaactcatcaatgtatcttatcatgtctggatccccgggtaccgagctcgaattaattcctnttccgcttnctcgttactgactcgctggctcgggcgtcgggtgggggagcggtttagctnactcaangc

SEQ ID NO: 8888 - DNA, 393 bp, Homo sapiens
  misc_feature 4, 144, 248, 250, 251, 253, 255, 267, 275, 344, 348, 370,391: n = A,T,C or G
gtancgactcactatagggcgaattggagctccaccgcggtggcggccgcccgggcaggtacttttttttttttttttttttttgtaggttgaatgcagggttttattgagtggtggaggtggttctctgaaggatggatgcancagctggaagccggggatggcacgggaagataatcttcctgctgggtggccaaacctctccgaccaccctcggctgaactcctctcggcgttcaaatgttcctntnntntntttctctgctgnatcgtttnaccattcatctgcttgtctgggatggtgaagacaactgtttgctcatttgcttggcgctaggtgattgnctcnccgctcagctataggcgatggnctcaccactcggtgataggcnac

SEQ ID NO: 8889 - DNA, 882 bp, Homo sapiens
  misc_feature 4, 499, 500, 501, 502, 503, 504, 505, 506, 507, 508, 509,510, 511, 512, 513, 514, 516, 518, 519, 520, 521, 522, 523,524, 526, 527, 540, 545, 610, 667, 701, 712, 764, 772, 787,792, 797, 798, 810, 813, 815, 818, 821, 822, 828, 829: n = A,T,C or G
  misc_feature 833, 843, 862, 864, 868: n = A,T,C or G
tagncgccccgcgtccgctgtcatgttggctcctaaggaactgctgttgtaagcggctcatcaagagttgaacttcacgtagccttgttgggaatatggaaaaggaagaaagccacaggactgcccattcagtcttgggaagattgggatgattctgcacaagcaaaaatgactgaagtttatgtatagacacacctctaccaatccatcttcagctgactgaatgttgtatgatagcccttctccaaagcagaggtagaatgttcaggtttcaccatggattttctacttatttcgtttttggaatcaccttacagattccaggtcccttttgtatatattctttattcttttgcttttttaaaaaataattttgtttcatatttaaagcacttgtattagtcaatgtttcgtgttccgcattatttgaaccatttgcccttacagaaagagaaatacttgtttgtgttttaaataaaactgatgtaggaaaaaaaannnnnnnnnnnnnnnnanannnnnnnanngggcggccgctanactantctagagaaaaaaccttcccaccttcccctgaacctgaaacataaaatgaatgcaattggtgggnggtaacttggttattgcagcttataatgggtacaaataaaagcaatagcatccaaanttcacaaataaagcctttttttcctgcattctanttgggggttgnccaactcacaatggatcttatcatgttttgggaaccccgggacccgaccccnaataaatnctttttcccttctcntcctngctcnnttggcttgggcntcngnttnggnnaacggnntaanttccttcaanggggggaaaccggtttccnanaatngggggaaccccggg

SEQ ID NO: 8890 - DNA, 679 bp, Homo sapiens
  misc_feature 414, 549, 580, 611, 643, 657, 662, 674: n = A,T,C or G
gagcgcgcgtaatacgactcactatagggcgaattggagctccaccgcggtggcggccgcccgggcaggtaccttcaatttttcccacggtaatggaatataactatttatcaatttatcactgcaactgacatagccagggaaatgtttaagaaatgaataaatagaagtttattccctgcaggtagtcgattgagtccaccaaaatcttaagctaaattttatgttgtttcatggtagctgttatgaaaatggaccatctaagagaaaatccattgtttctcaaattcaaatgcattctgtgtgactaggttgttcccgtgataatgctatgtgacattgctgttctcttctattcaccagtttgccttcctaataacctcttctcatatacattctttaggaaaagaccantgccctcagtctgagcaacgttgctggagtattctacatccttgtcgggggccttggtttggcaatgctggtggctttgattgagttctgttacaagtcaagggccgaggcgaaacgaatgaaggtggcaaagantgcacagaatattaacccatcttcctcgcanaattcacagaattttgcaacttataaggaangttacaacgtatattggcatcgaaagtgttanaatttaaggggtangaacnaggctctaatanaaact

SEQ ID NO: 8891 - DNA, 876 bp, Homo sapiens
  misc_feature 2, 3, 30, 35, 189, 194, 197, 200, 270, 329, 349, 395, 449,470, 562, 573, 577, 578, 579, 580, 581, 582, 583, 584, 585,586, 587, 588, 589, 590, 591, 592, 593, 594, 595, 596, 597,598, 599, 601, 602, 603, 604, 605, 606, 608, 609, 610: n = A,T,C or G
  misc_feature 615, 631, 635, 636, 653, 698, 716, 719, 728, 734, 749, 755,765, 783, 793, 808, 812, 817, 826, 831, 836, 856, 871: n = A,T,C or G
gnnatccttaggagtcgccccgctgcggtngcccngcgtccgctagatcgcgagcgccgcctttttttttttttttttttttgcatttgagctaagattttaacaatcctgtgaaaataggtaatatagtcacgtatttgttgaatacattatttcaaagaaccacaaacacacagaaaaaatatttanaacgncanggngggggaaatgatccagaaacaacagctcttctacttccagccctaaccgtctgggatgctagatggttgngggcaaaccgtggaaaaagataagcttctgtttttcaagattttattttgttagagagngcagaaaatctaagtgatgnctctgtttttgctttctagcaattaatatatgacagcaggctttgngatttattttaactttctgcaagacctttggctcacagaactgcagggtatggngagaaaccagctacgggttgntggaaaccacaccttctctttcttatggctttttactaccaaacttccagacaatggtggaacctgctatcatggttattttaaaaaaatgntgggcaaaaanaaannnnnnnnnnnnnnnnnnnnnnnannnnnnannnggggngggccgttgactattntaannaaaaaccttcccccccncccctggacctggaacaaaaaaatggaaggccattggtggtggtnaccttggttattgggccnttntaaggggtnccaaanaaggcaattgccttncccaantttccaaaanaaggcattttttaccggnattctaggtngggggtgggccaacncaanaaagngttttttantggtngggtnccccgggcccggcccgaaanaaatccctttccctnccccg

SEQ ID NO: 8892 - DNA, 638 bp, Homo sapiens
  misc_feature 490, 493, 533, 539, 541, 556, 568, 569, 600, 604, 620, 625,635: n = A,T,C or G
gactcctatagggcgaattggagctccaccgcggtggccgagcggccgcccgggcaggtacgcggggggggcatgaaccctgttgtgaactgctcatctgagggatctaggttgtgtgcttcatatgagaatctaatgcctgatgatatgtcactgtctcactttgcccccagatgagaccatctagttgcagaaaaataagctcagagtttccacggattctacattatgatttgatcttcaacaaagctgacactggggaaaggacacactcttcaataaatggtgctgggaaaattggatagccacatccagaaaaatgaaactggaccactatctcactatatacaagaatcaactcaaagtagattaaaaacttaaacagaagacctgaaactataaaaatacttgaagaaaacctagggaaaatttcctggcctttttgtctaggcgaagaatttatgactaaacacctcaaaagccccaagcnacncaaattaaaaatagaccaaatgggacttaattaacttaanaaagcntntgagccgccagaagnaaataatcagcnngagtggagagacaaccctcctgaatgggaanaaanatttggcaaacctggncatcnaatagggggncta

SEQ ID NO: 8893 - DNA, 649 bp, Homo sapiens
  misc_feature 2, 5, 13, 30, 36, 37, 38, 43, 45, 73, 76, 85, 86, 132, 351,353, 354, 357, 399, 482, 486, 572, 587, 590, 619, 624: n = A,T,C or G
gnacncgtcgtantggtacttcactttgtngtgccnnnttggnanctccaccgcggtggcggccgcacgcggntcnggtactcgnngtaattgttggtacttgcaaactttcaaagacacagcctgccgaanaagccatctgccttcgagcctgccattgaaatgcaaaagtctgttccaaataaagccttggtaattgaagaatgaacaaacattgagagcagtatgagatactcccatcagaatccaaacaaaaggactatgaagaaagttcttgggattctgagagtctctgtgagactgtttcacagaaggatgtgtgtttacccaaggctgcgcatcaaaaagaantnnatnaaataaatggaaaattagaagggtctcctgttaaagatggtnttctgaaggctaactgcggaatgaaagtttctattccaactaaagccttaaaattgatggacatgcaaactttcaaagcagancctnccgagaagccatctgccttcgagcctgccattgaaatgcaaaagtctgttccaaataaagccttggaattgaagaatgaacaaacnttgagagcagatganatnctcccatcagaatccaaacaaaaggactntgaanaaagttcttgggattctgagagtct

SEQ ID NO: 8894 - DNA, 779 bp, Homo sapiens
  misc_feature 638, 643, 666, 671, 672, 691, 716, 728, 731, 745, 762, 763,769, 775: n = A,T,C or G
ttgaatacgactcactatagggcgaattgggccctctagatgcatgctcgagcggccgccagtgtgatggatatctgcagaattcggcttagcgtggtcgcggccgaggtacaacagaaggcactgttatccgcatgaatccattgattctgcatggcaaaaacctgagacgtgcaagtctatccaatcctctaaaacaaccttgggcattcagcctttggaacatatgggttgtccttttccgtccaatgattgtttttctttcatttcatacttacagtagctgtttaaaatatatatttcagggtgacaaaggtcaaaggggaaagagtagataaaagtgctgcctaatgccagatggtaactggcacagcaggagggccctaaaagcagcccctcatttcatccccttgaccctcacactcctcttgtgaaataaaatgcagcgatgacatttggtcagctgatgttctttccttcagttgttgctgggcacagtcccaaaattaaatgcgggagaggactcctttgttttcaaaggtgaagcctccctgttgttcaatcttcttctttgcctctgccaccgtccgtcggtgctctgccagtgtgtacctgcccgggcccggccgttcgaaagnccganttccagcacactgggcggccgtnactanngggatccgaggctcgggtnccaagcttgggcgtatagataggtnataggctgtttnccngtgtgaaattgttntcccgttcacaattccnnccaacntacganccgg

SEQ ID NO: 8895 - DNA, 866 bp, Homo sapiens
  misc_feature 623, 635, 673, 708, 754, 778, 779, 814, 824, 832, 849, 863: n = A,T,C or G
gccccgtatacgactactatagggcgaattggagctccaccgcggtggcggccgcagctctgaggagcggccaagcagcaggacaggcagcttgccctggtggtcaattttgatgagtgcgatgtctgctttctcatcccccgcgtacctgcccgggcggccgctctagaactagtggatcccccgggctgcaggaattcgatatcaagcttatcgataccgtcgacctcgagggggggcccggtacccagcttttgttccctttagtgagggttaattgcgcgcttggcgtaatcatggtcatagctgtttcctgtgtgaaattgttatccgctcacaattccacacaacatacgagccgggagcataaagtgtaaagcctggggtgcctaatgagtgagctaactcacattaattgcgttgcgctcactgcccgctttccagtcgggaaacctgtcgtgccagctgcattaatgaatcggccaacgcgcggggagaggcggtttgcgtattgggcgctcttccgcttcctcgctcactgactcgctgcgctcggtcgttcggctgcggcgagcggtatcagctcactcaaaggcggtaataccgttatccacaaaaatcangggataacgcangaaaagaacattgtgaacaaaaaggccagcaaaaggcnagaaccgtaaaaaggccgcgttgctggcgtttttncataagcttccgccccccttgacgagcatcacaaaaatcgaccctnaagtcagaggtggcgaaacccgcnnggactataagaaaccaggcgttcccctggaagctncctgggcctntctgtccnaccttgccgttacgganacctggcccctttnttc

SEQ ID NO: 8896 - DNA, 870 bp, Homo sapiens
  misc_feature 24, 687, 693, 705, 723, 757, 768, 814, 826: n = A,T,C or G
actcactatagggcgaattggagngccaccgcggtggcggccgaggtacagggtcccaaaatgcgctgactcagcttcaccagcccatctcggatctcattgccaaaaatgtctcttcggtcatgaatgaggatccagcccaacctccagccaggaaccagccagcgcttggcgagccctccacaggacaggatggggacatcggtgctgagggcggccagtggttcatatttgcaatccgaaaacaccatgtctccatagatctcatcagctaagatggggacacactgccgtgcagccactgtcagaatcttctgaagatgacgtttgctgaacactgacccacaggggtttgatggattattgacaatgagacaagctgtcttttcatcaattagatattccagttgtttcaggtcaatttcccaagatttctctggcaacaaattgtagagtttgacctcaattcccatagactcagccagagtcttgtagagagagaaaccaggtcttggaaccaggatgttttgccctgggttggccaacacagctaaacaaaaggtcaatagcttggctgcagccactttgtcagaatgacgtccttagcttctaggggtgcccttcaaggacagtggtaataaagaaacaatcttcttcccgacttggatagggaagcccgattggatngggccntagccctttttnttttgccccgagttccangggcatcttttatttggcctggggaaactttaangggtctggtangccaggttttcccaaacaccaggtaggggtccccccattgggccangggaaaacattnttttttggtttgggattgggttcaccttcatgttgtcccccaat

SEQ ID NO: 8897 - DNA, 866 bp, Homo sapiens
  misc_feature 508, 544, 582, 620, 668, 678, 805, 849: n = A,T,C or G
cgcgcgtaatacgactcactatagggcgaattggagctccaccgcggtggccggcccgcccgggcaggtacacttgaaaccaaatttctaaaacttgtttttcttaaaaaatagttgttgtaacattaaaccataacctaatcagtgtgttcactatgcttccacactagccagtcttctcacacttcttctggtttcaagtctcaaggcctgacagacagaagggcttggagattttttttctttacaattcagtcttcagcaacttgagagctttcttcatgttgtcaagcaacagagctgtatctgcaggttcgtaagcatagagacgatttgaatatcttccagtgatatcggctctaactgtcagagatgggtcaacaaacataatcctggggaccccgcgtacacctgggcaccagtgacattccagatgtccttggggggcgtcactatggaaggaccttgctcgcaggtgcccttgctgacctgggtgcccgcgtacctnggccgctctagaactagtggatcccccgggctgcangaattcgatatcaagcttatcgatccgtcgaccttganggggggcccggtcccaacttttggtccctttaagtganggttaattgccccttggcgtaatcatggcatagctggttcctgggtgnaaatggtatncgctcacaatttcacacaacataccaaccgggagcataaaagtgtaaaagcctgggggggctaatgagtgactacttacattaattgcgttgggcttactggccccttttcaatcgggaaaacctgncggccacttgattaatgaatcggccacccccggggggagggggnttgggattgggcccttt

SEQ ID NO: 8898 - DNA, 877 bp, Homo sapiens
  misc_feature 3, 605, 713, 727, 751, 758, 761, 775, 780, 788, 800, 801,822, 823, 838, 852, 874: n = A,T,C or G
cgnacactcactatagggcgaattggagctccccgcggtggcggcccgaggtacagacaggcttctctgctatcctccaggcagtgtaatagtcaaggaaaagggcaacagtattggatcattccttagacactaatcagctggggaaagagttcattggcaaaagtgtcctcccaagaatggtttacaccaagcagagaggacatgtcactgaatggggaaagggaacccccgtatccacagtcactgtaagcatccagtaggcaggaagatggctttgggcagtggctggatgaaagcagatttgagatacccagctccggaacgaggtcatcttctacaggttcttccttcactgagacaatgaattcagggtgatcattctctgaggggctgagaggtgcttcctcgattttcactaccacattagcttggctctctgtctcagagggtatctctaagactaggggcttggtatatatgtggtcaaaacgaattagttcattaatggcttccagcttggctgatgacgtccccactgacagagaaagggaggctggtaaggaactgggtccttctgggtagacctctgggagctcctccangctggcaggctctggggaagggcatttgaagaacatgactgggtccaagttgtcccagaatgcccaacaggatatcagactgtaagaagcaaaaatttaaatgaagtncctcggccgtctanactagtgggatcccccggctgcangaattcnatntaagcttatcgatnccgcnacctcganggggggcccggnncccacttttggttccctttanngaggggtaaattgcncccctggcgtaaancatgggcatagctggttcctgnggg

SEQ ID NO: 8899 - DNA, 819 bp, Homo sapiens
  misc_feature 1, 6, 17, 20, 465, 481, 502, 521, 592, 612, 620, 626, 634,641, 646, 648, 659, 695, 704, 710, 717, 727, 741, 764, 769,778, 784, 795, 797: n = A,T,C or G
ngtttnttgtagtccancangcgtccgggctggccaaggagaaggagcagagcctacggcagaaaaggatgaggacgaagagaacgatgcctctctggccaactcctccaccaccactttggaggacaaaggccctggccatgccacttttggccgcgaggccaccaaatttgaagaggaggagaaacctgacaaggcctgggaagccagacccccacgagagtccagcgatgttccccccacgaagagaaataactggatctttattgatgaggagcaagcctttggggtcagaggacaggcccggggccggggccgtggtttcagagagttcacttttcgtggtcggcctgctggcggaaatgggagcggcctctgtggtgggggggtcctgggggcccgcagcatctactgcagcagtcagcgcaacggcccgtggccggggcctgcgagagtttgcgcggncagaggactggcccanagccaagccccgacggagagntgccagtgagacccatagngagggcttaaagtatgaagaactttccaagcgccgccgcagaagggcttccagaaccggaatgaaagcttnctttcttgaaaagggagganaagcaccnttgaanaaagggcnactgcanaaaantntttggcgggtncaaacaaggggttggtttttaaggaccccaacggtnttaaaattncccaanagcccgngggccctttngggccttttggggngaagcccttccctttccccgggnttagncaaaattgnggggtntttggaccggngnaacccttttttttttccaaaaa

SEQ ID NO: 8900 - DNA, 876 bp, Homo sapiens
  misc_feature 6, 9, 11, 19, 23, 39, 40, 41, 54, 79, 80, 99, 101, 112, 155,300, 304, 311, 329, 337, 345, 394, 398, 404, 430, 435, 440,441, 459, 460, 465, 471, 477, 491, 505, 509, 519, 528, 537,538, 540, 568, 571, 595, 606, 611, 637, 661, 666: n = A,T,C or G
  misc_feature 682, 688, 689, 705, 706, 712, 715, 720, 722, 728, 735, 740,750, 769, 777, 779, 789, 791, 792, 797, 799, 801, 819, 827,832, 846, 848, 856, 858, 873, 875: n = A,T,C or G
gagatnggngntgggagtngccncgcgtccgttctagannntgagcggccgctngactagtctagagaaaaaacctcgnncacctccccctgaacctgntncataaaatgantgcaattgttgttgttaacttgtttattgcagcttataatggntacaaataaagcaatagcatcacaaatttcacaaataaagctttttttcactgcattctaattgtggtttgtccaaactcatcaatgtatcttatcatgtctgaatccccaaataccaaactcaaattaattcctcttccacttnctcnctcactnactcactacactcaatcnttcaactncagtctancaatatcaactcactcaaagacggtaatactacttatccacaaaatcanaacnataacncatagaaacaacatgtgagcaaaaanccaancaaannaccaagaaccctaaaaanncccanttactnacattnttccataaactccnccccccttacaaancatnacaaaaatcnaccctcaantcaagaatnncnaaaccctacaatactattaaaataccangcntttccccctaaaaacttccttctncacctctcctnttccnaccctaccactttaccaaaatacctntcccctttctcccttcgaaaaacnttaanacttttcttataactnaccctnnaaagtatcttcaattnnattatnaanccagncncgtccnaacttangcttntattccaccnaacccccccgtttaacccnaacccctngncccttattcnannacctntntnttttaatcccaccccttnaaacaacnacttntttccccgttcaanantccccttntnacaataatttaccanant

SEQ ID NO: 8901 - DNA, 472 bp, Homo sapiens
  misc_feature 2, 3, 7: n = A,T,C or G
gnncgtntggagcgccccgcgtccggagggtcccggccgggagccgcggaaagagtagggctccccagacaacggggtccgacgagcagttgggcacgggctgagtccgcctgccggcagaatgtccctggctgcttattgcgtcatctgttgcagaagaataggaacctctacttccccaccaaaaagtggcacacactggagagatatcagaaatataataaagtttactggatcacttattttaggaggttctttatttcttacatatgaagttctggccctgaagaaggctgtgacattagatactcaagtggtagaacgagaaaaaatgaagtcatatatatatgtgcacacagtttctttagataaaggagaaaatcatggtattgcctggcaggcaagaaaagaacttcacaaagcagtaagaaaagtattggcaacatcagccaagatactgcgggaatccatt

SEQ ID NO: 8902 - DNA, 860 bp, Homo sapiens
  misc_feature 561, 605, 628, 666, 667, 714, 732, 785, 793, 812, 848, 858,860: n = A,T,C or G
cgcgtaatacgactcactatagggcgaattggagctccaccgcggtggcggccgaggtacaggctgacagagaagattcccgagagtaaatcatctttccaatccagaggaacaagcatgtctctctgccaagatccatctaaactggagtgatgttagcagacccagcttagagttcttctttctttcttaagccctttgctctggaggaagttctccagcttcagctcaactcacagcttctccaagcatcaccctgggagtttcctgagggttttctcataaatgagggctgcacattgcctgttctgcttcgaagtattcaataccgctcagtattttaaatgaagtgattctaagatttggtttgggatcaataggaaagcatatgcagccaaccaagatgcaaatgttttgaaatgatatgaccaaaattttaagtaggaaagtcacccaaacacttctgctttcacttaagtgtctggcccgcaatactgtaggaacaagcatgatcttgttactgtgatattttaaatatccacagtacctcggccgctctanaactagtggatcccccgggctgcagggaatttcgatatcaagcntatcgataccgtccgacctcgangggggggcccggtaccccagctttttggtccctttagnngaggggttaaattgcgcgctttggcgtaatcaatgggtcatagctgntttcctgggtgaaaattngttattcccgctcacaatttccccacaaacattaccgaagcccggggagccantaaaagtngtaaaagccctgggggtgncttaatggaggggagcctaaactcacattaatttgngttggcgccncn

SEQ ID NO: 8903 - DNA, 907 bp, Homo sapiens
  misc_feature 558, 630, 636, 648, 649, 674, 677, 681, 699, 716, 731, 735,746, 757, 796, 813, 817, 819, 828, 831, 844, 857, 858, 863,873, 893, 902, 905, 906: n = A,T,C or G
gtgccgcgtatcgactcactatagggcgaattggagctccccgcggtggcggccgcccgggcaggtacaggctgacagagaagattcccgagagtaaatcatctttccaatccagaggaacaagcatgtctctctgccaagatccatctaaactggagtgatgttagcagacccagcttagagttcttctttctttcttaagccctttgctctggaggaagttctccagcttcagctcaactcacagcttctccaagcatcaccctgggagtttcctgagggttttctcataaatgagggctgcacattgcctgttctgcttcgaagtattcaataccgctcagtattttaaatgaagtgattctaagatttggtttgggatcaataggaaagcatatgcagccaaccaagatgcaaatgttttgaaatgatatgaccaaaattttaagtaggaaagtcacccaaacacttctgctttcacttaagtgtctggcccgcaatactgtaggaacaagcatgatcttgttactgggatattttaaatatccacagtacctnggcccgctctaaaactagtggatcccccgggctggaggaatttcgatatcaagcttatcgatacccgtcganctcganggggggcccggnncccaacttttgttccctttagtganggntaantgcccccttggcggtaanatgggcatagctggttncctggggaaattgtnttcnctcacatttcncacacataccnacccgggagcttaaattgtaaacctgggggcctaatganggagctaactcacattnattncnttgggctcnctngcccgctttcaantgggaaaccgtcnngccancttgattaangaatcggccaaccccgggangggcggttncgnnt

SEQ ID NO: 8904 - DNA, 880 bp, Homo sapiens
  misc_feature 2, 3, 4, 5, 6, 7, 590, 629, 655, 663, 678, 692, 693, 696,702, 714, 725, 750, 754, 758, 806, 819, 820, 822, 849, 859,861, 871, 872, 876, 878: n = A,T,C or G
gnnnnnncccgcgtaatacgactcactatagggcgaattggagctccccgcggtggcggccgaggtaccacatcttaaatactctccagtgttctgagtctattatgggaggagcagtctttgagacgctggaaggaaatacaattgagataggatgtgacggtgacagtataacagtaaatggaatcaaaatggtgaacaaaaaggatattgtgacaaataatggtgtgatccatttgattgatcaggtcctaattcctgattctgccaaacaagttattgagctggctggaaaacagcaaaccaccttcacggatcttgtggcccaattaggcttggcatctgctctgaggccagatggagaatacactttgctggcacctgtgaataatgcattttctgatgatactctcagcatggatcagcgcctccttaaattaattctgcagaatcacatattgaaagtaaaagttggccttaatgagctttacaacgggcaaatactggaaaccatcggaggcaaacagctcagagtcttcgtatatcgtacctcggccgctctagaactaagtggatcccccgggctgcangaattcgatatcaagcttatcgatacccgcgacctccanggggggccccgtcccaacttttggtncctttaantgaggggtaattgcncccttggcggaaannatnggcctnaactggtttccntgggggaaatngttttccccttaccaatttccccanaaantacnaaacccgggagccttaaaggggtaaaaacctgggggggccctaatggngggagccctaccnncncctttaattgcgttgggcccccctggnccccttttcnancggggaaaanntgtngngc

SEQ ID NO: 8905 - DNA, 893 bp, Homo sapiens
  misc_feature 653, 691, 761, 764, 794, 804, 811, 824, 832, 844, 864, 868: n = A,T,C or G
agcgcgtatcgactactatagggcgaattggagctccccgcggtggcggccgaggtacatggatgaaaactaaaggctcgagttaatcacattgtagtttttaaatttctacagcctagagctcactagtcacaggtcttttaggtccttctggatgtcccacagggtatctgcacttttcttgagctgagcaacctcatcatcctttagcttctggttgataacgctggttaatccccgggcattgaggatacatggaaggctcaggaagacttcattctcaatgccatacatcccctttaccattgttgacacgggatgaatcctggatagatttttcaacatggattcaataagatcagccacacttaatccaatagcccagttggtatatccttttagcttgatgacttcataggcactttcaaccaccatcttatgcacttccttccaattttcactatcattgtcagttcccatttctggattcaattcctggagagaaacacctgccacattcacaccactccacacagccacacttgagtcgccatgttcccccaaaatccatccatggcagctgctgggatgaatgccaagtttttcagccataaggtagcgaaatctagcagaatccagattacatccacttncaatcacgcggtgtttgggtaatccacttagtttccangtaaccatacgtaagaatgtccactgggttggaaaccacaattatgatgcaatcaggactgtacctcggncgntctagaactagtggatcccccgggctgcangaattcgatntcaagcntatcgatccgtcnacctcganggggggcccgtncccagctttggttcccttantgangggtaattgggcccctggcgtattt

SEQ ID NO: 8906 - DNA, 707 bp, Homo sapiens
  misc_feature 7, 8, 627, 642: n = A,T,C or G
tgagggnncgctatacgactcactatagggcgaattggagctccccgcggtggcggccgaggtacacagtcagtgtggttgccttgcacgatgatatggagagccagcccctgattggaacccagtccacagctattcctgcaccaactgacctgaagttcactcaggtcacacccacaagcctgagcgcccagtggacaccacccaatgttcagctcactggatatcgagtgcgggtgacccccaaggagaagaccggaccaatgaaagaaatcaaccttgctcctgacagctcatccgtggttgtatcaggacttatggtggccaccaaatatgaagtgagtgtctatgctcttaaggacactttgacaagcagaccagctcagggtgttgtcaccactctggagaatgtcagcccaccaagaagggctcgtgtgacagatgctactgagaccaccatcaccattagctggagaaccaagactgagacgatcactggcttccaagttgatgccgttccagccaatggccagactccaatccagagaaccatcaagccagatgtcagaagctacaccatcacaggtttacaaccagggcactgactacaagatctacctgtacctnggccgctctagactngtggatccccccgggctgcaggaattcgatatcaagcttatcgatccgtcgacctcgaggggggg

SEQ ID NO: 8907 - DNA, 865 bp, Homo sapiens
  misc_feature 542, 582, 675, 688, 723, 733, 735, 740, 759, 760, 761, 779,781, 784, 786, 787, 793, 796, 808, 809, 813, 816, 817, 818,819, 821, 823, 836, 844, 849, 850, 855, 860: n = A,T,C or G
gcgcgtaatacgactcactatagggcgaattggagctccaccgcggtggcggccgaggtactgaggaatgaatagaaaggcttccagatgtctaaaagattctttaaactactgaactgttacctaggttaacaaccctgttgagtatttgctgtttgtccagttcaggaatttttgttttgttttgtctatatgtgcggcttttcagaagaaatttaatcagtgtgacagaaaaaaaaatgttttatggtagcttttactttttatgaaaaaaaaattatttgccttttaaattcttttcccccatccccctccaaagtcttgatagcaagcgttattttgggggtagaaacggtgaaatctctagcctctttgtgtttttgttgttgttgttgttgttgttttatataatgcatgtattcactaaaataaaatttaaaaaactcctgtcttgctagacaaggttgctgttgtgcagtgtgcctgtcactactggtctgtacctcggccgctctagaactagtggatcccccgggctgcangaattcgatatcaagcttatcgataccggccgacctcganggggggcccggtacccagcttttgttccctttagtgagggttaattgcgccccttggccgtaatcatggggcatagctggttccctggggtgnaaaatgttattcngctcccaattccccaccaaaataccagccccgggngccttaaaangntaaanccccgggggggcccccttnnnggggggcccccccccccncnttntnngggggnggncccaccccgccnntttnccnnnngngnaaaacttgggggncccccttntttannaaatnccccnccccc

SEQ ID NO: 8908 - DNA, 649 bp, Homo sapiens
  misc_feature 595, 617, 619, 639, 644: n = A,T,C or G
gagcgcgcgtaataccgactcactatagggcgaattggagctccaccgcggtggcggccgaggtacgatatacgaagactctgagctgtttgcctccgatggtttccagtatttgcccgttgtaaagctcattaaggccaacttttactttcaatatgtgattctgcagaattaatttaaggaggcgctgatccatgctgagagtatcatcagaaaatgcattattcacaggtgccagcaaagtgtattctccatctggcctcagagcagatgccaagcctaattgggccacaagatccgtgaaggtggtttgctgttttccagccagctcaataacttgtttggcagaatcaggaattaggacctgatcaatcaaatggatcacaccattatttgtcacaatatcctttttgttcaccattttgattccatttactgttatactgtcaccgtcacatcctatctcaattgtatttccttccagcgtctcaaagactgctcctcccataatagactcagaacactggagagtatttaagatgtgggacctcgggccgctctagaactagtggatcccccgggctgcaggaattcnatatcaagcttatcgataccgncnacctcagggggggcccggtncccanctttt

SEQ ID NO: 8909 - DNA, 817 bp, Homo sapiens
  misc_feature 2, 5, 12, 29, 519, 520, 521, 534, 537, 722, 757, 788: n = A,T,C or G
gntgngttctgntcgccccgcgtccgctntaatgtacatgggccgcaccataatgagatgtgagccttgtgcatgtgggggaggagggagagagatgtactttttaaatcatgttccccctaaacatggctgttaacccactgcatgcagaaacttggatgtcactgcctgacattcacttccagagaggacctatcccaaatgtggaattgactgcctatgccaagtccctggaaaaggagcttcagtattgtggggctcataaaacatgaatcaagcaatccagcctcatgggaagtcctggcacagtttttgtaaagcccttgcacagctggagaaatggcatcattataagctatgagttgaaatgttctgtcaaatgtgtctcacatctacacgtggcttggaggcttttatggggccctgtccaggtagaaaagaaatggtatgtagagcttagatttccctattgtgacagagccatggtgtgtttgtaataataaaaccaaagaaacatannncaactaaagaaanaantaaagggcggccgctagactagtctagagaaaaaacctcccacacctccccctgaacctgaaacataaaatgaatgcaattgttggtgttaacttgtttattgcagcttataatggttacaaataaagcaatagcatcacaaatttacaaataaagcatttttttcactgcattctagttggggnttgtccaaacccaacaatggatcttatcatgtctnggatccccggttcccgagctcgaattaaatncttttccgctttcttggttaattgacctc

SEQ ID NO: 8910 - DNA, 701 bp, Homo sapiens
  misc_feature 2, 3, 6, 7, 45, 701: n = A,T,C or G
gnnttnnttcgacgccgcaatgacgccctgcgccaggcaaagcanggagtccactgagtaccggagacaggtgcagtccctcacctgtgaagtggatgcccttaaaggaaccaatgagtccctggaacgccagatgcgtgaaatggaagagaactttgccgttgaagctgctaactaccaagacactattggccgcctgcaggatgagattcagaatatgaaggaggaaatggctcgtcaccttcgtgaataccaagacctgctcaatgttaagatggcccttgacattgagattgccacctacaggaagctgctggaaggcgaggagagcaggatttctctgcctcttccaaacttttcctccctgaacctgagggaaactaatctggattcactccctctggttgatacccactcaaaaaggacacttctgattaagacggttgaaactagagatggacaggttatcaacgaaacttctcagcatcacgatgaccttgaataaaaattgcacacactcagtgcagcaatatattaccagcaagaataaaaaagaaatccatatcttaaagaaacagctttcaagtgcctttctgcagttttcaggagcgcaagatagatttggaataggaataactctagttcttacaaccgcactctacagattagaaaaagttacacatattattacagaaaatctn

SEQ ID NO: 8911 - DNA, 606 bp, Homo sapiens
  misc_feature 547, 549, 589, 599, 604, 606: n = A,T,C or G
gactcactatagggcgaattggagctccccgcggtggcggccgaggtactgtggatatttaaaatatcacagtaacaagatcatgcttgttcctacagtattgcgggccagacacttaagtgaaagcagaagtgtttgggtgactttcctacttaaaattttggtcatatcatttcaaaacatttgcatcttggttggctgcatatgctttcctattgatcccaaaccaaatcttagaatcacttcatttaaaatactgagcggtattgaatacttcgaagcagaacaggcaatgtgcagccctcatttatgagaaaaccctcaggaaactcccagggtgatgcttggagaagctgtgagttgagctgaagctggagaacttcctccagagcaaagggcttaagaaagaaagaagaactctaagctgggtctgctaacatcactccagtttagatggatcttggcagagagacatgcttgttcctctggattggaaagatgatttactctcgggaatcttctctgtcagcctgtacctcggccgctntngaactagtgggaatcccccgggctgcaggaaatttgaaantcaaaacctnttcgntn

SEQ ID NO: 8912 - DNA, 922 bp, Homo sapiens
  misc_feature 1, 5, 672, 684, 709, 722, 733, 763, 778, 780, 782, 814, 822,830, 843, 851: n = A,T,C or G
ncgcnctactatagggcgaattggagctccccgcggtggcggccgaggtacttgagctgtgaggtcatcggaatcccgacacctgtcctcatctggaacaaggtaaaaaggggtcactatggagttcaaaggacagaactcctgcctggtgaccgggacaacctggccattcagacccggggtggcccagaaaagcatgaagtaactggctgggtgctggtatctcctctaagtaaggaagatgctggagaatatgagtgccatgcatccaattcccaaggacaggcttcagcatcagcaaaaattacagtggttgatgccttacatgaaataccagtgaaaaaaggtgaaggtgccgagctataaacctccagaatattattagtctgcatggttaaaagtagtcatggataactacattacctgttcttgcctaataagtttcttttaatccaatccactaacactttagttatattcactggttttacacagagaaatacaaaataaagatcacacatcaagactatctacaaaaatttattatatatttacagaagaaaagcatgcatatcattaaacaaataaaatactttttatcgtaaaaaaaaaccctcggcccgctctagaactagtggatcccccgggctgcaaggaattcgatatcaagcntatcgataccgnccaccctcgagggggggccccgganccaacttttggtncctttagtgangggtaattgcgcgcttggcgtaatcatggncatagctgtttctgngngnaatggtatccgttacaattcccaccaccatanaaccggancataaagngtaaagcctgggngcctatgnggggctacttacataattgggtggctcctgcccgtttcaagcgggaaaccttcggccactgcttatgatcc

SEQ ID NO: 8913 - DNA, 861 bp, Homo sapiens
  misc_feature 5, 6, 9, 13, 690, 693, 699, 715, 718, 726, 729, 734, 758,767, 784, 788, 837, 841, 843, 860: n = A,T,C or G
gatgnncgnatcnactcactatagggcgaattggagctccccgcggtggcggccgaggtacatggatgaaaactaaaggctcgagttaatcacattgtagtttttaaatttctacagcctagagctcactagtcacaggtcttttaggtccttctggatgtcccacagggtatctgcacttttcttgagctgagcaacctcatcatcctttagcttctggttgataacgctggttaatccccgggcattgaggatacatggaaggctcaggaagacttcattctcaatgccatacatcccctttaccattgttgacacgggatgaatcctggatagatttttcaacatggattcaataagatcagccacacttaatccaatagcccagttggtatatccttttagcttgatgacttcataggcactttcaaccaccatcttatgcacttccttccaattttcactatcattgtcagttcccatttctggattcaattcctggagagaaacacctgccacattcacaccactccacacagccacacttgagtcgccatgttcccccaaaatccatccatggcagctgctgggatgaatgccaaggttttcagccataagggtagcgaaatctagcagaatccagattacattcactttcaatcacgccgtgtttgggtaaatccacttaanttncaggtnacatacctaagaaagntcnctggggtnggnaaccncaattttgatgccatcaggactgntcccttggncccttttaaaactaagngggntcccccgggctgcagggaatccgtattaagcttattcgatacccgccancccnanggggggcccggacccant

SEQ ID NO: 8914 - DNA, 883 bp, Homo sapiens
  misc_feature 134, 451, 492, 507, 533, 545, 594, 602, 608, 618, 629, 631,635, 642, 655, 657, 659, 661, 672, 674, 675, 677, 679, 682,686, 687, 701, 706, 721, 725, 726, 732, 740, 742, 751, 752,759, 768, 771, 778, 779, 785, 787, 789, 793, 795, 800: n = A,T,C or G
  misc_feature 801, 804, 822, 828, 831, 833, 837, 838, 842, 843, 851, 852,853, 855, 856, 857, 858, 865, 868, 883: n = A,T,C or G
cgtaatacgactcactatagggcgaattggagctccaccgcggtggcggccgaggtactgcagggcccctcaaggaggatactacaaaacagccctgggaaccaggtgcgacattcgctgccagaagggctacnagctgcatggctcttccctactgatctgccagtcaaacaaacgatggtctgacaaggtcatctgcaaacaaaagcgatgtcctacccttgccatgccagcaaatggagggtttaagtgtgtagatggtgcctactttaactcccggtgtgagtattattgttcaccaggatacacgttgaaaggggagcggaccgtcacatgtatggacaacaaggcctggagcggccgctctagaactagtggatcccccgggctgcaggaattcgatatcaagcttatcgataccgtcgacctcgagggggggcccggtacccancttttgttccctttagtgagggttaattgcgcgcttggcgnaatcatgggtcatancttgtttcctgtgtgaaattgttatncgctcacaattnccacacaacataccgagcccgggagcataaaggtgtaaagcctggggtnccctttangagtgnacctaacttncattaatttgngnttgngcctcantggcccctttttncnantnggggaaaaacntnntntnggnccannttttatttaaaaanaaatnggccccccccccccngggnnaagggnggttttgngnttttgggcnnctttttnccctttttnggnttaaaannaaatantntnggcntntgggnnttntggtgggggggggggggnggtttnaanantttnntaanngggggggnnnannnnttttatncanaaaaaaaaagggggn

SEQ ID NO: 8915 - DNA, 837 bp, Homo sapiens
  misc_feature 9, 11, 13, 741, 764, 774, 775, 786, 814, 824, 832: n = A,T,C or G
agcgtatcnangncgcgcgtatacgactactatagggcgaattggagctccaccgcggtggcggccgaggtacaccttgaatgacaatgctcggagctcccctgtggtcatcgacgcctccactgccattgatgcaccatccaacctgcgtttcctggccaccacacccaattccttgctggtatcatggcagccgccacgtgccaggattaccggctacatcatcaagtatgagaagcctgggtctcctcccagagaagtggtccctcggccccgccctggtgtcacagaggctactattactggcctggaaccgggaaccgaatatacaatttatgtcattgccctgaagaataatcagaagagcgagcccctgattggaaggaaaaagacaggacaagaagctctctctcagacaaccatctcatgggccccattccaggacacttctgagtacctcggccgctctagaactaagtggatcccccgggctgcaggaattcgatatcaagcttatcgataccgtcgacctcgagggggggcccggtacccagcttttgttccctttagtgagggttaattgccgcttggcgtaatcatggtcatagctgtttcctgtgtgaaattgttattccgctccaattccacacaacataccagccgggagcataaagtgtaaagcctggggtgccctaatgaggtgagctaacttacattaattgggttgcgctcactgcccgntttcaagtccgggaaacctgtcngcccactggnnttaatgaatcngccaacccccgggaaaagcggttttgcntattgggccncttttccnttcct

SEQ ID NO: 8916 - DNA, 837 bp, Homo sapiens
  misc_feature 10, 592, 670, 712, 716, 789, 795, 836: n = A,T,C or G
agcctctcgnctacgactcactatagggcgaattggagctccaccgcggtggcggcccgaggtacaggctgacagagaagattcccgagagtaaatcatctttccaatccagaggaacaagcatgtctctctgccaagatccatctaaactggagtgatgttagcagacccagcttagagttcttctttctttcttaagccctttgctctggaggaagttctccagcttcagctcaactcacagcttctccaagcatcaccctgggagtttcctgagggttttctcataaatgagggctgcacattgcctgttctgcttcgaagtattcaataccgctcagtattttaaatgaagtgattctaagatttggtttgggatcaataggaaagcatatgcagccaaccaagatgcaaatgttttgaaatgatatgaccaaaattttaagtaggaaagtcacccaaacacttctgctttcacttaagtgtctggcccgcaatactgtaggaacaagcatgatcttgttactgtgatattttaaatatccacagtacctcggcccgctctagaactagtggatcccccgggctgcangaattcgatatcaagcttatcgataccgtcgacctcgagggggggcccggtacccagcttttgttccctttaagtganggttaattgcgcccttggcgtaatcatgggcatagctggttnctgngtgaaaatgttattcgctcacaatttcccacaacatccaacccgggagccttaaagtggtaaaagcctggggnggcctnatggggtgagcctaactcacattaaatggcggtggcgcccnt

SEQ ID NO: 8917 - DNA, 883 bp, Homo sapiens
  misc_feature 2, 3, 785, 832, 845, 880: n = A,T,C or G
gnnccgtatcgactcactatagggcgaattggagctccccgcggtggcggccgaggtacagtcctgattgcatcataattgtggtttccaacccagtggacattcttacgtatgttacctggaaactaagtggattacccaaacaccgcgtgattggaagtggatgtaatctggattctgctagatttcgctaccttatggctgaaaaacttggcattcatcccagcagctgccatggatggattttgggggaacatggcgactcaagtgtggctgtgtggagtggtgtgaatgtggcaggtgtttctctccaggaattgaatccagaaatgggaactgacaatgatagtgaaaattggaaggaagtgcataagatggtggttgaaagtgcctatgaagtcatcaagctaaaaggatataccaactgggctattggattaagtgtggctgatcttattgaatccatgttgaaaaatctatccaggattcatcccgtgtcaacaatggtaaaggggatgtatggcattgagaatgaagtcttcctgagccttccatgtatcctcaatgcccggggattaaccagcgttatcaaccagaagctaaaggatgatgaggttgctcagctcaagaaaagtgcagatccctgtgggacatccagaaggacctaaaagacctgtgactagtgagctctaagctgtagaaatttaaaaactacaatgtgattaactcgagcctttaattttcattcatgtcctcgggccgctctaaaactagtggatcccccnggctgcaggaattcgatatcaagcttatcgatcccgcgaccctcganggggggccccgtncccaacttttgttccctttatgagggttaattgcnccc

SEQ ID NO: 8918 - DNA, 731 bp, Homo sapiens
  misc_feature 1, 3, 5, 6, 7, 12, 716: n = A,T,C or G
ntntnnnttgangaccgtgcgtaatacgactcactatagggcgaattggagctccaccgcggtggcggccgaggagagtggaagtgtgagaggcacacctctgtgcagaccacatcgagcggatctggccccttcaccgatgttcgtgcagctgtttaccaaccgcagcctcacccccagcctcctccctatggccactgtgtcacagacagtggtgtggtctactctgtggggatgcagtggctgaagacacaaggaaataagcaaatgctttgcacgtgcctgggcaacggagtcagctgccaagagacagttgtaacccagacttacggtggcaactcaaatggagagccatgtgtcttaccattcacctacaatggcaggacgttctactcctgcaccacagaagggcgacaggacggacatctttggtgcagcacaacttcgaattatgagcaggaccagaaatactctttctgcacagaccacactgttttggttcagactcgaggaggaaattccaatggtgccttgtgccacttccccttcctatacaacaaccacaattacactgattgcacttctgagggcagaagagacaacatgaagtggtgtgggaccacacagaactatgatgccgaccagaagtttgggttctgccccatggctgcccacgaggaaatctgcacaaccaatgaaggggtcatgtacctcgncgctctagaactagt

SEQ ID NO: 8919 - DNA, 863 bp, Homo sapiens
  misc_feature 591, 653, 736, 746, 792, 797, 840, 863: n = A,T,C or G
acgagggccgctcggccgcgtggtgctggagctgaaggcagatgtcgtcccaaagacagctgagaacttcagagccctgtgcactggtgagaagggcttcggctacaaaggctccaccttccacagggtgatcccttccttcatgtgccaggcgggcgacttcaccaaccacaatggcacaggcgggaagtccatctacggaagccgctttcctgacgagaactttacactgaagcacgtggggccaggtgtcctgtccatggctaatgctggtcctaacaccaacggctcccagttcttcatctgcaccataaagacagactggttggatggcaagcatgttgtgttcggtcacgtcaaagagggcatggacgtcgtgaagaaaatagaatctttcggctctaagagtgggaggacatccaagaagattgtcatcacagactgtggccagttgagctaatctgtggccagggtgctggcatggtggcagctgcaaatgtccatgcacccaggtggccgcgttgggctgtcagccaaggtgcctgaaacgatacgtgtgcccactccactgtcacagtgtgcctgaggaangctgctagggatgttagacctcggccaggacccaccacattgcttcctaatacccacccttnctcacgacctcatttctgggcatctttgtggacatgatgtcacccaccccttgtcaagcattgcctgtgattgcccagcccanattcatctgngccttggacatggtgatggggatgggttgccatccaagtgaaagtnttttncttgaccaagggggacagtcagttttgcaaaaaggactctaanacctggttaaaattggccttccn

SEQ ID NO: 8920 - DNA, 871 bp, Homo sapiens
  misc_feature 4, 7, 8, 12, 18, 21, 24, 45, 746, 749, 768, 784, 802, 824,825, 837, 866: n = A,T,C or G
agcngtnntttncgcgcntanttnactactatagggcgaattggntctccccgcggtggcggcccgaggtaccggagacaggtgcagtccctcacctgtgaagtggatgcccttaaaggaaccaatgagtccctggaacgccagatgcgtgaaatggaagagaactttgccgttgaagctgctaactaccaagacactattggccgcctgcaggatgagattcagaatatgaaggaggaaatggctcgtcaccttcgtgaataccaagacctgctcaatgttaagatggcccttgacattgagattgccacctacaggaagctgctggaaggcgaggagagcaggatttctctgcctcttccaaacttttcctccctgaacctgagggaaactaatctggattcactccctctggttgatacccactcaaaaaggacacttctgattaagacggttgaaactagagatggacaggttatcaacgaaacttctcagcatcacgatgaccttgaataaaaattgcacacactcagtgcagcaatatattaccagcaagaataaaaaagaaatccatatcttaaagaaacagctttcaagtgcctttctgcagtttttcaggagcgcaagatagatttggaataggaataactctagttcttaacaacccgaccttctacaagatttagaaaaaagttacaacataatctagtttacagaaaaatcttgggctaaaataccttttaaangtntttgaatcttttaaactgnttttttttccacagtntccaccacttggtttggnttaaaaaattttggaaaacttnnaaaaaaaaaaanggaaaaaaaaaaaaaaaaaaacttacctngccct

SEQ ID NO: 8921 - DNA, 850 bp, Homo sapiens
  misc_feature 1, 3, 4, 7, 129, 675, 696, 733, 738, 755, 771, 780, 838,841, 850: n = A,T,C or G
ngnncgngccttgtgtcccccacgcgtccggtgaacataactgtaacatatatgaaaggcttctgggacttgaaatcaaatgtttgggaatggtgcccttggaggcaacctcccattttagatgtttanaggaccctatatgtggcattcctttctttaaactataggtaattaaggcagctgaaaagtaaattgccttctagacactgaaggcaaatctcctttgtccatttacctggaaaccagaatgattttgacatacaggagagctgcagttgtgaaagcaccatcatcatagaggatgatgtaattaaaaaatggtcagtgtgcaaagaaaagaactgcttgcatttctttatttctgtctcataattgtcaaaaaccagaattaggtcaagttcatagtttctgtaattggcttttgaatcaaagaatagggagacaatctaaaaaatatcttaggttggagatgacagaaatatgattgatttgaagtggaaaaagaaattctgttaatgttaattaaagtaaaattattccctgaattgtttgatattgtcacctagcagatatgtattacttttctgcaatgttattattggcttgcactttgtgagtattctatgtaaaaatatatatgtatataaaaatatatattgcataggacagacttangagttttggttagagcagttnacatctgaaggggctaatgccttaacttttgtaaggnactgnatccttaatatgtgggnaacccttttgcgtggnccctaagcntacaagggcactgaatcgttcatgtaagaatccaagtgggcaccattacaggctttgnaanatcctgtcn

SEQ ID NO: 8922 - DNA, 843 bp, Homo sapiens
  misc_feature 3, 4, 5, 6, 7, 8, 9, 10, 11, 12, 14, 614, 651, 654, 724,736, 746, 747, 761, 767, 811, 812, 813, 828, 829, 839, 841: n = A,T,C or G
agnnnnnnnnnngncgcgcgtaatacgactactatagggcgaattggagctccaccgcggtggcggccgaggtactccaggccgggactcaggttatcaaaagtgcaggagctctgatcagcatggaccacttcttccaaagaatttccctgctggccgtttgtaggggttgtggtaattctataaccagtaatgtctggggtggtgctcctctcccaggagactgtgagcactccagtgtcagggtttgcctccagatgcaagtttgttggtggagacaatggtgtcaccactttgtttacaattggcgcatctctttcctgtccatctctcaggacttggatggtgtagacgtattctactcctggagtcaagccggacacaacgatgcttcctgagtctgaagtcacttctcgtggtgcctctcctccctggcttggtcgtacctcggccgctctagaactagtggatcccccgggctgcaggaattcgatatcaagcttatcgataccgtcgacctcgagggggggcccggtacccaactttttgttccctttaatgagggttaattgcgcgccttggcgtaatcatggtcatagctggttcctgtgtgnaaattggtatccgcttacaaattccacacaacatacnaanccgggagcataaaggtgtaaaagcctgggggtgctaatgagtggactaacttacattaaatgccgttgcncctacttgcccnttttccaatnngggaaaacctgtcntgccancttcataattaaatcggccaaccccccggggggaggcggtttgnnnattgggcccttttcnntttcttgttnantt

SEQ ID NO: 8923 - DNA, 869 bp, Homo sapiens
  misc_feature 716, 762, 796, 823, 826, 830, 832, 836, 837, 838, 840, 842,843, 844, 845, 846, 855, 857: n = A,T,C or G
cggcgtatacgactactataggggcgaattggagctccccgcggtggcggccgaggtaccggagacaggtgcagtccctcacctgtgaagtggatgcccttaaaggaaccaatgagtccctggaacgccagatgcgtgaaatggaagagaactttgccgttgaagctgctaactaccaagacactttggccgcctgcaggatgagattcagaatatgaaggaggaaatggctcgtcaccttcgtgaataccaagacctgctcaatgttaagatggcccttgacattgagattgccacctacaggaagctgctggaaggcgaggagagcaggatttctctgcctcttccaaacttttcctccctgaacctgagggaaactaatctggattcactccctctggttgatacccactcaaaaaggacacttctgattaagacggttgaaactagagatggacaggttatcaacgaaacttctcagcatcacgatgaccttgaataaaaattgcacacactcagtgcagcaatatattaccagcaagaataaaaaagaaatccatatcttaaagaaacagctttcaagtgcctttctgcagtttttcaggagcgcaagatagatttggaataggaataagctctagttcttaacaacccgacacttctacaagaattagaaaaaagtttacaacataatctagtttacagaaaaatcttgngctagaatactttttaaaaggttttttgaatcttttaaaaacctgntttttttttcagcaggttccaccacttggttttnttcaataaatttttggaaaactccaanaanaaananaaannnanannnnngggttggcntnggccctttaaat

SEQ ID NO: 8924 - DNA, 886 bp, Homo sapiens
  misc_feature 13, 515, 565, 589, 595, 615, 665, 682, 690, 697, 699, 708,710, 713, 718, 720, 735, 736, 737, 757, 760, 761, 773, 778,781, 782, 783, 787, 793, 794, 800, 802, 811, 812, 813, 814,819, 821, 822, 828, 829, 833, 848, 849, 860, 861, 870: n = A,T,C or G
  misc_feature 871, 874, 875, 876, 882, 883, 884: n = A,T,C or G
agcctatcgacgncgcgcgtatacgactactatagggcgaattggagctccaccgcggtggcggcccgaggtacttctgtttaagccggtccatgagcaggccattccagggggcacacagcactccgaactgagtgaaggcaaaggcatttgtgtaggtgctgactcgtgccatgtccccaccggccatgttggtcagcaaggagttgagagtgccaatgaagaggtagtgccacaactgtatcacagacagccacaccaggtgccaggcaaagcgccgagagaaagcgtagctccagaaggagcggagttcctgcttctgccctgcccctggggtctcttccttcgctgaaaggaactcctttgactgtagctccctgttttcatgctcagctgtttccttctcttcctttgtggtgccattcccagggcacaggccatagctgtagttggggggcagtgggtatgggatgtgcccccggggcatcaggaggaaagtgcgtgctacatgccangtacctcggccgctctagaactagtggatcccccgggctgcaggaattcnatatcaagcttatcgataccgtcnacctcnagggggggcccggtacccancttttgttcctttaatgagggttaatttgccgccttggcgtaatcatggncatagctgtttcctgtntgaaaatngtatcgntnaaaattccnanaanatacnanccgggagcataaagnnnaaacctggggtgcctaatantgnnctaactcaattnattgngtnnnctcnttgccnntttcantnggaaacttnnnngccantnnattaannaatnggccaccccccgggnnaggcggtttgnnattggcccnnttnnnttcttnnnta

SEQ ID NO: 8925 - DNA, 863 bp, Homo sapiens
  misc_feature 735, 794, 796, 813, 818, 853, 854: n = A,T,C or G
attatcgactactatagggcgaattgggccctctagatgcatgctcgagcggcccgccagtgtgatggatatctgcagaattcgcccttagcgtggtcgcggccgaggtacagctgtctgcattgaaaattcatgcatggagaaagggagtaagcaagggagaaacggtgcgattcacatattccgcgagatcatcaagccagcagagaaatccctccatgaaaagttaaaacaagataagcgctttagcaccttcctcagcctacttgaagctgcagacttgaaagagctcctgacacaacctggagactggacattatttgtgccaaccaatgatgcttttaagggaatgactagtgaagaaaaagaaattctgatacgggacaaaaatgctcttcaaaacatcattctttatcacctgacaccaggagttttcattggaaaaggatttgaacctggtgttactaacattttaaagaccacacaaggaagcaaaatctttctgaaagaagtaaatgatacacttctggtgaatgaattgaaatcaaaagaatctgacatcatgacaacaaatggtgtaattcatgttgtagataaactcctctatccagcagacacacctgttggaaatgatcaactgctggaaatacttaataaattaatcaaatcatccaaattaagtttgtcgtggtagcaccttcaaagaaatccccgtgactgcctataagccaattnttaaaaaatccccaaaatcatttgatggagtgcctggtgggaaatactggaaaaagagncncgagaagaaccgaattnttaanggtctggaataaaatacacctaggattctactggnnggtggagat

SEQ ID NO: 8926 - DNA, 534 bp, Homo sapiens
  misc_feature 2, 5, 9, 473: n = A,T,C or G
gncgncgtngagctcccgcggtggcggccgaggtactcagaagtgtcctggaatggggcccatgagatggttgtctgagagagagcttcttgtcctacattcggcgggtatggtcttggcctatgccttatgggggtggccgttgtgggcggtgtggtccgcctaaaaccatgttcctcaaagatcatttgttgcccaacactgggttgctgaccagaagtgccaggaagctgaataccatttccagtgtcatacccagggtgggtgacgaaaggggtcttttgaactgtggaaggaacatccaagatctctggtccatgaagattgggggtgtggaagggttaccagttggggaagctcgtctgtctttttccttccaatcaggggctcgctcttctgattattcttcagggcaatgacataaattgtatattcggttcccggttccaggccagtaatagtagccctttgtnacaccagggcggggcccagggaccacttctttgggaggagacccaggcttcttatacttga

SEQ ID NO: 8927 - DNA, 883 bp, Homo sapiens
  misc_feature 613, 623, 638, 693, 697, 701, 734, 751, 758, 807, 810, 816,818, 821, 829, 833, 837, 838, 847, 862, 882, 883: n = A,T,C or G
tcgtcactcctatagggcgaattggagctcccccgcggtggcggccgaggtaccacatcttaaatactctccagtgttctgagtctattatgggaggagcagtctttgagacgctggaaggaaatacaattgagataggatgtgacggtgacagtataacagtaaatggaatcaaaatggtgaacaaaaaggatattgtgacaaataatggtgtgatccatttgattgatcaggtcctaattcctgattctgccaaacaagttattgagctggctggaaaacagcaaaccaccttcacggatcttgtggcccaattaggcttggcatctgctctgaggccagatggagaatacactttgctggcacctgtgaataatgcattttctgatgatactctcagcatggatcagcgcctccttaaattaattctgcagaatcacatattgaaagtaaaagttggccttaatgagctttacaacgggcaaatactggaaaccatcggaggcaaacagctcagagtcttcgtatatcgtacctcggccgctctagaactagtggatcccccgggctgcaggaattcgatatcaagcttatcgataccgtcgacctcganggggggcccngtcccagctttggtncctttaatgaggggtaattgccccgcctggccgtaatcatggccatagctggttnctgngtgnaaatggtatccctcacaatttcccacaacatcnaacccggagccttaagnggtaaanccggggtgcctatgagtggcctactcacattaattgcgttggctactgncgnttcaancnggnaaccttcngccnctgnntaatgaatnggccaccccccgggnaagcggttgctttgggcccnn

SEQ ID NO: 8928 - DNA, 706 bp, Homo sapiens
  misc_feature 2, 3, 5, 8, 10, 18, 23, 198, 561, 600, 615, 624, 641, 653,667, 679, 697, 706: n = A,T,C or G
cnntnccnanctgttgcncacgnctacttccctacttttccttctggtccagggccagctcttccgaggctccagcctgcttttccgccgggtgtcatcaggatcatgctttgccctggagtaacctgaatcatctaaaaaacacggtctcaacctggccaccgtgggtgaggcctgaccaccttgggacacctgcangacgactccaacccaacaacaaccagatgtgctccagcccagccgggcttcagttccatatttgccatgtgtctgtccagatgtggggttgagcgggggtggggctgcacccagtggattgggtcacccggcagacctagggaaggtgaggcgaggtggggagttggcagaatccccatacctcgcagatttgctgagtctgtcttgtgcagagggccagagaatggcttatgggggcccaggttggatggggaaaggctaatggggtcagaccccaccccgtctacccctccagtcagcccagcgcccatcctgcagctcagctgggagcatcattcttctgctttgtcatagggtgtggtnccctggacgtggccaccatcatgtctaggcctatgctangaggcaaatggccanctctgctgnggtttctaacactactnttctgatatganggcaacacctgctntgatgggaaatnatcaactacctcaaatgngtcttctcn

SEQ ID NO: 8929 - DNA, 877 bp, Homo sapiens
  misc_feature 23, 25, 399, 408, 497, 522, 553, 560, 568, 590, 591, 593,632, 647, 669, 686, 692, 706, 712, 716, 725, 733, 745, 761,770, 816, 820, 823, 824, 827, 829, 836, 841, 844, 852: n = A,T,C or G
cccccccctttaacgcccatttnantactctagggcgaattgtttctccccgcggtggcggccgaggtactgaggaatgaatagaaaggcttccagatgtctaaaagattttttaaactactgaactgttacctaggttaacaaccctgttgagtatttgctgtttgtccagttcaggaatttttgttttgttttgtctatatgtgcggcttttcagaagaaatttaatcagtgtgacagaaaaaaaaatgttttatggtagcttttactttttatgaaaaaaaaattatttgccttttaaattcttttcccccatccccctccaaagtcttgatagcaagcgttattttgggggtagaaacggtgaaatctctagcctctttgtgtttttgttgttgntgatgttgntgttttatataatgcatgtattcactaaaataaaatttaaaaaactcctgtctttgctagacaaggttgctgttgtgcagtgtgcctgncactactggtctgtacctcggccgntctagaactagtgggatcccccgggctgcangaattcnatatcaangcttatcgatacccgctacctnnangggggggccccggtacccaacttttgttcccctttaagnggaggggttaaattnccccccttgggcgtaaacaatngggccatagctggtttncttggngggaaaatttggtnatcccnttcncaatttccncacaaccntaccaagcccgngtagcaataaagtggnaaaagcctnggggggccttaaatggaggggggccaaacctcaccattaattgggntgcnccnnctngnccccttntccantcnggaaaacnttccggcccccttgcattaatggat

SEQ ID NO: 8930 - DNA, 713 bp, Homo sapiens
  misc_feature 688: n = A,T,C or G
ggcgcgcgtaatacgactcactataggggcgaattggagctccaccgcggtggcggccgaggtacaacttcattgaactgccctaccacggggaaagcatcagcatgctgattgcactgccgactgagagctccactccgctgtctgccatcatcccacacatcagcaccaagaccatagacagctggatgagcatcatggtgcccaagagggtgcaggtgatcctgcccaagttcacagctgtagcacaaacagatttgaaggagccgctgaaagttcttggcattactgacatgtttgattcatcaaaggcaaattttgcaaaaataacaaggtcagaaaacctccatgtttctcatatcttgcaaaaagcaaaaattgaagtcagtgaagatggaaccaaagcttcagcagcaacaactgcaattctcattgcaagatcatcgcctccctggtttatagtagacagaccttttctgtttttcatccgacataatcctacaggtgctgtgttattcatggggcagataaacaaaccctgaagagtatacaaaagaaaccatgcaaagcaacgactactttgctacgaagaaagactcctttcctgcatctttcataagttctggtaaatatttttgtacctcggccgctctagaactagtgggatcccccgggctgcaggaattcnatatcaagcttatcgataccgtcca

SEQ ID NO: 8931 - DNA, 838 bp, Homo sapiens
  misc_feature 1, 2, 3, 4, 5, 6, 7, 695, 701, 747, 805, 812, 816: n = A,T,C or G
nnnnnnncgctatacgactcactataggggcgaattggagctccaccgcggtggcggcccgaggtacatcatttcatgtcatcctgttggcactgatgaagaacccttacagttcagggttcctggaacttctaccagtgccactctgacaggcctcaccagaggtgccacctacaacatcatagtggaggcactgaaagaccagcagaggcataaggttcgggaagaggttgttaccgtgggcaactctgtcaacgaaggcttgaaccaacctacggatgactcgtgctttgacccctacacagtttcccattatgccgttggagatgagtgggaacgaatgtctgaatcaggctttaaactgttgtgccagtgcttaggctttggaagtggtcatttcagatgtgattcatctagatggtgccatgacaatggtgtgaactacaagattggagagaagtgggaccgtcagggagaaaatggccagatgatgagctgcacatgtcttgggaacggaaaaggagaattcaagtgtgaccctcatgaggcaacgtgttatgatgatgggaagacataccacgtaggagaacagtggcagaaggaatatctcggtgccatttgctcctgcacatgctttggaggccagcggggctggcgctgtgacaactgccgcaaacctgggggtgaacccagtnccgaangcactactggccagtcctacaaccagtattttcagaaataccatcngaagaacaaaccctaatgttaattgcccaattgagtgccttcatgcctttaaatgtancctcggnccgntttaaaactaagtggatccccc

SEQ ID NO: 8932 - DNA, 896 bp, Homo sapiens
  misc_feature 2, 3, 4, 5, 6, 10, 637, 708, 724, 750, 794, 807, 841, 857,867, 894: n = A,T,C or G
gnnnnnggcncgcgtaatacgactcactatagggcgaattggagctccccgcggtggcggccgaggtactgtggatatttaaaatatcacagtaacaagatcatgcttgttcctacagtattgcgggccagacacttaagtgaaagcagaagtgtttgggtgactttcctacttaaaattttggtcatatcatttcaaaacatttgcatcttggttggctgcatatgctttcctattgatcccaaaccaaatcttagaatcacttcatttaaaatactgagcggtattgaatacttcgaagcagaacaggcaatgtgcagccctcatttatgagaaaaccctcaggaaactcccagggtgatgcttggagaagctgtgagttgagctgaagctggagaacttcctccagagcaaagggcttaagaaagaaagaagaactctaagctgggtctgctaacatcactccagtttagatggatcttggcagagagacatgcttgttcctctggattggaaagatgatttactctcgggaatcttctctgtcagcctgtacctcggcccgctctagaactaagtggatcccccgggctgcaggaattcgatatcaagcttatcgataccgtcgaccctcgangggggggccccggtacccaagcttttgttccctttagtgagggttaattgcgcgcttggcgtaatcatggncatagctgtttcctgngtgaaattggtatccgctcacaattncacacaacataccagcccggaaccataaagtgtaaagcctgggngccctaatgaggngactacctcccattaattggcgtgggctcactgncccttttccagccggnaaccctgccngcccacttgattaatgaatcggccacncc

SEQ ID NO: 8933 - DNA, 895 bp, Homo sapiens
  misc_feature 551, 595, 627, 664, 665, 668, 724, 746, 753, 767, 768, 796,800, 812, 817, 825, 846, 849, 851, 878, 879, 895: n = A,T,C or G
gcgtaatacgactcactataggggcgaattggagctccccgcggtggcggcccgaggtactgtggatatttaaaatatcacagtaacaagatcatgcttgttcctacagtattgcgggccagacacttaagtgaaagcagaagtgtttgggtgactttcctacttaaaattttggtcatatcatttcaaaacatttgcatcttggttggctgcatatgctttcctattgatcccaaaccaaatcttagaatcacttcatttaaaatactgagcggtattgaatacttcgaagcagaacaggcaatgtgcagccctcatttatgagaaaaccctcaggaaactcccagggtgatgcttggagaagctgtgagttgagctgaagctggagaacttcctccagagcaaagggcttaagaaagaaagaagaactctaagctgggtctgctaacatcactccagtttagatggatcttggcagagagacatgcttgttcctctggattggaaagatgatttactctcgggaatcttctctgtcagcctgtaccttnggcccgctctagaactagtggatcccccgggctgcaggaattcnatatcaagcttatcgataccgccaccctcgangggggggccccggtacccaacttttggtcccctttannganggttaattggcgcccttgggcggaaatcattgggcaatagcttgtttccctggggngaaattggttattcccttaccnatttccncacaaccataccanncccgggagccataaagggtaaaagcctngggngcctaaaggagngagcnaacctccnatttaatggcgttgcgcctcnctngnccgctttccagtccgggaaaaccttcnngccccctgcattaatn

SEQ ID NO: 8934 - DNA, 887 bp, Homo sapiens
  misc_feature 4, 5, 7, 9, 672, 682, 692, 702, 718, 735, 766, 781, 784,794, 795, 834, 855, 860, 873, 874, 887: n = A,T,C or G
agcnntntngacgcgcgtaatacgactactatagggcgaattggagctccaccgcggtggcggccgaggtactcagaagtgtcctggaatggggcccatgagatggttgtctgagagagagcttcttgtcctacattcggcgggtatggtcttggcctatgccttatgggggtggccgttgtgggcggtgtggtccgcctaaaaccatgttcctcaaagatcatttgttgcccaacactgggttgctgaccagaagtgccaggaagctgaataccatttccagtgtcatacccagggtgggtgacgaaaggggtcttttgaactgtggaaggaacatccaagatctctggtccatgaagattggggtgtggaagggttaccagttggggaagctcgtctgtctttttccttccaatcaggggctcgctcttctgattattcttcagggcaatgacataaattgtatattcggttcccggttccaggccagtaatagtagcctctgtgacaccagggcggggccgagggaccacttctctgggaggagacccaggcttctcatacttgatgatgtaacccggtaatcctggcaccgtggcggctgccatgataccagcaaggaattgggtgtggtggccaggaaacgcaggttggatggtgcatcaatggcantggagcgtcnatgaccacangggagccccnagcttgtcattcaagnggacctcggccgtctanaactatggatcccccgggctggaggaattcnatatcaagcttatcnatnccgtcacctnnagggggggcccggtccccacttttgttccctttaatgangggtaaattgcccgcttggcntaatnatgggcatagctnnttcctgggtgaan

SEQ ID NO: 8935 - DNA, 866 bp, Homo sapiens
  misc_feature 2, 4, 5, 8, 21, 23, 711, 820, 838, 866: n = A,T,C or G
gngnnctntacgacttactantnactatagggcgaattggagctccaccgcggtggcggcccgaggtacacagtcagtgtggttgccttgcacgatgatatggagagccagcccctgattggaacccagtccacagctattcctgcaccaactgacctgaagttcactcaggtcacacccacaagcctgagcgcccagtggacaccacccaatgttcagctcactggatatcgagtgcgggtgacccccaaggagaagaccggaccaatgaaagaaatcaaccttgctcctgacagctcatccgtggttgtatcaggacttatggtggccaccaaatatgaagtgagtgtctatgctcttaaggacactttgacaagcagaccagctcagggtgttgtcaccactctggagaatgtcagcccaccaagaagggctcgtgtgacagatgctactgagaccaccatcaccattagctggagaaccaagactgagacgatcactggcttccaagttgatgccgttccagccaatggccagactccaatccagagaaccatcaagccagatgtcagaagctacaccatcacaggtttacaaccaggcactgactacaagatctacctgtacctgcccgggcggccgctctagaactagtggatcccccgggctgcaggaattcgatattaagcttatcgatccgtcgacctcganggggggcccggtcccacttttgttcctttatgagggttaattgccccttggcgtatatggcatactggttctggggaaatgtatccgttacaattcccacaacatacanccggacataagtgtaaanctgggtgctatgaggggctactacattn

SEQ ID NO: 8936 - DNA, 658 bp, Homo sapiens
  misc_feature 2, 3, 4, 5, 6, 7, 8, 11, 14, 16, 17, 18, 25, 26, 46: n = A,T,C or G
gnnnnnnnggnatngnnntctattnngccccggcaggatgagattnagaatatgaaggaggaaatggctcgtcaccttcgtgaataccaagacctgctcaatgttaagatggcccttgacattgagattgccacctacaggaagctgctggaaggcgaggagagcaggatttctctgcctcttccaaacttttcctccctgaacctgagggaaactaatctggattcactccctctggttgatacccactcaaaaaggacacttctgattaagacggttgaaactagagatggacaggttatcaacgaaacttctcagcatcacgatgaccttgaataaaaattgcacacactcagtgcagcaatatattaccagcaagaataaaaaagaaatccatatcttaaagaaacagctttcaagtgcctttctgcagtttttcaggagcgcaagatagatttggaataggaataagctctagttcttaacaaccgacactcctacaagatttagaaaaaagtttacaacataatctagtttacagaaaaatcttgtgctagaatactttttaaaaggtattttgaatactattaaaactgctttttttttccagcaagtatccaacccacttgggtctgcttcaataaatctttggaaaact

SEQ ID NO: 8937 - DNA, 613 bp, Homo sapiens
  misc_feature 2, 3, 4, 5, 11, 15, 19, 20: n = A,T,C or G
annnntttatnattnaatnngtacccagctcggatccctagtaacggccgccagtgtgctggaattcggctttcgagcggccgcccgggcaggtacatgacctggacaaattacctccacgggaaggcttcctagagagcttcaaaaaaggctggaaaaatgctgaaatgacgcgtcagctgcgagagcgtgaacaacgcatgcggaatcagttggagctagcagccaggggtcctttacgacagacctttacccacaaccctcccctacaacctggaaaggataaccctcccaatatccctagcagcagcagcagcaaaccaaagtcaaagtatccctggcacgacacacttggctgacttatgttctgtgcgcattctggcaggaattctgtctcttcagagactcatcctcaaaacaagacttgacactgtgtccttgccccagtcctaggaactgtggcacacagagatgttcattttaaaaacggatttcatgaaacactcttgtacctcggccgcgaccacgctaagccgaattctgcagatatccatcacactggcggccgctcgagcatgcatctagagggcccaattcgccctatagtgagtcg

SEQ ID NO: 8938 - DNA, 755 bp, Homo sapiens
  misc_feature 2, 3, 4, 7, 12, 14, 16, 19, 20, 23, 605, 679, 717, 723: n = A,T,C or G
gnnncgntatcnantnctnnctnactatagggcgaattggagctccaccgcggtggcggcccgaggtacaccttgaatgacaatgctcggagctcccctgtggtcatcgacgcctccactgccattgatgcaccatccaacctgcgtttcctggccaccacacccaattccttgctggtatcatggcagccgccacgtgccaggattaccggctacatcatcaagtatgagaagcctgggtctcctcccagagaagtggtccctcggccccgccctggtgtcacagaggctactattactggcctggaaccgggaaccgaatatacaatttatgtcattgccctgaagaataatcagaagagcgagcccctgattggaaggaaaaagacagaccagctttcccaactggtaacccttccacaccccaatcttcatggaccagagatcttggatgttccttccacagttcaaaagacccctttcgtcacccaccctgggtatgacactggaaatggtattcaagcttcctggcacttctggtcagcaacccagtgttgggcaacaaatgatctttgaggaacatggttttaggcggaccacaccgnccacaacggccacccccataaggcataggccaagaccatacccgccgaatgtaggacaagaagctctctctcanacaaccatctcatgggccccattccaggacactttgantacctnggcccgctctagaactagtggatcccccggct

SEQ ID NO: 8939 - DNA, 1087 bp, Homo sapiens
  misc_feature 4, 6, 7, 8, 9, 10, 11, 12, 13, 15, 17, 18, 19, 20, 21, 22,23, 24, 25, 26, 27, 28, 29, 30, 31, 32, 33, 34, 35, 36,37, 38, 41, 43, 44, 45, 46, 47, 48, 49, 50, 51, 52, 53,54, 55, 56, 57, 58, 59, 60, 61, 62, 64, 65, 66, 69, 70,72: n = A,T,C or G
  misc_feature 74, 76, 77, 78, 79, 80, 81, 82, 83, 84, 85, 86, 87, 88, 89,90, 91, 92, 93, 94, 96, 97, 98, 100, 102, 108, 109, 110,111, 114, 121, 202, 207, 208, 223, 246, 481, 525, 615, 635,669, 670, 743, 803, 858, 875, 883, 894, 927, 940, 968: n = A,T,C or G
  misc_feature 979, 983, 986, 995, 1002, 1008, 1035, 1038, 1042, 1045, 1060,1065, 1066, 1067, 1070, 1074, 1076, 1078: n = A,T,C or G
ccancnnnnnnnntntnnnnnnnnnnnnnnnnnnnnnnttncnnnnnnnnnnnnnnnnnnnntnnnttnngnangnnnnnnnnnnnnnnnnnnntnnngntnggggannnnatngcgactnactatagggcgaattggagctccaccgcggtggcggccgcccgggcaggtacagaagagatgaaattgcatccaaacatgntaatnnttagctccactgggncattctttgattgatgtcctatnctcataagcaagcgttcaaagcgagttcctgttttctgtaaaacctgttttccttcaacattggatcccaagattccaactgtgtctacagctacaccaatcatagtggggtcctgactttctatcatttcaaagactttttccacaaagataggataacgctcacagatctgttgagggactatccatggacagccaggtttccaaaaaacttcaccgaatcctggcagatagnaagctagagaaagggtctgaatctgccccaacaattatattagnaaattttggtcaaatttactccttcttggagccaaggatattgtccgccccatggatgagtatattacccagtggatgtcacccattttnttatacagggtgggctcttnacccaacacatccttcaccagtcagctctctcanngagcctggggttaccaaatccacttgtgggtaccttcggccgctcttagaactaggtgggatcccccccgggnctggcagggaaatttccgatattcaaagcctttttcggattacccgtccggacccttctnaagggggggggcccccgggtaccccaaacttttttggtttccccttttaagtggnggggtttaatttggcgncgcctttngggcggtaaantccatggggccattaggcttggttttccctggnggtggaaaaattngttattcccgcttcaccaaatttcccancaccaaacaanaccnagncccgggggngccattnaaaagnggtaaaaagccctggggggggggcccnaantggnggnggggcctaactcccnatttnnnttngggngngnggccccccc

SEQ ID NO: 8940 - DNA, 490 bp, Homo sapiens
  misc_feature 1, 6, 9, 11, 18: n = A,T,C or G
ngcgcnatntngacatanttgtgggctgattggagctccaccgcggtggcggccgaggtacagaatcatattctaagattatgtgcaaatatatgtgtagaaagaggcatttaaaaaaagaggcaggagattgagaagagacatattgaatgaggcactaatctttagaaaaatgatcttttactgaatcaagccatgctcattccttgctgaatccaacagccccaaatctcttttcttatatttggctgttaatttttttccttgcaccatcctagattgttaacaaccattgcacagttggctcatgtatccttacactctgagttataataagttgtatttttataaacaaatacctaaatattcaagttttaaggcgcatggaaactgaatctaggcaacgggtgatttgtgtagcttacaacctgaacagcaagatgttccaattcattctaacagatgtgtataagcacaagttatatcagct

SEQ ID NO: 8941 - DNA, 657 bp, Homo sapiens
  misc_feature 582, 622, 645, 646, 651: n = A,T,C or G
gattgaatacgactcctatagggcgaattgggccctctagatgcatgctcgagcggccgccagtgtgatggatatctgcagaattcggcttagcgtggtcgcggccgaggtacaaaaagaaaaccatttcttttctctttttcccccagcatcatgcaaggcaaggcaacaccacaaatacaataactgaatttactttgattatactttagtttcttacacttaaaattattttgtattataatacttacttggttatctaaaatcaacattgttgattttaaacggttataaagccagactttaagaagcatttaaaacaattcatgaactctgtatgaaaggaaataattgcctccagcttattcttttgcatttgaagtaaaagaatttccagtatcatcagtttactagaaaataagacttagggggtccatataatttattcacatctttttatacatcgtaaacaaggataggatacttctgacagtagcctataaagattttttaaaatttatccttcagtatagaataagtgtcaaggggagcactttaagcatgattcttggtagggtctgntaaggagtctattttccagaaaaattttgtaggaaattgntctgattttaaataaactaaatnnaaganttgggg

SEQ ID NO: 8942 - DNA, 620 bp, Homo sapiens
  misc_feature 9, 13, 17, 25, 37, 108: n = A,T,C or G
cttgttcantttnaggntttccagnatgcatttaagnatacacaatgccatcacagtacacatgaacaaggccagtcctccatttcctcttatctccaacgcacaagnatcttgctcaagaggtacaaactgttttgaagccagttcatcataaggaaggacaagaactaactgctttgctgaatactccacatattcaggcacttttactggcccacgataaggttgctgagcaggaaatgcagctagagcccattacagatgagagagtttatgaaagtattggccagtatggaggagaaactgtaaaaatagttcgtatagaaaaggctcgtgatattccgttgggtgctacagttcgtaatgaaatggactctgtcatcattagccggatagtaaaagggggtgctgcagagaaaagtggtctgttgcatgaaggagatgaagttctagagattaatggcattgaaattcgggggaaagatgtcaatgaggtttttgacttgttgtctgatatgcatggtactttgacttttgtcctgattcccagtcaacagatcaagccgcctcctgccaaggaaacagtaatccatgtaaaagctcattttgactatgacccc

SEQ ID NO: 8943 - DNA, 657 bp, Homo sapiens
  misc_feature 83, 657: n = A,T,C or G
tcactatagggcgaattggagctccaccgcggtggcggccgcccgggcaggtacacaggtaaccacatttagatggactgggnatgttgccacacatacaagcattgataactggcttctcattacctgaatacattcttctgtcagagcaacagactcagctatgcttctggcaaaattgttcttaattctctattgattaatttattcggtaagtatttattgggtattttctgtctgaaaagtgcgattccaggtgctttatgtgtctctgtgtgtgggtgttatataaatacttataatactgtatccatactcttgaaaagcttagttgggaaggcaaggcatgcaataaggaacacagaattttagtcattccacaaccatctgttgaatggctgctattgttagtatcgtggtggaaactgagaagcaaagatgactataataggatctcttttctggagatgcacagtggacacgtagttatatgatgatgataaggactccagaatagttctatacatgatgctctggggccacatgcagattctgatgagaaacaattaactctttttggctgctacctgagaaggggtaattgtcactcaggagggttttgccttttgaccaacatagaaaggagtgtgagtgaan

SEQ ID NO: 8944 - DNA, 744 bp, Homo sapiens
  misc_feature 6, 559, 560, 561, 562, 563, 564, 565, 566, 567, 568, 569,570, 571, 572, 573, 574, 575, 576, 577, 578, 579, 580, 581,582, 583, 584, 585, 586, 587, 588, 589, 590, 591, 592, 593,594, 595, 596, 597, 598, 599, 600, 601, 602, 603, 604: n = A,T,C or G
  misc_feature 605, 606, 607, 608, 609, 610, 611, 612, 613, 614, 615, 616,617, 618, 619, 620, 621, 622, 623, 624, 625, 626, 627, 628,629, 630, 631, 632, 633, 634, 635, 636, 637, 638, 639, 640,641, 642, 643, 644, 645, 646, 647, 648, 649, 650, 651: n = A,T,C or G
  misc_feature 652, 653, 654, 655, 656, 657, 658, 659, 660, 661, 662, 663,664, 665, 666, 667, 668, 669, 670, 671, 672, 673, 674, 675,676, 677, 678, 679, 680, 681, 682, 683, 684, 685, 686, 687,688, 689, 690, 691, 692, 693, 694, 695, 696, 697, 698: n = A,T,C or G
  misc_feature 699, 700, 701, 702, 703, 704, 705, 706, 707, 708, 709, 710,711, 712, 713, 714, 715, 716, 717, 718, 719, 720, 721, 722,723, 724, 725, 726, 727, 728, 729, 730, 731, 732, 733, 734,735, 736, 737, 738, 739, 740, 741, 742, 743, 744: n = A,T,C or G
ctatanggcgaattgggccctctagatgcatgctcgagcggccgccagtgtgatggatatctgcagaattcgccctttcgagcggccgcccgggcaggtacgcgggacacattcagaggtgagcccagagcgggtaaagtggactggggagaacttcggaggatgttcatgtccaggagcagccccacgccctgtatggtcggtgtctagagcctcacagcaactaagaccaacccagctctcagaagaaggaatgtcaaaatgtcatgttcaattttacattcagtgcctggaatcttttcttcacaattgaaatgaaatgtgctgaaggaggtgaatccatgcattaatcttcagctcacaaaggaaatactacataagaagcaagaccacagactcaagacggacataattggattttttttgccatggcctggaaagaaaggtacctcggccgcgaccacgctaagggcgaattccagcacactggcggccgttactagtggatccgagctcggtaccaagcttggcgtaatcatggtcatagctgttttctggnnnnnnnnnnnnnnnnnnnnnnnnnnnnnnnnnnnnnnnnnnnnnnnnnnnnnnnnnnnnnnnnnnnnnnnnnnnnnnnnnnnnnnnnnnnnnnnnnnnnnnnnnnnnnnnnnnnnnnnnnnnnnnnnnnnnnnnnnnnnnnnnnnnnnnnnnnnnnnnnnnnnnnnnnnnnnnnnnnnnnnnnnn

SEQ ID NO: 8945 - DNA, 662 bp, Homo sapiens
  misc_feature 41, 86, 557, 583, 641, 643, 650, 654, 656: n = A,T,C or G
ttgtataccgactcactatagggcgaattgggccctctagntgcatgctcgagcggccgccagtgtgatggatatctgcagaattngccctttcgagcggccgcccgggcaggtactacaaagcatatctgaaaggaaagattgagcgcaccaactatttgcagaaacgagctgcagccattcaattacaagctgcttttaggagactgaaagctcataatttatgtagacaaattagggctgcttgtgttattcagtcatactggagaatgagacaagacagagttcgatttttaaaccttaagaagactattatcaaatttcaggcacatgtaagaaaacatcaacaacgacagaaatataagaagatgaagaaagcagctgttataattcagactcatttccgagcttatatttttgccatgaaagttctagcatcttaccagaaaacacgctctgctgtcattgtgctgcagtctgtatatagagggatgcaagccaggaaaatgtatattcacatcctcacatctgttataaagattcaatcatattatcgngcttatgtttctaaaaagaatttttngagccctaaaaaatgctacaataaaattgcagtcacttgttaagatgaaacaaacacntnaaccatntttncntttaag

SEQ ID NO: 8946 - DNA, 597 bp, Homo sapiens
  misc_feature 12, 23, 24, 25, 26, 32, 37, 54, 57, 62: n = A,T,C or G
tgggtaccgggnccccccctcgnnnntacttnctagnattaattaacgcggggnagnaaagnaacaacacatttcaaaatgtaaaaaggcatttcgtgaaggatctaggaagtcatcaagagttaagggttcagctccagagattgatccttcatctgatggttcaaattttggatgggagacaaagatcaaagcatggatggatcgatatgaagaagcaaataacaaccagtacagtgagggtgttcagagggaggcacaaagaatagctctgagattaggcaatggaaatgacaaaaaagagatgaataaatccgatttgaataccaacaatttgctcttcaaacctcctgtagagagccatatacaaaagaataagaaaattcttaaatctgcaaaagatttgcctcctgatgcacttatcattgaatacagagggaagtttatgctgagagaacagtttgaagcaaatgggtatttctttaaaagaccatacccttttgtgttattctactctaaatttcatgggctagaaatgtgtgttgatgcaaggacttttgggaatgaggctcgattcatcaggcggtcttgtacacc

SEQ ID NO: 8947 - DNA, 382 bp, Homo sapiens
  misc_feature 171, 212, 248, 255, 306: n = A,T,C or G
cgcgtaatacgactcactatagggcgaattggagctccaccgcggtggcggccgcccgggcaggtacagcaaaacccacctgtgtaaacacacacagcaaagtgatgtaagaagtttccatataaagggctgcagtatggagaggtaatgtgcaggctggtttgcggctgnaggggccaccttgctgcagctctccactgatatggtacctnggccgctctagaactagtggatcccccgggctgcangaattcnatatcaagcttatcgataccgtctgacctcgagggggggcccggtacccancttttgttccctttagtgagggttaattgcgcgcttggcgtaatcatggtcatagctgtttcctgtgtgaaattgt

SEQ ID NO: 8948 - DNA, 427 bp, Homo sapiens
gagccccgcgtaataccgactcactatagggcgaattggagctccaccgcggtggcggccgcccgggcaggtactggccacgactgcatgcccgcgcccgccaggtgatacctccgccggtgacccaggggctctgcgacacaaggagtctgcatgtctaagtgctagacatgctcagctttgtggatacgcggactttgttgctgcttgcagtaaccttatgcctagcaacatgccaatgtaagtgccttcagcttgtttgggggagactgggtagagaggttagatgggagggcaccctgccctgaaaaggaaaacctgtaacctgaattccaggtacctcggccgctctagaactagtggatcccccgggctgcaggaattcgatatcaagcttatcgataccgtcgacctcgagggggggccc

SEQ ID NO: 8949 - DNA, 633 bp, Homo sapiens
  misc_feature 615: n = A,T,C or G
gactcacttagggcgaattggactccaccgcggtggcggccgcccgggcaggtacggaagaacatgggagtctgtatgcagcacgacgtcttgttcagttacctcactactaaggagcaccttctcctatatggttccatcaaagttcctcactggactaaaaagcagctccacgaggaagtaaaaaggactttaaaagatactggactatatagccatcgtcataagagagttggaacactgtcaggaggcatgaagaggaagttatctatatccatagctctcattggtggatcaagggtagtaattttggatgaaccatctactggagttgacccatgttctcgccgaagtatatgggatgttatatccaagaacaaaactgccagaacaatcattctgtcaacgcaccacttggacgaggctgaagtgctgagtgaccgcatcgccttcctggagcagggtgggcttaggtgctgtgggtccccattttacctcaaggaagcctttggcgatgggtatcacctcacgcttaccaagaagaagagtccaaatttaaatgcaaatgcagtatgtgacaccatggccgtgacagcaatgatccaatcacatctncccgaagcctacctcaag

SEQ ID NO: 8950 - DNA, 507 bp, Homo sapiens
  misc_feature 3, 4, 459, 506: n = A,T,C or G
gtnngaattgtaatacgactcactatagggcgaattgggccctctagatgcatgctcgagcggccgccagtgtgatggatatctgcagaattcgccctttcgagcggccgcccgggcaggtacgcgggggacattcagaggtgagcccagagggggtaaagtggactggggagaacttcggaggatgttcatgtccaggagcagccccacgccctgtatggtcggtgtctagagcctcacagcaactaagaccaacccagctctcagaagaaggaatgtcaaaatgtcatgttcaattttacattcagtgcctggaatcttttcttcacaattgaaatgaaatgtgctgaaggaggtgaatccatgcattaatcttcagctcacaaaggaaatactacataagaagcaagaccacagactcaagacggacataattggattttttttgccatggcctgnaaagaaaggtacctcggccgcgaccacgctaagggcgaattccagcnt

SEQ ID NO: 8951 - DNA, 840 bp, Homo sapiens
  misc_feature 3, 4, 6, 7, 8, 9, 24, 27, 37, 63, 75, 85, 486, 497, 513,521, 525, 529, 534, 537, 543, 559, 588, 589, 602, 626, 627,628, 638, 641, 642, 646, 662, 666, 676, 681, 682, 683, 687,691, 701, 708, 718, 721, 733, 737, 742, 746, 747, 757: n = A,T,C or G
  misc_feature 758, 778, 779, 780, 786, 787, 789, 790, 791, 792, 795, 804,815, 821, 826, 827, 830, 834, 837: n = A,T,C or G
ggnngnnnnttgagaactttaacnacnactattagtngaatggggccctctagatgcatgctngagcggccgccngtgtgatggntatctgcagaattcgcccttagcgtggtcgcggccgaggtacagttccatctttggccataaggagacaatgatgtcaagaggctaaggccatatgatctgtaggtgaaaaacctgggatgagaatcaaggcctcaaactttttccactacatcacagatttaggagcagttagagggaaggcttcaatctggagaacactaacaggctctagagattattgggtcatggtggctgggacagaaataaggattcacagaaagatgtttgttgtcaatgttcttttacagtaaatgttcttttgagattttgcttgataaaaaggttgagcagaagtgaaaaaaatttttttctttttttctttctttttcttttctttttgcttttttttttttaaaacantttcctttttnttccccaggctggagngcaagggngcantttnggttnacnaaaacnttcccccccagggttnaagcaattttgcctaacctccccaagtannttggattacaggnggcccccccccccccccgggaaannntttttttttnggnntttnaaaaaaaaaggggggncccncttttggggnagggnnntttnaaanccccaccccngggggancccccccaanggngggggaaaaaangggntaaancccnnaaaccggggnnaaaaaaaaaatttttatttnnntttttnnannnnttntgggttggnaaaaaaaattnggggangggtnnttntaanggnttt

SEQ ID NO: 8952 - DNA, 594 bp, Homo sapiens
  misc_feature 2, 3, 8, 91, 99, 111, 130, 131, 152, 156, 157, 165, 221,224, 225, 226, 227, 250, 252, 253, 254, 256, 262, 268, 276,277, 283, 288, 289, 301, 302, 305, 306, 308, 309, 310, 312,315, 325, 326, 345, 350, 353, 359, 363, 371, 372, 375: n = A,T,C or G
  misc_feature 392, 398, 399, 400, 411, 454, 455, 458, 459, 460, 463, 470,479, 483, 484, 491, 494, 502, 503, 507, 512, 521, 525, 532,533, 536, 546, 550, 564, 569, 574, 578, 586, 587, 588, 591,593, 594: n = A,T,C or G
gnnaagtnccctatacgactactatagggcgaattggagctccccgcggtggcggccgcccgggcaggtacgcggggaggtggtggcgaancgctcctncgaaaggtttcngaagctggtggtagctagnnaagataacgctgcgttagggnatanngctttttnatgatggaactccgattgaaagcaagttgctggagtggagttctgaatttcaaacnaannnntaaattttttaaaattataaatngnnntnaaaaangggttnttttcttnnaataanattgnntttaaaaaatgnntcnnannnanaanaataatttannaggatgggtatcgaaagcnataanganctcatngtantgtgtgannttnatgccccttctaaattnttcaannnactttttttgnaagggccttaattcattgcaataattcaactcttttaatggtnnatnnnaanttttttnatgaacacnattnntttgtancanactatttnngttnaaaanatcattctnttgntttttannttnacataaatcnattnaaaatacaaaaatntaatntattntggncattttgnnntancnn

SEQ ID NO: 8953 - DNA, 648 bp, Homo sapiens
  misc_feature 2, 4, 631: n = A,T,C or G
gngngacggtccgcgttaagtgaggaagaacatgacattgtcacagcaactgcccagccaaggctgtacaaagctggaaacttgggtcacagtgcaccggcaggcatcactcgtgacaggtggaacaacagtggaaatgcagagtggctcaaggagcctggtcacgcgccaatggctcagcccccctcttccactgcggaggacctgcctatctcatctcttctcagcctcttagcttactgcttttattttgtgtttttcctgtcttatgcaaaacttacgtgtctgttgactctgtattcagccttcctaagagaggacctgattggttttgcctagtgacaacttcatgtagtatgcccctttgggcagagctgccaggtcacatcatcagcttctggctattttgaaaatgtctaccttacctttgcatcagttgctgatttttaattctcttagctgtgctcagagtagtgaagtcatgtgctataaaagcatggcaacccatggttaagtaccatctgcagcaccttttccaaaggtcctgtgtatgtagtaggaactgttattatctacattttacaggagagaaaagctgagggtgagtgatttgcccacaagtgggtccagnctaatatgctcaaggaa

SEQ ID NO: 8954 - DNA, 761 bp, Homo sapiens
  misc_feature 9, 19, 24, 27, 28, 43, 613, 632, 640, 684, 691, 714, 715,740, 754: n = A,T,C or G
gggctagcngcttactgtngggcnaannggagctccccgcggnggcggccgaggtaccctgggcagtagaatttcattgaaaagcctttggactccaactaaagatgcagagaagtccaagttcctccctctctcttgcttctggagctccttgtagttacatctattatagtatcattatatcaagttataacaatctgtttccctttatctcctctagtggcctgggaacctctaagaggcaaacacagtccccatacaggaatgggatgtctgcagagctgtataactcctctcttctgtctgaagaataaaacaacattatacaaaggaaaagagtggttcattttctctcctcagcagagatgtccaatgtggaaatggcagaagaaagatcaaagccttgcaggtaatgtgggtaaccacctgcctttatcctgcaataccatactggcagttcctttgccctctctgtagaggggtcagtaatatggccatacctggggccatacaccttcttcatgccactcccaggagaagggaacatgaccctgtaggattcttctttcccctgctaaaaatgttactctgtcaatgttctccacataagtgnggggttatcatgtttagancctgtctntaaaataggtcctcaaggacagtgaaaacaaaaaaccatttttntcaaggncaaaaaacttacccttccattgnntgctggctttaaaatggtcttcgantcccactttaactnttcttgg

SEQ ID NO: 8955 - DNA, 604 bp, Homo sapiens
  misc_feature 3, 43, 45, 53, 62, 89, 601: n = A,T,C or G
ggnactccccgcggtggcggccgcccgggcaggtacgcggggngngctcaggnacctctganaagaatggagccctcctggcttcaggnaactcatggctcaccccttcttgctgctgatcctcctctgcatgtctctgctgctgtttcaggtaatcaggttgtgccagaggaggagatggacgatcagagccatgcacctgtttcctgcaccccctgcgcactggttctatggccacaaggagtcttacccagtaaaagagtttgaggtgtatcctgagctgatggaaaaatacctatgtgccgttcccttgtgggttggaccctttacgatgttcttcaatatccatgacccagactatgtcaagattctcctgaaaagacaaggtaaaaaccaagaggggctcacagtacctcggccgctctagaactagtggatcccccgggctgcaggaattcgatatcaagcttatcgataccgtcgacctcgagggggggcccggtacccagcttttgttccctttagtgagggttaattgcgcgcttggcgtaatcatggtcatagctgtttcctgtgtgaaattgttatccgctcacaattncac

SEQ ID NO: 8956 - DNA, 598 bp, Homo sapiens
  misc_feature 1, 3, 5, 36, 38, 394, 395, 401, 402, 407, 410, 415, 417,422, 429, 431, 433, 434, 437, 438, 440, 443, 445, 453, 461,472, 482, 486, 487, 502, 505, 509, 510, 511, 518, 520, 530,533, 539, 544, 545, 546, 547, 552, 553, 554, 555, 556: n = A,T,C or G
  misc_feature 559, 562, 563, 564, 565, 566, 567, 568, 569, 570, 571, 572,573, 574, 575, 576, 577, 578, 579, 580, 581, 582, 583, 584,585, 586, 587, 588, 589, 590, 591, 592, 593, 594, 595, 596,597: n = A,T,C or G
ncntnctgcgtactcactctgttgtgcctgattggnanctccaccgcggtggcggccgcccgggcaggtacagtggagtggattttctggtaacttgaggattatgtgtgtgacagagggactgaattcatgtgaacaaagacatgggccctggaaaggaaaatagaaagggagagaagaagagcttagtgatgggaggactgtgtgtgtgtaagcatgggggaagacagggaaataaatgataatgatgatggtggtgatgatttttacaagctatcttgaatggtgggtgagaagggggaaaagatggcctagaaaggtatttgagaagccttctgtttacttcattgtataaaacacttgcatcctaacaaaaaaaaaaaaaaaaaaaagnncccccnnccccnttnaaaantnggggnccccccngncnnggnnanttnantttaaacntttttaanccccccccccntggggggggncccnnccccccctttttttnccntttnnngggggtnanttcccccccnggnaaaaanagggnnnnctttnnnnnccnggnnnnnnnnnnnnnnnnnnnnnnnnnnnnnnnnnnnnt

SEQ ID NO: 8957 - DNA, 523 bp, Homo sapiens
  misc_feature 2, 3, 4, 5, 7, 8, 14, 32: n = A,T,C or G
gnnnnannaatacnactactatatggcgaatngggccctctagatgcatgctcgagcggccgccagtgtgatggatatctgcagaattcgccctttcgagcggccgcccgggcaggtactgagtaagaagcccatttggtttgtgtctgggaggatgggcagtgaggatgagtgaggatgagtttaatttagcttggtgagagggggacaaatccaccttttcacgagagctgctttctcatcgctttttgtcccccttcatccacaacccccgcagccaaggcagtgtcagtaaattttgggatggaaaagccttaggtaggattcttatgttttcgaaatgtgactgattggaattgggggaaaactgtattaaaattggatatgtggtaaaagctggatatgtggttattacccatatccagtagtgggtcatgttcctgtgctaccatgatctgcccgcagtaacctagcaagacatcaaatcacagtgtgcagtagatggtacctcggccgcgaccac

SEQ ID NO: 8958 - DNA, 520 bp, Homo sapiens
  misc_feature 2, 3, 5: n = A,T,C or G
gnnangatacgactactatatgggcgaattgggccctctagatgcatgctcgagcggccgccagtgtgatggatatctgcagaattcgcccttagcgtggtcgcggccgaggtacagaggccaccagttactactggtgtaaattttgtagtttcagctgtgagtcatctagctcacttaaactgctagaacattatggcaagcagcacggagcagtgcagtcaggcggccttaatccagagttaaatgataagctttccaggggctctgtcattaatcagaatgatctagccaaaagttcagaaggagagacaatgaccaagacagacaagagctcgagtggggctaaaaagaaggacttctctagcaagggaaccgaggataatatggtaacgagctataattgtcagttctgtgacttccgatattccaaaagccatggccctgatgtaattgtagtggggccacttctccgtcattatcaacagctccataacattcacaagtgtacctgcccgga

SEQ ID NO: 8959 - DNA, 405 bp, Homo sapiens
cgcgtaatacgactcactatagggcgaattggagctccaccgcggtggcggccgcccgggcaggtacgcgggtagggatgcagaactggccacagtcagggctggccaacaagggatgggatggcaagggaaccagtgggagactgtttacacctttgacttcctcttcacaggtcaaggcaggactgtagcattaggtctcagagatgcaatgaacaggacaaatacacttccccttcatctggacctgaggctctgggcaagtcagtacctcggccgctctagaactagtggatcccccgggctgcaggaattcgatatcaagcttatcgataccgtcgacctcgagggggggcccggtacccagcttttgttccctttagtgagggttaattgcgcgcttgg

SEQ ID NO: 8960 - DNA, 756 bp, Homo sapiens
  misc_feature 1, 2, 4, 5, 7, 569, 582, 632, 662, 744: n = A,T,C or G
nntnntngcccaggtacaagctcaggattctccgaatgaagttaaggtcccttgcccatccggagaggcctcagctgtgtcggtatgatcttgtcctgatggaaaacgttgaaacagtcttccaacctattctttgcccagagttgcagttgtaactgttgccaggacacatggccataaataatagaaagaaagctacaaccacaggctgtttgaaagcttcacctcacctttctgcaaagcagaaaaagtatgaaaaaaccaaggcttttttcagtagcgtcctatggatgtcacattgtacatcaaacaaccttgtgattataaaacgatcctgggaaggagcccctaactagggcaagtcagaaatagccaggctcgcagcagcgcagcgctgtgtctgctgtgtcctggggcctcccttgttccgacctgtcaattctgctgcctgtcaacgccgggtggttctgcccatcgcggctgcgggtcaagcatcttcaagggaaggacggactggaggcctcaccgtggactcaactctgcatttccgtgccacattcctccagttnccacacgtagaanggaacgaaactgacgtctacctcatggggctgctgtggtgggtttgggangcaaaaatctatgaagggttttttgaaatnccataggtgcccatctattgaaagtttgataaatgtgaatatgcttttacatttggcttatctaattgcaataaaaaagctnttttttttaaca

SEQ ID NO: 8961 - DNA, 457 bp, Homo sapiens
  misc_feature 2, 3, 4, 5, 8, 9, 10, 12, 14, 20, 28, 32, 457: n = A,T,C or G
gnnnnagnnntntntctgtnttcgaacncgantcgaccccgcgtccgttctgatttctgattctctgatttctgattcctaatgaggacagtaggtctggatccaaattctcacagtaaaatcaagcagtaattttctctcatatctattagggaaagaaaaatgatcacagtctgctaagagtcttgattttctttgtaatgcctcacatagtatgataatcagtctccaaagcatcacatgataattacaatgataccattaacatgtcaaggaaattatattatttatggttgtcaaaaattatgaagtagtgtatgattataagcagatatggcaaatttgttcagtaaatccatagatgactacattttgagaaatactaagataatactaaaaattatgccttagcataatttgcatgcaaaattgccctctagtgtttttgttttgtttn

SEQ ID NO: 8962 - DNA, 1023 bp, Homo sapiens
  misc_feature 1, 4, 7, 9, 13, 21, 27, 30, 45, 58, 79, 86, 98, 124, 138,252, 298, 299, 306, 360, 361, 391, 418, 448, 489, 493, 498,503, 539, 596, 621, 665, 674, 686, 718, 722, 724, 758, 782,802, 863, 866, 870, 873, 878, 888, 895, 897, 909, 915: n = A,T,C or G
  misc_feature 936, 937, 944, 947, 948, 956, 969, 970, 971, 986, 990, 991,994, 996, 1002, 1011: n = A,T,C or G
nggntcntnaagnagcgcgangcgtangangtgttttgcgacccngcaccaccgtcgncatttgtgctggaattcgggntccaccngtacctacaagntcatgatgatgaggtgtacggcgacnaggacctgcttgancaggccaacgagcgcctcggggagtttgcctacggaaagcggcataaggacatgttggcgttgccgctggacgaggggcaacccaacacctagcctaaagcccgtgacacttgnaagaagggtgcttgccaacgccttggccccggtccgaaagaaaaanncgcgggncttaaaagcgccgaagttcttggttgaactttgggcaccccaacccgtgccaannttgaatgggttaccccaaagccgcccagcngaacttgggaaagaattgttctttggnaaaaaaaaatgaacccgttgggagcccttngggcttgggaagccccgaagggttccgccgttgccgggccnaatncaaangcaanggtgggcaccccggggaacttggggccgttgccaanacccgttgggaccttttcaagaataccccccccaaccaagttagccaacttaagttnttttgggccacttgcccacaagaangggcattgggaagaacacaaaaccgtttccccggtttggccttnggccgggtnggcagaatgccncgggtgcaaagccgggcccttatactaagttntaanangaaaaaaaaacctttccacaaccttcccccttgnaaccttgaaaacattaaaaaatgnaattgccaattgggttggtnggtaaactttgggttatttggcaggctttaataatgggttaccaaaataaaaagccaattngcntttnccnaaaantttacaaaantaaaagnantttttttttcanttggantttttaaatttgggggttggnnccaaaanttnnttcaattnttttttttttaannnttttgggattccccnggtnnccngnacttcngaatttaanttcctttttttt

SEQ ID NO: 8963 - DNA, 904 bp, Homo sapiens
  misc_feature 25, 653, 667, 676, 717, 723, 759, 767, 768, 780, 809, 811,812, 829, 835, 852, 853, 901, 902: n = A,T,C or G
tacgtcgactactatagggcgaatnggagctccaccgcggtggcggccgcccgggcaggtacccagggaacaaatgctactgggactccacacctacctaagaagcagctctacccagactccacatggctctctgttttggtctggagaccccagctggggtatctcctgagcccagggattcaaaggttcgtggcagaaatatgcatcccacgggactctcactcactcaccattttcttgtagggggattcccctgggtctgtgccactcctgggtgaatggttgatctgtctcactcttctccgtgatccgaaggtcacactatgtcactgatgaatccttatgtgtccacctggatgttccggttgaagagctagtgtctcaccactctttctgctatttgtgagagtggcacacactagctgcttctagtcaaccatcttggccccacctcactcacttttctcaagtaatcaaagaccagaaaggatgtcctttacaagagcagatcccccaaaatgtaagagttcactgaaaaggtgggagctcaaaccaagagaggacctatctcgcagcataaagacaacttgtacctcggccgctctagaactaagtggatcccccgggctgcaggaattcgatatcaaacntatcgatacccgtngacctcgangggggggcccgggtacccaactttttgttccctttagtgangggttnattgcgcgccttggcgtaatcaatgggcatagctgntttcctgnngtgaaattggtntccgttcacaaattcccacaaacataccnannccgggagcataaaatgntaaagncctggggtgccttaagnngggagctaacctcacattaattgcggtgcgctaactgcccgtttcaanngg

SEQ ID NO: 8964 - DNA, 518 bp, Homo sapiens
  misc_feature 2, 6, 7, 8, 17, 31: n = A,T,C or G
gnttgnnnctctactantgggttatggcgantggggccctctagatgcatgctcgagcggccgccagtgtgatggatatctgcagaattcgccctttcgagcggccgcccgggcaggtactgaactgggaggtttttagtctgatagccacaattttgacctaggcaggaagctttacagcttgaggcagtttcatggtctgaagacaaacttcttgtgacttgctgccggtgttggactgcaggagagagcctcactgggtcaggagcacgagaacaaagtggatcccactaccacatcccacccctcctgtttcagaggcagatcatgggaccaggactactgagagttccatggccctacccatcatctgaaatgcccaagaacttctccgattaacaaaggtcaagcataaactctattgccaccaccacagctggttctcacttttaggtgctacctcctgtcctaaaggttgatctacacagtcccttacaacatctgccgactcaagaact

SEQ ID NO: 8965 - DNA, 598 bp, Homo sapiens
  misc_feature 33, 40, 51, 78, 597, 598: n = A,T,C or G
gccccgcgtccgaaataaataaatgaataaagnacacagnaatctgcaggnatggctcagtcagttggagacccaagnaaagccatgctgcatttgcagtctgaaggtctgcaggccagacacctacggtagccaatgttccagttcaagtccaaaggcaggctgctggagagttctctcttgtaggagggaggctggtctttttgttctgttcaggccttcacctaatttgatgaggcacactcacattatggagggcaatctgctttactcagagtttgcagacgtaaatgttaatctcatccaaaaatagccccccccagacacacccagaatattgtttgaccaaacagtctgggcaccctgtggcccagccaagcaagttggcataaaaataactatcacactctagaattaatgaagaacacactagaattaatgaagaacagaaaacctagagagccttgcaatattggtcatcattttatgcctcttaataaaatgagcctgggcagcataaggagaccccacctctacaaaaaagaattagccagacatggtggcgcatgcctttggtcccagctacttgagaggatnn

SEQ ID NO: 8966 - DNA, 768 bp, Homo sapiens
  misc_feature 6, 12, 282, 283, 284, 285, 286, 287, 288, 289, 290, 291,292, 293, 294, 295, 296, 297, 298, 299, 300, 301, 302, 303,304, 305, 306, 307, 308, 309, 310, 311, 312, 313, 314, 315,316, 317, 318, 319, 320, 321, 322, 323, 324, 325, 326: n = A,T,C or G
  misc_feature 327, 328, 329, 330, 331, 332, 333, 334, 335, 336, 337, 338,339, 340, 341, 342, 343, 344, 345, 346, 347, 348, 349, 350,351, 352, 353, 354, 355, 356, 357, 358, 359, 360, 361, 362,363, 364, 365, 366, 367, 368, 369, 370, 371, 372, 373: n = A,T,C or G
  misc_feature 374, 375, 376, 377, 378, 379, 380, 381, 382, 383, 384, 385,386, 387, 388, 389, 390, 391, 392, 393, 394, 395, 396, 397,398, 399, 400, 401, 402, 403, 404, 405, 406, 407, 408, 409,410, 411, 412, 413, 414, 415, 416, 417, 418, 419, 420: n = A,T,C or G
  misc_feature 421, 422, 423, 424, 425, 426, 427, 428, 429, 430, 431, 432,433, 434, 435, 436, 437, 438, 439, 440, 441, 442, 443, 444,445, 446, 447, 448, 449, 450, 451, 452, 454, 455, 456, 457,458, 459, 460, 461, 462, 463, 464, 465, 466, 467, 468: n = A,T,C or G
  misc_feature 469, 470, 471, 472, 473, 474, 475, 476, 477, 478, 479, 480,481, 482, 483, 484, 486, 487, 488, 489, 490, 491, 492, 493,494, 495, 496, 497, 498, 499, 500, 501, 502, 503, 504, 505,506, 507, 508, 509, 510, 511, 512, 513, 514, 515, 516: n = A,T,C or G
  misc_feature 517, 518, 519, 520, 521, 522, 523, 524, 525, 526, 527, 528,529, 530, 531, 532, 533, 534, 535, 536, 537, 538, 540, 545,546, 547, 548, 549, 550, 551, 552, 553, 554, 555, 556, 557,558, 559, 560, 561, 562, 563, 564, 565, 566, 567, 568-768: n = A,T,C or G
aagtancgactnactatagggcgaattggagctccaccgcggtggcggccgcacctctggggccagaccactggtctccagagaggcgcggggacctccaccagggatcggagtggtacctcggccgctctagaactagtggatcccccgggctgcaggaattcgatatcaagcttatcgataccgtcgacctcgagggggggcccggtacccagcttttgttccctttagtgagggttaattgcgcgcttggcgtaatcatggtcatagctgtttcctgannnnnnnnnnnnnnnnnnnnnnnnnnnnnnnnnnnnnnnnnnnnnnnnnnnnnnnnnnnnnnnnnnnnnnnnnnnnnnnnnnnnnnnnnnnnnnnnnnnnnnnnnnnnnnnnnnnnnnnnnnnnnnnnnnnnnnnnnnnnnnnnnnnnnnnnnnnnnnnnnnnnnnnnnnngnnnnnnnnnnnnnnnnnnnnnnnnnnnnnnntnnnnnnnnnnnnnnnnnnnnnnnnnnnnnnnnnnnnnnnnnnnnnnnnnnnnntncctgnnnnnnnnnnnnnnnnnnnnnnnnnnnnnnnnnnnnnnnnnnnnnnnnnnnnnnnnnnnnnnnnnnnnnnnnnnnnnnnnnnnnnnnnnnnnnnnnnnnnnnnnnnnnnnnnnnnnnnnnnnnnnnnnnnnnnnnnnnnnnnnnnnnnnnnnnnnnnnnnnnnnnnnnnnnnnnnnnnnnnnnnnnnnnnnnnnnnnnnnnnnnnnnnnnnnnnnnnnnnnnnn

SEQ ID NO: 8967 - DNA, 747 bp, Homo sapiens
  misc_feature 2, 3, 4, 5, 7, 8, 9, 12, 22, 472, 594, 627, 687, 708, 717,728, 737, 747: n = A,T,C or G
gnnnngnnnggngccgcctccncgcgtccgaaaaaaacgttcgagactggcgcaaagtgaagccacagcttcaaaacgcccacgccatgcggcgagcattccgaggccccaagaacgggaggtttgctctggtggaccagcgtgtggccgaatatgtcagatacatgcaggccaaaggggaccccatcacccgcgaggcgatgcagctgaaagctctcgaaatcgcccaggaaatgaacattccagagaaagggttcaaggcaagcttaggttggtgtcgaagaatgatgagaaggtatgacctgtctctgaggcataaagtgcccgtgccccagcacctgccggaagacctgactgagaaactcgtcacttaccaacgcagtgtcctggctctgcgcagggcgcatgactatgaggtagctcagatggggaatgcagatgagacgcccatttgtttaaaggtgccatcacnggtaactgttgataaccagggcgaaaagcctgtcttggctgatgggagggaagttaccttcatacatcatcttgaggggaaccgtatattcccccggggaagtttcccagtgggatggaatnccgttgccaccggtttggttggatgacttgaanacttgatccagactggttggaatggtttggaacggaggaaagaccgtgcccaacaacganggatcttgatcttgatggttncgggccatncccaattcccngaaaactcntggaaagctn

SEQ ID NO: 8968 - DNA, 903 bp, Homo sapiens
  misc_feature 2, 4, 507, 534, 574, 638, 664, 665, 752, 753, 763, 778, 784,795, 797, 812, 818, 827, 834, 840, 847, 848, 850, 851, 852,858, 859, 860, 863, 864, 875, 884, 892, 902: n = A,T,C or G
angnactactccgcgtatacgactcactatagggcgaattggagctccaccgcggtggcggccgggaccgagggtttggtgcacctcgatttggaggaagtagggcagggcccttatctggaaagaagtttggaaaccctggggagaaattagttaaaaagaagtggaatcttgatgagctgcctaaatttgagaagaatttttatcaagagcaccctgatttggctaggcgcacagcacaagaggtggaaacatacagaagaagcaaggaaattacagttagaggtcacaactgcccgaagccagttctaaacaattatttttactaaaatgcataattatgtgatagttatacatataccaacctgttatgtgagacaagctgacctgcaagtagtccaaggccagtgaatcaattactgcttgtacctcggccgctctagaactagtggatcccccgggctgcaggaattcgatatcaagcttatcgataccgtcgacctcganggggggcccggtcccaactttttgttncctttagtgaggggttaaatgcccccttggcgtaatcatnggcatacttgtttcctgtgtgaaaattgttattccgcttcacaaattccaaccaacaataccangcccgggagccattaaaagtgtaaanncctggggtgccctaatgaggggagctaactcaaattaaattggggttggggctcacttgcccgttttccaatcggggaaacctgtcnngccaacttgnattaaatgaaatggnccaacnccccgggggananggcggtttggctatntgggcnctttttccntttcttngttaantgatttnntnnnctcggnnnttnnggttgggggangcggtttanatttattnaaagggggant

SEQ ID NO: 8969 - DNA, 456 bp, Homo sapiens
  misc_feature 2, 3, 5, 9, 12, 14, 15, 110, 267, 268, 277, 411, 420, 431: n = A,T,C or G
gnnangccncgncnnatacgactactatagggcgaattggagctccccgcggtggcggccgaggtacaagcagtaattgattcactggccttggactacttgcaggtcancttgtctcacataacaggttggtatatgtataactatcacataattatgcattttagtaaaaataattgtttagaactggcttcgggcagttgtgacctctaactgtaatttccttgcttcttctgtatgtttccacctcttgtgctgtgcgcctanncaaatcagnggtgctcttgataaaaattcttctcaaatttaggcagctcatcaagattccacttctttttaactaatttctccccagggtttccaaacttctttccagataagggccctgccctacttcctccaaatcgaggngcaccaaancctcggtcccngccgctctagaactagtggatcccc

SEQ ID NO: 8970 - DNA, 893 bp, Homo sapiens
  misc_feature 357, 358, 359, 360, 361, 362, 363, 364, 365, 366, 367, 368,369, 370, 371, 372, 373, 374, 375, 376, 377, 378, 379, 380,381, 382, 383, 384, 385, 386, 387, 388, 389, 390, 391, 392,393, 394, 395, 396, 397, 398, 399, 400, 401, 402, 403: n = A,T,C or G
  misc_feature 404, 405, 406, 407, 408, 409, 410, 411, 412, 413, 414, 415,416, 417, 418, 419, 420, 421, 422, 423, 424, 425, 426, 427,428, 429, 430, 431, 432, 433, 434, 435, 436, 437, 438, 439,440, 441, 442, 443, 444, 445, 446, 447, 448, 449, 450: n = A,T,C or G
  misc_feature 451, 452, 453, 454, 455, 456, 457, 458, 459, 460, 461, 462,463, 464, 465, 466, 467, 468, 469, 470, 471, 472, 473, 474,475, 476, 477, 478, 479, 480, 481, 482, 483, 484, 485, 486,487, 488, 489, 490, 491, 492, 493, 494, 495, 496, 497: n = A,T,C or G
  misc_feature 498, 499, 500, 501, 502, 503, 504, 505, 506, 507, 508, 509,510, 511, 512, 513, 514, 515, 516, 517, 518, 519, 520, 521,522, 523, 524, 525, 526, 527, 528, 529, 530, 531, 532, 533,534, 535, 536, 537, 538, 539, 540, 541, 542, 543, 544: n = A,T,C or G
  misc_feature 545, 546, 547, 548, 549, 550, 551, 552, 553, 554, 555, 556,557, 558, 559, 560, 561, 562, 563, 564, 565, 566, 567, 568,569, 570, 571, 572, 573, 574, 575, 576, 577, 578, 579, 580,581, 582, 583, 584, 585, 586, 587, 588, 589, 590, 591: n = A,T,C or G
  misc_feature 592, 593, 594, 595, 596, 597, 598, 599, 600, 601, 602, 603,604, 605, 606, 607, 608, 609, 610, 611, 612, 613, 614, 615,616, 617, 618, 619, 620, 621, 622, 623, 624, 625, 626, 627,628, 629, 630, 631, 632, 633, 634, 635, 636, 637, 638-892: n = A,T,C or G
taggacgcgcgttatacgactactatagggcgaattggagctccaccgcggtggcggccgcccgggcaggtacagtgaagctttgacctgaggagctcttctgtaggtgaagagtggttaactatggttcctgtgtgcctggggccccccactcctaggactcatccaccccctacccagaacttactagtacctcggccgctctagaactagtggatcccccgggctgcaggaattcgatatcaagcttatcgataccgtcgacctcgagggggggcccggtacccagcttttgttccctttagtgagggttaattgcgcgcttggcgtaatcatggtcatagctgtttcctggannnnnnnnnnnnnnnnnnnnnnnnnnnnnnnnnnnnnnnnnnnnnnnnnnnnnnnnnnnnnnnnnnnnnnnnnnnnnnnnnnnnnnnnnnnnnnnnnnnnnnnnnnnnnnnnnnnnnnnnnnnnnnnnnnnnnnnnnnnnnnnnnnnnnnnnnnnnnnnnnnnnnnnnnnnnnnnnnnnnnnnnnnnnnnnnnnnnnnnnnnnnnnnnnnnnnnnnnnnnnnnnnnnnnnnnnnnnnnnnnnnnnnnnnnnnnnnnnnnnnnnnnnnnnnnnnnnnnnnnnnnnnnnnnnnnnnnnnnnnnnnnnnnnnnnnnnnnnnnnnnnnnnnnnnnnnnnnnnnnnnnnnnnnnnnnnnnnnnnnnnnnnnnnnnnnnnnnnnnnnnnnnnnnnnnnnnnnnnnnnnnnnnnnnnnnnnnnnnnnnnnnnnnnnnnnnnnnnnnnnnnnnnnnnnnnnnnnnnnnnnnnnnnnnnnnnnnnnnnnnnnnnnnnnnnnnnnnnnnnnnnnnnnnnnnnnnnnnnnnnnnnnnnnnnnnnnnng

SEQ ID NO: 8971 - DNA, 849 bp, Homo sapiens
  misc_feature 594, 625, 660, 672, 674, 680, 690, 693, 727, 736, 739, 756,775, 780, 791, 793, 794, 802, 803, 804, 815, 825, 834, 837: n = A,T,C or G
gtgtatacactcactatagggcgaattgggccctctagatgcatgctcgagcggcccgccagtgtgatggatatctgcagaattcgccctttcgagcggccgcccgggcaggtaccagccagttttgagatatacctggtttgctttaatgttattaaattgttttggtgagttttgcaaatggacaattgaactttgttctgccaaattcttttttattgcatttaaacttcagggttttttatttccggcttattatgaatggattagtcattttgtgaatataactcttcattgagtttagggagaaataggacgttagatccgaagatgctatttgtttaatcaccagaatggacaaaattatacttcatttactatcagggaggcatggggagaatagaggtctaggggtgccgtcttgtggctcttactgtttttgtgtatctgggtttttttttttgagagggcttcccattatgttgcccgtgctggaccccaactcctgatttactggctctagagatcttctcgcctcagtctcccaagggacctggggactatagacgcccagggatgggtcttttagtaaanaacaaaaacctgaagaatttgggattttaantttatactaaccctctttggggttccatgcctgancctgtaaagctncnattganggacttttantcnaacaaccaggggagggcctattggttaattgtangaagcattnttnggcctaaaaaggcaacnttttggccaatcccgtttnaaggngcccaattaangnngggattannntgggattttcncgtgcttttncttaaaaangtngcaagaaaaaat

SEQ ID NO: 8972 - DNA, 610 bp, Homo sapiens
  misc_feature 1, 3, 4, 5, 6, 7, 9, 37, 521: n = A,T,C or G
ngnnnnntngtttacgacttctatagggcgaattggnccctctagatgcatgctcgagcggccgccagtgtgatggatatctgcagaattcggcttcgagcggccgcccgggcaggtaccatatcctgggctggttaaaaacataccatccctgtgatggtgatgaccattgacttcactcttcacaagaatttatgtcaacgtgtcctagacatttggtagtagaggtatagctgtagtccaaacctctaccaagctatggtttctgagagccctgtatgttaagtgcctacggaatgctcagcatagtcaaagacaccttagattcacattatacgaggagccacactgcagttattcaagattaagcactggctggagaaactggctgtatgaactccagccttgggtgcgctgtacctcggccgcgaccacgctaagccgaattccagcacactggcggccgttactagtggatccgagctcggtaccaagcttggcgtaatcatggtcatagctgnttcctgtgtgaaattgttatccgctcacaattcccacaacatacgagccggaaagcataaagtgtaaagcctggggtgcctaatgagtg

SEQ ID NO: 8973 - DNA, 749 bp, Homo sapiens
  misc_feature 564, 565, 566, 567, 568, 569, 570, 571, 572, 573, 574, 575,576, 577, 578, 579, 580, 581, 582, 583, 584, 585, 586, 587,588, 589, 590, 591, 592, 593, 594, 595, 596, 597, 598, 599,600, 601, 602, 603, 604, 605, 606, 607, 608, 609, 610: n = A,T,C or G
  misc_feature 611, 612, 613, 614, 615, 616, 617, 618, 619, 620, 621, 622,623, 624, 625, 626, 627, 628, 629, 630, 631, 632, 633, 634,635, 636, 637, 638, 639, 640, 641, 642, 643, 644, 645, 646,647, 648, 649, 650, 651, 652, 653, 654, 655, 656, 657: n = A,T,C or G
  misc_feature 658, 659, 660, 661, 662, 663, 664, 665, 666, 667, 668, 669,670, 671, 672, 673, 674, 675, 676, 677, 678, 679, 680, 681,682, 683, 684, 685, 686, 687, 688, 689, 690, 691, 692, 693,694, 695, 696, 697, 698, 699, 700, 701, 702, 703, 704: n = A,T,C or G
  misc_feature 705, 706, 707, 708, 709, 710, 711, 712, 713, 714, 715, 716,717, 718, 719, 720, 721, 722, 723, 724, 725, 726, 727, 728,729, 730, 731, 732, 733, 734, 735, 736, 737, 738, 739, 740,741, 742, 743, 744, 745, 746, 747, 748: n = A,T,C or G
actactatagggcgaattgggccctctagatgcatgctcgagcggccgccagtgtgatggatatctgcagaattcgccctttcgagcggccgcccgggcaggtacgcggggacacattcagaggtgagcccagagggggtaaagtggactggggagaacttcggaggatgttcatgtccaggagcagccccacgccctgtatggtcggtgtctagagcctcacagcaactaagaccaacccagctctcagaagaaggaatgtcaaaatgtcatgttcaattttacattcagtgcctggaatcttttcttcacaattgaaatgaaatgtgctgaaggaggtgaatccatgcattaatcttcagctcacaaaggaaatactacataagaagcaagaccacagactcaagacggacataattggattttttttgccatggcctggaaagaaaggtacctcggccgcgaccacgctaagggcgaattccagcacactggcggccgttactagtggatccgagctcggtaccaagcttggcgtaatcatggtcatagctgtttcctggnnnnnnnnnnnnnnnnnnnnnnnnnnnnnnnnnnnnnnnnnnnnnnnnnnnnnnnnnnnnnnnnnnnnnnnnnnnnnnnnnnnnnnnnnnnnnnnnnnnnnnnnnnnnnnnnnnnnnnnnnnnnnnnnnnnnnnnnnnnnnnnnnnnnnnnnnnnnnnnnnnnnnnnnnnnnnnnnnnnnnnnnng

SEQ ID NO: 8974 - DNA, 630 bp, Homo sapiens
  misc_feature 6, 17, 619: n = A,T,C or G
gacccngcgtccgcggncgcgtgggtaaagaatgggcagccaagccaggcgtggtggcacacacttttaatcccagcacttgggaggcagaggcagacggatttctgagttcgaggccagcctggtctacagtgagttccaggacagccaaggctacacagagaaaccctgtctcggaaaaaaaaaaaaaaagaatgggctgccaatccacagccaccctgacaacggggggtgggggtggggtagctaaagccaatttgaagaaagcccctatgaaagggcgctttttccttcaaggtacagaccagtccaaaatgtacagacacccctcactatgaacacaaacaatcctggtgtaaattacctaactacagttggaaatctaactggctttaaaaggaaaagagagcctgccgtctctttgtggttgccattttatatagatgatatatattgagctttggtctgttatgctttggaatgcttagtgcaagccctggttgccccagagacccaagtgatgttatgtgaccttgaccctaagttacttctggttggtgaataaagatgcctgcagtcgatagctgggcaggagagaccagggtggggtttagggttnctgagcttggg

SEQ ID NO: 8975 - DNA, 606 bp, Homo sapiens
  misc_feature 4, 7, 8, 9, 503, 514, 540, 552, 606: n = A,T,C or G
cgantgnnntacgactcactatagggcgaattgggccctctagatgcatgctcgagcggccgccagtgtgatggatatctgcagaattcggcttagcgtggtcgcggccgaggtactatggcctgactgagaaggcctagatccttgagaaatcgccccaaggtttcataaagatcagctaagcaactcatgttgtcctcgccttcgcagtttttctcatactgcttcaatgaatcgaagtattctgttgccattgcacttttgtctttgccaacaaactgccaataactcagcaactcagcaaagtatccccttttataaaggttttgagacacaaagagattaagaaggcaaccatgcagcttctgtttacttccctgctgctgaaaaagccacgggagttcatctgcgcttctccaagtcactctgtcctgacttagctgcaaggtgaaatagttgattagcttttgcctgtatgaagaagtaacagtggggccttccangtacctgcccnggcgggccgctcgaaaagccgaattncacacactggcnggcggttactaagtggatccgagctcggtaccaagcttggcgtaatcatggtcn

SEQ ID NO: 8976 - DNA, 762 bp, Homo sapiens
  misc_feature 6, 10, 553, 660, 670, 694, 695, 696, 698, 700, 701, 703,704, 705, 706, 707, 708, 709, 710, 719, 734, 761, 762: n = A,T,C or G
cttgtnggcngattgggtaccgggccccccctcgaggtcgacggtatcgataagcttgatatcgaattcctgcagcccgggggatccactagttctagagcggccgaggtactcaatctgtgaagtgtgttctcacagtgtcccacacctccccgaggggctcacctgcccacagcagtgctctctgctcttcagtccacctagatactctcttctctttgatcttgaagcctccttatcctgacccatcattcttggaaccactaacctataaagtaattgcaaatcagactcctgtttcagggtctgtttctgaggatcctcaacttcagacactgtaaatttttttcatggtaatggtaaggaaaatgcattattttatctgaaatattcattttgtaatcttttcattaattatccaattgttgaacagaaaaaaattgcttattactttaaaaaatgcacacacatattaatatctgtttagaatcatagatttctggcaagtcagcgtatccataatgtaaacagatttttctaacaaaaaaaaatngctttagagtttccctcaaccttattcatccttatatttcatacattttaatacaacttttttgtatctggctcccaagcccactgcaactaggagcttcaaattanaattgaaaanaagggggctattgctaaaaaaatnnncntnngnnnnnnnnaatttttgnttttccggggggggnccccccgggggggcccccccctttttnn

SEQ ID NO: 8977 - DNA, 661 bp, Homo sapiens
  misc_feature 50, 649: n = A,T,C or G
tatagggcgaattggagctccaccgcggtggcggccgaggtaccaaaagnactctcaaaaaccaatactcccacgggcaagggaatagccaagtttgttgcggtttccaatgaatgacatcagccctgtgtaggtctcaatcaaaatgggttcagttaacaccatcagtttctttcctcttccagatccagttgaattcttgtgggcattctggatagctggaacaagcttagacatgaacccagacaacttgcaaatttcaaggaatttctcactggtgtatttcataggatgctcagtgaaagtagcataaggaacttcagtggaccatgggttccagcgggacagaagagactgctcctccggactcccccagtagatcctaaggccttctccttgtctcttgtccagggacatcccagggaaggtgaacttgcccaggcagatgcgatagacagcgctcagaggaatccgctgcagctgcacacaactcagcatgatgaagtcgtatttgcagatcaagagagtcttgtctgtgaccagtagaattctctccttctcattgttccagtggtctatctttgtcaagagccagaagccttgaaatggtctctccagaagtctcagctacgtgacctttcaagtcttncatggcagtctc

SEQ ID NO: 8978 - DNA, 657 bp, Homo sapiens
  misc_feature 23, 53, 57, 109, 480, 537, 576, 578, 592, 602, 615, 620,623, 629, 639, 650, 657: n = A,T,C or G
gactcactatagggcgaattggnactccaccgcggtggcggccgagtaccagnaggnatgtaggctggtgcccttattaacaaagtcaggggaccgtggcacacaaggnattgactactgcagatacggtcacaatgctacctctagatggcctgaatccccctgccctctctggtggggagaagggctggcagagccattagcatgggctccggccaatcctggccactttgatgctcctggtgctgacccagggtcctggaggaagggatgaggtgggcagtagagatgcttagggcagcagcccctttccatccacactggaactatttcagtattttaccaccaattcggccattccgttgtgcgctggctgaacatcagccctgctccaggtctcagtttcccctttgtaaaaggaaagctctggattcaggggtgaccagaggtcatcatggtcttgagattcgaggcctgtangcagggggtgagaggttcactaggagcacagaagccaaggttggggagaggcagcanagagagtggcctcccttcggcccaggtgggaggttacananacacactttccttnttccctaggnagacttgttatantgagnttnaggcangtctggcccntaagactaacnaggatgn

SEQ ID NO: 8979 - DNA, 578 bp, Homo sapiens
  misc_feature 373, 449, 468, 500, 526, 528, 569, 578: n = A,T,C or G
tagggcgaattggagctccaccgcggtggcggccgaggtactttctctttgtctctgccttccaggcaacagggattttggggtagtagttagctctacaaattatcttgagcagttaaaagcctttgcaagctcaaaatttactgctctgggctccttctgggaaaagcagtggaaactgcccaatgctgtagcttagcagttaaggctttgtcttttcacaatggtggcctgagttcaggttcaatttttagcctaggaaaatgagcactttctggttggcatttgggtgacctgtgccattttgttggattcttcctcccctttcataaactgtcttaaattttccttttcttctgagcacctgggaggntacattttggaaaagttaaaaagccagggaacccgcgtacctgcccgggcgggccgctctaagaactagtgggatncccccgggctggcaggaanttcgatatcaaagcttatcgatacccggcganctcgaggggggggcccggtaccccancnttttggtcccctttagtgaggggttaattgcgcgccttggngtaaaatcn

SEQ ID NO: 8980 - DNA, 651 bp, Homo sapiens
  misc_feature 13, 426, 486, 487, 488, 489, 490, 491, 494, 497, 498, 499,500, 501, 502, 503, 504, 505, 506, 507, 508, 509, 510, 511,512, 513, 514, 515, 516, 517, 518, 519, 520, 521, 522, 523,524, 525, 526, 527, 528, 529, 530, 531, 532, 533, 534: n = A,T,C or G
  misc_feature 535, 536, 537, 538, 539, 540, 541, 542, 543, 544, 545, 546,547, 548, 549, 550, 551, 552, 553, 554, 555, 556, 557, 558,559, 560, 561, 562, 563, 564, 565, 566, 567, 568, 569, 570,571, 572, 573, 574, 575, 576, 577, 578, 579, 580, 581: n = A,T,C or G
  misc_feature 582, 583, 584, 585, 586, 587, 588, 589, 590, 591, 592, 593,594, 595, 596, 597, 598, 599, 600, 601, 602, 603, 604, 605,606, 607, 608, 609, 610, 611, 612, 613, 614, 615, 616, 617,618, 619, 620, 621, 622, 623, 624, 625, 626, 627, 628: n = A,T,C or G
  misc_feature 629, 630, 631, 632, 633, 634, 635, 636, 637, 638, 639, 640,641, 642, 643, 644, 645, 646, 647, 648, 649, 650, 651: n = A,T,C or G
tacgactcactanagggtcgaattgggccctctatagcatgctcgatcggccgccagtgtgatggatatctgcagaattcgcccttagcgtggtcgcggccgaggtaccgcagcaaaatgcaaaaatcgtgtgaaaatcaacgtggaacaggaaatgaggtgcgggtgtcaactggttacaaagggtcagaagttgtctggtgcctgacaaggacacacatctcattcataacatatggtggtaatttaaaaatgaaatgatgttattttttccttcgaattcatatgtattttttttcaggtggccacttagttgtaaggacataaatactcattaagttgtttggacctatttaataaatggacatgttaggtatttctcctgcccgggcggccgctcgaaagggcgaattccagcacactggncgggccgttactagtggatccgagctcggtaccaagcttggcgtaatcatggtcatactnnnnnnccnggnnnnnnnnnnnnnnnnnnnnnnnnnnnnnnnnnnnnnnnnnnnnnnnnnnnnnnnnnnnnnnnnnnnnnnnnnnnnnnnnnnnnnnnnnnnnnnnnnnnnnnnnnnnnnnnnnnnnnnnnnnnnnnnnnnnnnnnnnnnnnnnnnnnnnnnnnnn

SEQ ID NO: 8981 - DNA, 465 bp, Homo sapiens
gacttactggttggctgattggagctccaccgcggtggcggccgagctggactctggggcctgcggcggctccagcctcaactcagagggcaacagtggtagtggtgacagtagcagctatgacgcaccagctggcaactccttcctagaggactgcgaactctcccggcagatcggggcgcagcttaagctgctgcctatgaatgatcagatacgggagctacagaccatcatccgggacaagacagccagtagaggtgacttcatgttttctgcggatcgtttgatcagacttgttgtggaagagggattgaatcagctgccatataaagaatgcatggtgaccactccaacagggtacctcggccgctctagaactagtggatcccccgggctgcaggaattcgatatcaagcttatcgataccgtcgacctcgagggggggcccggtacccagcttttgtt

SEQ ID NO: 8982 - DNA, 461 bp, Homo sapiens
  misc_feature 455: n = A,T,C or G
gggcgaattggagctccaccgcggtggcggccgcccgggcaggtacgcggggagtggcatcctttgaactcacggatccagtcataactgaagttccatctacacctggggtcttcagacccaggctctggaaaagatcctgttacttacaagcaaaagaaattctgcctcttaccctcagcatgtgagtacctcggccgctctagaactagtggatcccccgggctgcaggaattcgatatcaagcttatcgataccgtcgacctcgagggggggcccggtacccagcttttgttccctttagtgagggttaattgcgcgcttggcgtaatcatggtcatagctgtttcctgtgtgaaattgttatccgctcacaatttccacacaacataccgagccgggagcataaagtgtaaagcctggggtgcctaatgagtgagctaactcacattaantgcgtt

SEQ ID NO: 8983 - DNA, 1162 bp, Homo sapiens
  misc_feature 6, 7, 8, 11, 17, 24, 43, 196, 208, 252, 261, 262, 291, 297,308, 315, 322, 339, 355, 362, 363, 365, 370, 379, 384, 387,390, 394, 406, 411, 416, 424, 429, 431, 432, 433, 442, 445,449, 451, 455, 456, 461, 462, 464, 470, 474, 482, 483: n = A,T,C or G
  misc_feature 489, 491, 518, 522, 523, 524, 527, 529, 533, 542, 547, 549,551, 561, 565, 566, 567, 568, 570, 573, 581, 584, 585, 596,597, 607, 611, 618, 621, 628, 630, 631, 632, 638, 645, 646,651, 652, 658, 663, 668, 669, 673, 683, 688, 691, 692: n = A,T,C or G
  misc_feature 699, 700, 701, 703, 704, 707, 715, 718, 743, 744, 745, 746,749, 753, 755, 757, 759, 765, 770, 773, 781, 785, 800, 809,811, 813, 815, 821, 827, 835, 846, 859, 865, 887, 901, 904,907, 914, 917, 922, 929, 935, 937, 942, 946, 947, 955: n = A,T,C or G
  misc_feature 956, 957, 958, 962, 965, 968, 969, 970, 974, 987, 997, 999,1000, 1003, 1005, 1007, 1009, 1010, 1012, 1013, 1014, 1015,1017, 1024, 1047, 1053, 1058, 1067, 1070, 1079, 1081, 1083,1088, 1090, 1093, 1100, 1106, 1108, 1109, 1116, 1120: n = A,T,C or G
  misc_feature 1128, 1131, 1132, 1133, 1135, 1139, 1147, 1152, 1153, 1162: n = A,T,C or G
tttttnnnttncgcctncttttcnaattcgctcccattttaangaacaaaagctggagctcccccgcggtggaggccgctctagattagtggatcccccgggctgcaggaattcggcacgaggggctggaggctgtgaggcttccagcgtcggtaccatggcgacgcgcggtggggctggggtggcaatggcggtntggtccctcttntccgcccgggccgtgaccgcgttccttctgttgttcctccctcncttcttacnngcccagaccttctctttccctttccagcnccgganaagtgcgactnctaccantactttnatatctccgccctctcntgtgttccttgtgcanctaaccnnangcaanatgcccgangaacntcntgntgtntgtctaccagtnatttnacatnatctctantactncnnngacctgctnttntttntnaaanntcccnngnatcacncctnccgcgttnnctctcncncttcctcttctttcccctccctctctncttnnnttncncccnccctttttntcttntntntccccctccnttcnnnngntcntcctcttnctnntcttcccctcnnccttctctcntctntcccccnccnctccccntnnngtcccntccttcnnccctnncctctntcttnccctnntctncatcccctcnctccnctnnttccccnnntnnccntccctccntcnccccttatcctctctctttctcctnnnnccncccntncntnttcttntcctntcnctccctcncttncttccctttccttcntcttttccncncntntttttncctttntcttttcnttttcccctcnttttttctcctcncttttncctcttctttcctttctcttcntcttcccccttctnttnctnccttccnttnctccnccttccnccttcntntcttncctnncctcctgnnnnctantcnccnnncttncccctcttctccnctttctctcncnngtntncntnncnnnncncccctcntctcttttcccccttcctccctnctattnttccnctcctcctnccnccctctctntntntcctncnctntctctcncctctntnnttccccnctcncctctctntgnnntnctcntctctccntctcnntcctctctn

SEQ ID NO: 8984 - DNA, 589 bp, Homo sapiens
  misc_feature 5, 6, 13, 29, 130, 131, 261, 356, 526, 528, 530, 535, 552,553, 567, 571, 573, 588: n = A,T,C or G
gaganntattttnaaccgggtgtcgaccncgcgtccgggataatcaccatctctttggtagtactttgttgggaattaaggatgatgatgcagatctgagtcaggctctttgtctggccatctccgtgtnngagatccttcaagcgaatcagctacaaggggaaggagtccggttctttgtggtggattgccgtcctgcagaacaatataatgctgggcatttatcaactgctttccacttagattcagacctgatgcttnagaatccatctgagtttgcacagtcagtaaaatccttgctggaagcacagaagcagtccattgagtctggctccatagctggtggggagcacctntgttttatgggcagtggcagggaggaagaagacatgtatatgaacatggtcctggcacactttttacagaaaaacaaagaattatgtgagtattgcccagtggaggatttatggcacctgcagcagcaccttggccagacattaatgtggatgggaccagaaaatggatntngncattngattggttagtaccctnnaggcttcaaaggancaantntcaatttctgttgang

SEQ ID NO: 8985 - DNA, 898 bp, Homo sapiens
  misc_feature 5, 557, 575, 628, 666, 707, 719, 721, 747, 751, 761, 780,798, 802, 805, 808, 815, 822, 823, 832, 836, 843, 847, 849,871, 873, 881, 887, 896: n = A,T,C or G
tatgngtatactactcactatagggcgaattggagctccccgcggtggcggcccgcccgggcaggtaccagaggaggagatggacgatcagagccatgcacctgtttcctgcaccccctgcgcactggttctatggccacaaggagtcttacccagtaaaagagtttgaggtgtatcctgagctgatggaaaatacctatgtgccgttcccttgtgggttggaccctttacgatgttcttcaatatccatgacccagactatgtcaagattctcctgaaaagacaagatcccaaaagtgctgttagccacaaaatccttgaatcctgggttggtcgaggacttgtgaccctggatggttctaaatggaaaaagcaccgccagattgtgaaacctggcttcaacatcagcattctgaaaatattcatcaccatgatgtctaagagtgttcggatgatgctgaacaaatgggaggaacacattgcccaaaactcacgtctggagctctttcaacatgtctccctgatgaccctggacagcatcatgaaagtgtgccttnagccaccagggcagcatncagttggacagtaccttggccgctctagaactagtggatcccccgggctgcangaattcgatatcaagcttattcgataccgtccaccttngagggggggcccgggacccaacttttggtcccttttatgangggtaaattgcncncttgggcggtaattcatgggccatancttntttcctgggntgaaaaatggtattccgcntcacaatttcccacaacnttcnaanccngggagcnttaaaanntaaagcctngggnggcttantgangngagcttacctccaataaattgngntgggctanttgccngtttccaancg

SEQ ID NO: 8986 - DNA, 918 bp, Homo sapiens
  misc_feature 86, 168, 189, 190, 191, 192, 195, 213, 218, 224, 227, 233,234, 240, 242, 243, 255, 274, 278, 282, 283, 285, 291, 292,293, 299, 311, 317, 320, 321, 324, 327, 340, 343, 348, 358,363, 366, 374, 397, 399, 406, 408, 413, 414, 429, 436: n = A,T,C or G
  misc_feature 441, 442, 444, 450, 454, 460, 468, 477, 479, 481, 485, 502,503, 504, 509, 510, 515, 517, 519, 521, 522, 530, 531, 532,536, 540, 544, 545, 548, 551, 554, 556, 562, 564, 569, 571,573, 579, 589, 593, 597, 602, 605, 635, 636, 640, 642: n = A,T,C or G
  misc_feature 644, 645, 653, 661, 663, 665, 666, 667, 668, 673, 678, 682,685, 694, 702, 703, 704, 705, 709, 713, 718, 721, 724, 725,726, 731, 735, 745, 761, 764, 772, 777, 778, 779, 786, 791,794, 800, 801, 804, 807, 808, 817, 819, 820, 821, 823: n = A,T,C or G
  misc_feature 826, 828, 830, 840, 844, 845, 848, 851, 852, 855, 857, 863,866, 876, 881, 882, 889, 890, 891, 892, 895, 900, 901, 903,907, 909, 910, 911, 913, 914, 915, 917, 918: n = A,T,C or G
cgaattggagctccccgcggtggcggccgaggtactagtaagttctgggtagggggtggatgagtcctaggagtggggggccccangcacacaggaaccatagttaaccactcttcacctacagaagagctcctcaggtcaaagcttcactgtacctgcccgggcggncgcccgggcaggtactaattnnnntanttttggtttaatttccangaaancgtaancanacaacnncaccgnanntctattaaatanttcccgtaatgtctgggcntggngcanntntgcctnnnaatttnatacactttggnaaggcnaanngangangaaatccctgacnttnggaanttttgggacnatacnggnccacatgngaactctgtcttttctaataaantncaaaatntngcttnntgtttaggccccganctctgtntatcnnanattttntttngagcgntgatgggncggaattancnantttnacccccactagggtggnnngtttnnaatanantncnnaatattgnnnaccntatntctnntanttnggncntaacantnaatanantnttggcntaaataatanttangatncaatntanatttatattcacctaaattttttccctttnnctcnantnntaatctanatgggtancncnnnntgctntgaanattnttngaattcttngctattannnncccnattnccctntangtnnngggcncttnttcccctatntatttttccccatctngtntgagaganatctnnnttccctnatggntgnattatnntangtnnataatcttngnnnanttntngnaaaatttatntttnnatnatnnttngnatattnttnatgatatcgnttttnnaatatgnnnnaantttgnncnggtnannngnnngnn

SEQ ID NO: 8987 - DNA, 643 bp, Homo sapiens
  misc_feature 12, 21, 24, 25, 26, 33, 55, 250, 251, 257, 260, 261, 298,308, 309, 317, 320, 321, 322, 323, 324, 326, 327, 330, 332,333, 336, 337, 340, 349, 350, 352, 353, 357, 358, 359, 360,362, 363, 365, 379, 380, 381, 382, 384, 385, 386, 388: n = A,T,C or G
  misc_feature 389, 390, 391, 393, 397, 398, 401, 402, 403, 404, 407, 411,418, 420, 421, 422, 427, 428, 429, 432, 433, 435, 436, 437,438, 439, 440, 441, 442, 443, 446, 448, 449, 450, 451, 452,453, 454, 455, 457, 458, 467, 468, 469, 470, 471, 472: n = A,T,C or G
  misc_feature 477, 484, 487, 489, 490, 491, 493, 494, 495, 496, 497, 498,499, 500, 501, 502, 503, 504, 505, 506, 507, 508, 512, 513,514, 515, 516, 517, 519, 520, 522, 523, 524, 525, 526, 527,528, 529, 530, 531, 532, 533, 534, 535, 536, 537, 538: n = A,T,C or G
  misc_feature 539, 541, 544, 545, 546, 547, 548, 549, 550, 551, 552, 553,554, 555, 556, 558, 559, 561, 570, 571, 572, 577, 578, 579,580, 581, 582, 583, 584, 585, 586, 587, 588, 589, 590, 591,592, 593, 594, 595, 603, 604, 605, 606, 607, 608, 609: n = A,T,C or G
  misc_feature 610, 611, 612, 613, 614, 615, 616, 617, 619, 620, 621, 622,623, 624, 626, 627, 630, 631, 636, 637, 640, 643: n = A,T,C or G
tgggtaccgggnccccccctncgnnnatacttnctatattaattaacgcgggggnagggtggcagtgggaggggctgtatggaagaggagctggggttcaggcattgtcttttttcctccttgtatataagaatgtatatttgatgcctcataaaagaccttgtgctcaaaaaaaaaaaaaaaaaaaaaaaaaaaaaaaaaaaaaaaaaaaaaaaaaaaaaaaaaaaaaaaaaaaaaaaaaaaaaaaaannagaaancannacaaaaaaaaaaaaaaaaaaaaaaaaaaaaaaccccncaaaaaaaanncaaactgnccnnnnncnnggnanngcnnaanccccccccnntnnaaannnncnncncccccccccccttnnnncnnntnnnnantaannccnnnnggngaanacccccncnnnccccnnnatnnannnnnnnnnaanannnnnnnntnnaaaaaagannnnnnaaaanaaaaaanccncnnnannnnnnnnnnnnnnnnaatnnnnnncnncnnnnnnnnnnnnnnnnnnanccnnnnnnnnnnnnntnncnaaaaaaccnnnaaaannnnnnnnnnnnnnnnnnntttttttnnnnnnnnnnnnnnnannnnnnannaannccccnnaancan

SEQ ID NO: 8988 - DNA, 590 bp, Homo sapiens
  misc_feature 37, 70: n = A,T,C or G
cacgcgtccgcctggctcagcctctcaagtgctgggnattacaggtgtgaggaattgcacctggcccagnactcttattaaagtaaaacaggatggaataggtaaaaaatgccagcagataatcaaaatattagcctaagagcccatgtgtaataccacaattcctagcaataatttgagttgagctttctcatattttcctttccatgtaaaagatactcatctcttccccttgtttaccatatccagccccactagctgccttttaggtttttgattaccacttaggatctggtatgcgaaattccttctgcctaaaaagcctttctccccagtcatcacattggtgtctccttgttgttcttttgttatagaacttaaccgtcattttttcagagaggttttctctcactaccctatccaaagtgctcagtgaatgttaattgctgtcatttattaaatgagatgtcccttgttattctttgtctgagcagcctgtatttccttcatagcattgaccacattttgtaatttcttttgtttattgtctgtctctacagctagattttaagttttgtgagtccggaaac

SEQ ID NO: 8989 - DNA, 896 bp, Homo sapiens
  misc_feature 587, 637, 649, 719, 730, 734, 735, 740, 745, 754, 755, 780,789, 793, 802, 804, 806, 819, 824, 825, 828, 835, 848, 851,858, 862, 869, 870, 871, 875, 885, 890: n = A,T,C or G
gtaatacgactcactatagggcgaattggagctccaccgcggtggcggccgcccgggcaggtacgcggggacattcagaggtgagcccagagcgggtaaagtggactggggagaacttcggaggatgttcatgtccaggagcagccccacgccctgtatggtcggtgtctagagcctcacagcaactaagaccaacccagctctcagaagaaggaatgtcaaaatgtcatgttcaattttacattcagtgcctggaatcttttcttcacaattgaaatgaaatgtgctgaaggaggtgaatccatgcattaatcttcagctcacaaaggaaatactacataagaagcaagaccacagactcaagacggacataattggattttttttgccatggcctggaaagaaaggtacctcggccgctctagaactagtggatcccccgggctgcaggaattcgatatcaagcttatcgataccgtcgacctcgagggggggcccggtacccagcttttgttccctttagtgagggttaattgcgccgcttggcgtaatcatgggcatagctgtttcctgtgtgaaattgggtntccgctcacaatttcacacaaccataccaacccgggaagcataaagtgtnaaagcctggggngcctaatgagtgagcttactcacatttaatttggcgttgcgcttacttgcccgctttttccaagtcgggnaaacctgtcgngccnncttgnatttnaatgaaatnnggcccacccccccgggggggagggnggggtttgncgtnatttggggngntnttttccctttctnccctnnacntgaatcncttgggcttcggncgnttcgggnttgnggggggnnngggntttaagtttnccttnaaaggg

SEQ ID NO: 8990 - DNA, 551 bp, Homo sapiens
  misc_feature 2, 499, 515, 518, 550: n = A,T,C or G
tnctcactatagggcgaattgggccctctagatgcatgctcgagcggccgccagtgtgatggatatctgcagaattcaggacttaatggtgatagaaatccccgtccaaggctgggaccatggcacaactcatctcatcaatgccgcaaagttggatgaagctaacttgccaaaagaaatcaatctggtagatgattactttgaacttgttcagcatgagtaccagctgagcggggagtttcccctagagaagccactctgggctggtttagactcagaactattcttcttaattggatctcttaatacttccatgaaacctcacatgacatttgcagtgagtgagatgatcaaagtgccttctgcactgccccagggaccaggccctcttccattcactaccaagacaggataccctcactcaagaagtggctgtgggatcaagagtctgatctggacctgaacatattcaaaacaccaggatttttccagcccagancctaatccctggtccnganttccagcacactggcggccgttactagtgganc

SEQ ID NO: 8991 - DNA, 641 bp, Homo sapiens
  misc_feature 265, 333, 336, 338, 339, 354, 373, 382, 438, 445, 452, 468,487, 515, 516, 517, 519, 520, 521, 522, 523, 524, 525, 526,527, 528, 529, 530, 531, 532, 533, 534, 535, 536, 537, 538,539, 540, 541, 542, 543, 544, 545, 546, 547, 548, 549: n = A,T,C or G
  misc_feature 550, 551, 552, 553, 554, 555, 556, 557, 558, 559, 560, 561,562, 563, 564, 565, 566, 567, 568, 569, 570, 571, 572, 573,574, 575, 576, 577, 578, 579, 580, 581, 582, 583, 584, 585,586, 587, 588, 589, 590, 591, 592, 593, 594, 595, 596: n = A,T,C or G
  misc_feature 597, 598, 599, 600, 601, 602, 603, 604, 605, 606, 607, 608,609, 610, 611, 612, 613, 614, 615, 616, 617, 618, 619, 620,621, 622, 623, 624, 625, 626, 627, 628, 629, 630, 631, 632,633, 634, 635, 636, 637, 638, 639, 640, 641: n = A,T,C or G
atcctatagggcgaattgggccctctatagcatgctcgaccggccgccagtgtgatggatatctgcagaattcgcccttagcgtggtcgcggccgaggtacgcgcttcagggccctgttcaactaagcactctactctcagtttactgctaaatccaccttcgacccttaagtttcataagggctatcgtagttttctggggtagaaaatgtagcccatttcttgccacctcccccgcgtacgccggggccattgctcagtaggnaaaatgtcctttctacaagcattcatatttcaataaaaaatctgcacttttgtgagttgagccccctnaanannacctacagaccctgncatgaacattttcattccnacttattantttccattttaccacttttggttctgggcaaacaatacctgcccggcgggcgtttnaaaggcnaattcanccactggggggcgttntaagggatccaacccgggnccaacttggggaaaatgggtaatttttnnngnnnnnnnnnnnnnnnnnnnnnnnnnnnnnnnnnnnnnnnnnnnnnnnnnnnnnnnnnnnnnnnnnnnnnnnnnnnnnnnnnnnnnnnnnnnnnnnnnnnnnnnnnnnnnnnnnnnnnnnnnnn

SEQ ID NO: 8992 - DNA, 818 bp, Homo sapiens
  misc_feature 2, 649, 664, 691, 694, 716, 723, 724, 746, 748, 760, 766,770, 774, 775, 777, 778, 779, 780, 781, 782, 783, 784, 786,787, 790, 795, 797, 799, 800, 801, 803, 807, 813, 815: n = A,T,C or G
tngggccctctagatgcatgctcgagcggccgccagtgtgatggatatctgcagaattcgccctttcgagcggccgcccgggcaggtacaatgatcctattttcctgaacagaaccctggctgaacggtattaaaattcaggttccaaaatgagccagtggtaaagaagaaatagagtggaaatttaacacatccatttattatacactgcaaaatgcaacagggacagatgccccatgatatttctcctcagctgtgatcactttctctacaatgttgaactagtggctcttgctctagggactatctggacaattacctgcagcttggagtcattacggagatgatcgtcaaggaactggctcatttgggttacactcactgctctgttcctaacttcctgtgtaaacaactctggagcttaaacttttcttatctatattataaaaatatgcaaataatttctaatatttagaaaagttatataattttaattctaaatgtaactgacagatggcggaatttctcccttttttggcaacactgtttttaaagtttagaataagagattttggtcatctcaatcactgcctctctctaaccctgggattcagcatgtttaagtcatccgaacactggtacctcggcncgcgaccacgccttnagggccgaaattccagcacacttgggnggnccggtacttagggggatcccancctcggnnacccaaagcttggcgtaatcantngggcaataaccntgggtnttcngagnnannnnnnnnannaanggggngnannngngagntaaacncntac

SEQ ID NO: 8993 - DNA, 906 bp, Homo sapiens
  misc_feature 3, 11, 17, 20, 23, 24, 496, 559, 631, 653, 679, 691, 718,720, 729, 731, 747, 752, 753, 758, 764, 766, 771, 778, 782,789, 790, 792, 793, 801, 807, 808, 815, 829, 832, 834, 850,867, 873, 886, 888, 902, 903, 905, 906: n = A,T,C or G
gtngatccgtntcgacntanttnntggctgattggagctccaccgcggtggcggccgaggtaccaggtgaacaaagtttaccagaaagcagttgagacaagaaaataagagctcaggatgagggaaaagaaaaagattgagagaatttgtgcccccaaccatttcctcagactctaagaaagaacacgctctctccaggcaggtctgaagctcaactctcttattgcctcacttcaggtatacctcactttacacaatagaattataactggaaagaagttggggacacatgtatttggtgattacattttaaacacattaggaaaagttgctatttgaactttttattgatttttggggggagtaaagaattattttgtgatgcaaataaatatcctttaattgatcgacttgccaaatttagatttgtgtgcatcaggctttcttttttttctttttttagagaagttcaatataagcttttcttttctttggnttctttctttctttatttttgagatgggagtctttgctctgtcgcccattgctggaagtgcantggccgccatcttcggcttcactgggaacccttccaccttctgggttcaaagccgaattctttttggccttnaacccttccccaaagcagtttngggacttacagggccgttggagcccncccatggccccnggcttaatttttttgttatttttttangnagaaaaaananggggtttcacccattntttanncccanggcttngntcttnaaaactncctngaccctnnanngccaattntgcccnncctgggntcttcctaaaatanccntnccccgggccgggcggnttttaaaaaataaggtnggaatnccccccgggcctngnagggaaattccaanntnn

SEQ ID NO: 8994 - DNA, 663 bp, Homo sapiens
  misc_feature 14, 34, 43, 62, 93, 620, 642: n = A,T,C or G
tatgttgaactatncttttgaatgtattactggnctggcaagnaagtatgccattgtagagnagtgaaaataagtgaaggcagaatcctgggnaggtaagccagcctgaagatattgatgacactggatggccttaagtttccattttgactggcatgtaatccagccaaagattcccacagaaatccgaggttccaaatggtaaatccgtggtgacattggggtgaccgagaaatgaactctgtgcagaaaggaatggtaacaacacttgtctcgtacaactttggctctaggtaggggaaaggaaaacagcttcctagagaaatgttaaccacaagctagccctcatgagagatttcagctaggatggatgctatctgtgtagtgcaaaaaaaaaaaaaaaaaatccatagccagattttgtgctttaatgtggacctaggtcaatagtgactgcaaagccagaagcagtggctcacccctgtaatcccagcactttgggaggccgaaggaggtggatcgcttgaggtcaggagttcgagaccagcctggccaacatggtgaaaccctatatctactaaaaatgcaaaaaaaaaaaaaaaaaaaaaaaaaaaaaagtncctgcccgggcggccgctctanaactagtggatcccccgggct

SEQ ID NO: 8995 - DNA, 859 bp, Homo sapiens
  misc_feature 27, 42, 248, 556, 568, 599, 636, 649, 660, 669, 687, 690,727, 728, 749, 767, 768, 775, 776, 783, 787, 788, 798, 802,813, 828, 838: n = A,T,C or G
ggcgaaacgactactatagggcgaatnggagctccccgcggnggcggccgcccgggcaggtacctgtgttgagaaaaggctttctttatcctaaagattattacctttttaaagtgctcttatattttcatgagtttttattttgtctctgagattttgtattccccattctagggtattctgtaatttggctccttaccaatattattaaaatcttattaaaatctaccccaaaaaaaaaaaaaaanaaaaaaaaaaagtacctcggccgctctagaactagtggatcccccgggctgcaggaattcgatatcaagcttatcgataccgtcgacctcgagggggggcccggtacccagcttttgttccctttagtgagggttaattgcgcgcttggcgtaatcatggtcatagctgtttcctgtgtgaaattgttatccgctcacaattccacacaacatacgaaccgggagcataaaagtgtaaagcctggggtgcctaatgagtgagctaactcacattaattgcgttgcgctcactgccccgctttccagcnggaaacctgccngccagctgcattaaagaatcggcccaacgcnccggggaagaggcggtttgccgtattggggccgcttntttccgctttctngcttacttganttcgcttgngctcgggtcggttcgggntgngggcgagccggtattcagcttcacttcaaaaggcggnnattcccggttatttccccagnaaatcaggggattaaccnnaggaaannaacattntganncaaaagggcnagcnaaaagggcccngaaccccttaaaaanggcccggttngctgggcgttttttccataag

SEQ ID NO: 8996 - DNA, 450 bp, Homo sapiens
  misc_feature 1, 290, 350, 381, 389, 398, 399, 407, 419, 420, 423, 426,431, 435: n = A,T,C or G
naatacgactactatagggcgaattggagctccccgcggtggcggccgcccgggcaaggtactttttttttttttttttttggaactttaaaatccctcaaaaactgtttattatacaagtgagttttgagtcacgatgggcttatcggtaggatttctggtagcgagcgcgggcaccagggcctccaaactttttggactcgcagcgacgagggtcagctaccagcagggtccggtcatactggatgaggatgtctttgatctccttcttggaagcctcatccacatantttctggtaataggccaccagggctttggagatggactgacggatagcataaatctgggncacgtgaccaccaccctttacatcggacacngaatggtntacacccannaaaattcnctccttgccgannaancanaaacntggncttccagcaggcttg

SEQ ID NO: 8997 - DNA, 494 bp, Homo sapiens
  misc_feature 481: n = A,T,C or G
tagggcgaattggagctccaccgcggtggcggccgcccgggcaggtaccaggtgaacaaagtttaccagaaagcagttgagacaagaaaataagagctcaggatgagggaaaagaaaaagattgagagaatttgtgcccccaaccatttcctcagactctaagaaagaacacgctctctccaggcaggtctgaagctcaactctcttattgcctcacttcaggtatacctcactttacacaatagaattataactggaaagaagttggggacacatgtatttggtgattacattttaaacacattaggaaaagttgctatttgaactttttattgatttttggggggagtaaagaattattttgtgatgcaaataaatatcctttaattgatcgacttgccaaatttagatttgtgtgcatcaggctttcttttttttctttttttaagagaagttcaatataagcttttcttttctttgnttctttctttctt

SEQ ID NO: 8998 - DNA, 662 bp, Homo sapiens
  misc_feature 20, 53, 567, 592, 618, 624, 633, 641, 650, 653, 662: n = A,T,C or G
tcactatagggcgaattggnagctccaccgcggtggcggccgagtactaaagnaatgtgcatttatttgtggggaggagaggaggtctaaatagacaataaacatataaatattaatattgtgaaagtggtatgaagaaaaataaagcatgataaggagagagaggtgttccctggctctccagggggctgaggtggaagaaaaggactccggttttaggtaagatatcagagaagacctctctgattgactgaaatgtatgcaaaggcctgcatgaagccagggaccatgccgtgctgacatctgggggaggattatcctcacagaggggaaaggaagtgcaaatgccgtgaggtgggaggaccatgtttggtatgttcagggaggaacagggaggccagtggggctggagcaggttcagccatgggaaggccaaagatgagatcaaagagaatagtgggagatcacgtagagatttatgggccattgtgaggattgtggcagcattgagaagactggttgatgcttaaaacaacagccattttatttaatatctcatgattttgnggtcaggaatgtggacagagctcanctgggagattgttccactccatgtancatcanaagacaggnctcttggngatattcanctngagaataan

SEQ ID NO: 8999 - DNA, 480 bp, Homo sapiens
  misc_feature 6, 9, 414, 458, 477: n = A,T,C or G
attggngcnccccgcgtccgctgcctcaggtgatccgcctgccttggcctccaaaaatgctggaattacaggcatgtaattccaaccttagacactcagtttaaaccctcttatcctatcttcactggaagagcaaagcaatctcctaccttgttttgtcaataagaagggaatattattaagccccagtaatcctgttgattaccatagtgggcatgtttctctagaagtaagtacgaatctttggggttccgatggcaagaatacagagtcatcaagctttagatgaaatctgtttggggaggtaaagcccagtaagttctttgctgcagttcttaattgtgagactcagtcttgtgatttggaaaagggctcgagtatcctgactctctaggctgagccaagatggggcangcctgagccagactgtctttgttctctgggctcctgcagggcancaggattgggtgtggaaancac

SEQ ID NO: 9000 - DNA, 855 bp, Homo sapiens
  misc_feature 3, 4, 16, 44, 392, 393, 394, 395, 396, 397, 398, 399, 400,401, 402, 403, 404, 405, 406, 407, 408, 409, 410, 411, 412,413, 414, 415, 416, 417, 418, 419, 420, 421, 422, 423, 424,425, 426, 427, 428, 429, 430, 431, 432, 433, 434, 435: n = A,T,C or G
  misc_feature 436, 437, 438, 439, 440, 441, 442, 443, 444, 445, 446, 447,448, 449, 450, 451, 452, 453, 454, 455, 456, 457, 458, 459,460, 461, 462, 463, 464, 465, 466, 467, 468, 469, 470, 471,472, 473, 474, 475, 476, 477, 478, 479, 480, 481, 482: n = A,T,C or G
  misc_feature 483, 484, 485, 486, 487, 488, 489, 490, 491, 492, 493, 494,495, 496, 497, 498, 499, 500, 501, 502, 503, 504, 505, 506,507, 508, 509, 510, 511, 512, 513, 514, 515, 516, 517, 518,519, 520, 521, 522, 523, 524, 525, 526, 527, 528, 529: n = A,T,C or G
  misc_feature 530, 531, 532, 533, 534, 535, 536, 537, 538, 539, 540, 541,542, 543, 544, 545, 546, 547, 548, 549, 550, 551, 552, 553,554, 555, 556, 557, 558, 559, 560, 561, 562, 563, 564, 565,566, 567, 568, 569, 570, 571, 572, 573, 574, 575, 576: n = A,T,C or G
  misc_feature 577, 578, 579, 580, 581, 582, 583, 584, 585, 586, 587, 588,589, 590, 591, 592, 593, 594, 595, 596, 597, 598, 599, 600,601, 602, 603, 604, 605, 606, 607, 608, 609, 610, 611, 612,613, 614, 615, 616, 617, 618, 619, 620, 621, 622, 623: n = A,T,C or G
  misc_feature 624, 625, 626, 627, 628, 629, 630, 631, 632, 633, 634, 635,636, 637, 638, 639, 640, 641, 642, 643, 644, 645, 646, 647,648, 649, 650, 651, 652, 653, 654, 655, 656, 657, 658, 659,660, 661, 662, 663, 664, 665, 666, 667, 668-848, 851-855: n = A,T,C or G
agnngacccgcgtgancgcgcgtaatacgacttactatagggcnaattggagctccaccgcggtggcggccgaggtactcggcctacttccctattttcaatgcctaatgatttttgctgcgcctgaacacatctggagggagccaggcccactggctgcctctcgtcccactccaggccctcctacaaaggtgcactcagcaaaccctccaagtacctgcccgggcggccgctctagaactagtggatcccccgggctgcaggaattcgatatcaagcttatcgataccgtcgacctcgagggggggcccggtacccagcttttgttccctttagtgagggttaattgcgcgcttggcgtaatcatggtcatagctgtttcctggaaaaannnnnnnnnnnnnnnnnnnnnnnnnnnnnnnnnnnnnnnnnnnnnnnnnnnnnnnnnnnnnnnnnnnnnnnnnnnnnnnnnnnnnnnnnnnnnnnnnnnnnnnnnnnnnnnnnnnnnnnnnnnnnnnnnnnnnnnnnnnnnnnnnnnnnnnnnnnnnnnnnnnnnnnnnnnnnnnnnnnnnnnnnnnnnnnnnnnnnnnnnnnnnnnnnnnnnnnnnnnnnnnnnnnnnnnnnnnnnnnnnnnnnnnnnnnnnnnnnnnnnnnnnnnnnnnnnnnnnnnnnnnnnnnnnnnnnnnnnnnnnnnnnnnnnnnnnnnnnnnnnnnnnnnnnnnnnnnnnnnnnnnnnnnnnnnnnnnnnnnnnnnnnnnnnnnnnnnnnnnnnnnnnnnnnnnnnnnnnnnnnnnnnnnnnnnnnnnnnnnnnnnnnnnnnnnnnnnnnnnnnnnnnnnnnnnnnnnnnaannnnn

SEQ ID NO: 9001 - DNA, 592 bp, Homo sapiens
  misc_feature 15, 16, 17, 27, 54, 55, 494, 525, 532, 569, 592: n = A,T,C or G
cgggccccccctcgnnntacttctagnaattaattaacgcgggccgtcagcggnngacagccacagcagttgtgtttctgtaaaggggcagtggatgtgtctttgattaatgaaaccttaatacgtggctgttagacaacctctcttcagctgctctgaaagaagacagatcccttcagacaggcttcagaaagacgggaaggaaagctggtgtacacccagtaccccactgggagacgtcctcagcaagcagccagagaagaggcacagcgcgggaacttctgctctaggggtaggaatgtggtgggacccatctctctccttggaagaatgtgggactctcgcctgctcactaaaaccaacacctgccgatgtgctaagagtcctcttgaagtcccaacaatagacatcaaagctgatgtttggaagttcagataacaaggaaagggagtttaaaaaaaaaaaaaaaaaaaaaaagcggccgccaccgcggnggagctccaattcgccctatagtgagtcgtnttacgcncgctcactggccgtcgttttacaacgtcgtgactggnaaaccctggcgttcccaacttan

SEQ ID NO: 9002 - DNA, 635 bp, Homo sapiens
  misc_feature 2, 3, 4, 5, 6, 7, 17, 18, 20, 27, 37, 43, 48, 55, 383, 492,494, 545, 547, 569, 574, 575, 587, 594, 601, 612, 613, 619,620, 621, 622, 623: n = A,T,C or G
gnnnnnnaggtttttannangatctcntttccgaatncccttntgtgntaaagtnctccagggaccaagaacaacaagatccactctctgtgctacaacgattgcaccttctcacgcaacactccgaccaggactttcaactacaacttctccgctttggcaaacactgtcactcttgctggagggccaagcttcacttccaaagggctgaaatacttccatcactttaccctcagtctctgtggaaaccagggtaggaaaatgtctgtgtgcaccgacaatgtcactgacctccggattcctgagggtgagtcagggttctccaaatctatcacagcctacgtctgccaggcagtcatcatccccccagaggtgacaggctncaaggccggggtttcctcacagcctgtcaagccttgctgatcgacttattgggggtgacaaccagatttgactctgggatggaatcaccttcccaagttgaacttttcncntggagtccttgggaataccggacgtgaaccttcttttataggtccaatggntnttgacccaattcttggaatttntgggnnaatcaacccccntcccggntaaaggngcatttcccannaaaaannnnnccctggaggttt

SEQ ID NO: 9003 - DNA, 475 bp, Homo sapiens
  misc_feature 1, 193: n = A,T,C or G
nggcgaattggagctccaccgcggtggcggccggcgggaggctgacgagagccgggaggcgttagcgaaggaagagaaaaaccgaagacgaagccactacagcgtcgcagcgcggcgcggcgtctgctttataggagagggcgcaggcccccgcgtacctcggccgctctagaactagtggatccccccggcntgaaggaaattcgatatcaagcttatcgataccgtcgacctcgagggggggcccggtacccagcttttgttccctttagtgagggttaattgcgcgcttggcgtaatcatggtcatagctgtttcctgtgtgaaattgttatcccgctcacaattccacacaacatacgagccgggagcataaagtgtaaagcctggggtgcctaatgagtgagctaactcacattaattgcgttgcgctcactgcccgctttccagtcgggaaacctgtcgtgccagctgc

SEQ ID NO: 9004 - DNA, 710 bp, Homo sapiens
  misc_feature 5, 35, 414, 429, 440, 448, 449, 457, 468, 473, 475, 495,500, 501, 511, 517, 532, 534, 547, 549, 553, 571, 588, 603,609, 610, 614, 636, 651, 652, 653, 658, 668, 669, 672, 683,685, 687, 694, 702, 710: n = A,T,C or G
tttanccagttccacgcgtccgcagattgatttcnagctgaataaattggcctagataccctcaaaaaaaaaaaaaaaaaaaaagggcggccgctagactagtctagagaaaaaacctcccacacctccccctgaacctgaaacataaaatgaatgcaattgttgttgttaacttgtttattgcagcttataatggttacaaataaagcaatagcatcacaaatttcacaaataaagcatttttttcactgcattctagttgtggtttgtccaaactcatcaatgtatcttatcatgtctggatccccgggtaccgagctcgaattaattcctcttccgcttcctcgctcactgactcgctgcgcctcggtcgttcggcttgcggcgagcggtttcagctcacttcaaagggcnggtaaatacgggttnttccacaaaantcaggggnntaaccccnggaaaaaaccntgtgngncaaaaagggccaccaaaaanggccnnggaacccttnaaaaanggcccgggtttgttngnggttttttcaatnangctncgcccccctttgcggggnttttaaaaaaaattccncccttaaatttaaangggggnnaaancccccgggggctttttaaaatncccggggttttcccnnnggganatcttctttnngcnttttttttccncntntggtttntaagaaanatttttcn

SEQ ID NO: 9005 - DNA, 671 bp, Homo sapiens
  misc_feature 95, 97, 99, 123, 155, 156, 189, 190, 191, 192, 193, 194,197, 199, 206, 214, 217, 218, 219, 232, 233, 235, 236, 237,238, 239, 244, 245, 253, 254, 255, 282, 283, 284, 289, 300,304, 305, 312, 313, 334, 341, 355, 356, 363, 370, 377: n = A,T,C or G
  misc_feature 378, 379, 384, 389, 395, 398, 411, 438, 439, 440, 441, 448,449, 450, 451, 452, 472, 473, 475, 476, 477, 479, 501, 505,506, 511, 519, 524, 525, 533, 535, 552, 566, 568, 569, 570,571, 572, 580, 589, 605, 606, 619, 640, 649, 650, 651: n = A,T,C or G
  misc_feature 652, 658: n = A,T,C or G
gagcttttcgtaatacacactcactataggttctgaattggagctccaccgcggtggcggccgcccgggcaggtttttttttttttttttttttnantntttttttttttttttttttttttntttttttttttttttttttttttttttttttnntttttttttttttggggaaaaaaaaaaaaaaannnnnnttnanaaagggncccccccnaannnaaaaaaaaaaaanncnnnnnttttnnaaaaaaannncaaaaaaaaaaaaaaaaaaaaaagggnnnaaaanaaaaaaaaacncccnntgaaaannaaaaaaaaaaaaaaagggggnaaggggnaaaaaaaaaaaaanncccccgnaaaaaanccccggnnnaaaanggggnaaaaanccnaaaaaaaaaaaangggccccccccccccaaaaaaaaaaannnnccccccnnnnnaaaaaaaaaaaaaaaaaggnntnnnanccccccccccccgggggggggncccnnccccnaatttttnccccnnaaaaaaangnaaaaacccccccccggnaaaaaaagggaaanannnnncccccggnaaaaaaagnaaccccccaaaaaaannaaaaaaaaaaaangggggaaaaaaaaaaaaaaanccccggggnnnnaaaaanaaaaaaaaaaaaa

SEQ ID NO: 9006 - DNA, 431 bp, Homo sapiens
gattgtaatacgactcactatagggcgaattgggccctctagatgcatgctcgagcggccgccagtgtgatggatatctgcagaattcgcccttagcgtggtcgcggccgaggtacctgccaggaaaaatagcagcccagccaccaggtggcaacctgcactattgaccagacacttggccagtttgatgttgggcaccgaggacctgaaggcagtgttgcacattccaatcaggcagagcagcagggcacccatggcgatcagcatgctgaggggtagggcaaactggaggacacgcaggtccagccggtcaactgatgagtacctgcccgggcggccgctcgaaagggcgaattccagcacactggcggccgttactagtggatccgagctcggtaccaagcttggcgtaatcatggtcattagctgtt

SEQ ID NO: 9007 - DNA, 787 bp, Homo sapiens
  misc_feature 5, 316, 322, 345, 346, 377, 378, 386, 400, 403, 420, 422,440, 446, 447, 454, 475, 484, 488, 513, 514, 516, 524, 543,549, 554, 557, 565, 579, 590, 602, 613, 615, 622, 632, 636,646, 654, 679, 691, 696, 701, 707, 711, 725, 726, 745: n = A,T,C or G
  misc_feature 748, 757, 769, 782, 786: n = A,T,C or G
gaatnggagctccccgcggtggcggccgcccgggcaggtacatatttgttgaatgacaaaatgaggggataaataaactttccctaagatgtgtatgtagacgtttgaaaatagaagtctgtcgctgatgtttctgtccaccaggagtcaggcttcagccaggaaagagtgagccagtgtctgagctgtctctcgccaggccttccaccagctccaggtcaccagattcaggccaagactgagtttcagtatttgtcgttaacctgtagtcccagctactcaggatgctgaggcaagatgattgcttgagcctganaggacnaggctgcagtgaactatgattgnnccatggcactccaacctgagtgacaggtcgnnttttcttnaggcccgtggactngtnctcaatgtcatccggcngnaggatgaccatgctgagntcctcnncttggtnaggcaagttccaacacacggnacttaaggncctngatgtagccatatgcaaatcttttnntntgatacantattttcacaggttttctngctttnttatncantctgaatngtcccgcgtacctngggcgctttanaactagtggatncccccggctgnangaattcnatattaaacntatngataccgtcnccttggangggggggccccggacccagcttttnggttccttttanggganggttnattggngccncttggccgtaaatnnggggtcataggctgtttcnctntgtggaaanttggttattccncttcacaaaattncccnc

SEQ ID NO: 9008 - DNA, 627 bp, Homo sapiens
  misc_feature 4, 5, 6, 7, 8, 29, 241, 439, 462, 484, 533, 574, 578, 613,616: n = A,T,C or G
cacnnnnntaagtgacactgatagatatncaactcagacatgcaagcttggtaccgagctcggatccactagtaacggccgccagtgtgctctaaagaacaatacttaggaaccacaactatgggctaaccagcataagtaacaaaagagtatatagtatgctgccaactttttgtctgcctgtcaactccaaccttcctaccatctgcaatcttcctaccatttaccaagtacaaaattngggggccccacctcacatcaggcaagggcagctcatttaaactctatttttatctctcctacacaatataccaagctgtctacaaggattgagtgaatccagatttcaaggtaaaaagaaagactaactgccacattaagccaaatctagaagcatgaaaaagatctacccctacagtaattaatctgaatcttgggncttcaaacctccaaaatttaggnccaatatactagaactttaggngttcctctttggaaaaaggaaaccagaactagatacttgtagcccacanaaccaacctgaaggactcttggaatcagggatgggtcactngggnaataattaagaacagggtcagccagacgcagtggntcntgcctgtatcc

SEQ ID NO: 9009 - DNA, 729 bp, Homo sapiens
  misc_feature 566, 593, 619, 621, 631, 641, 642, 654, 680, 690, 698, 709,715, 723, 725: n = A,T,C or G
ctatagggcgaattggagctccaccgcggtggcggccggggggacctcctcgtccaaagaagggaagaccttgtcggcaccattgagaggcgtgttctcttctggctgccgctcgagcaccgagagctccagctcgtctactggctgtgagggttgggccaggcccatgtgccggcagggaaagtctccccgcgtacctgcccgggcggccgcccgggcaggtaccaccagcgaggtctgggccactttaagtctagcattcttgtccacccagtcaccgatgatggctcccaggaccagaacagaccctgccaccaccagcccgtagactgctgtcaaaaggaggctgtttccatagagctctaccagaaacacagacaccgcaaagtgccacatccgatctccccaagtagagagagaatgaccaaggtagagaaggaattttgcagaggtcaggtagtcggccaaggatccacagcatcctctctggcggttgtgatctcccgccctggtcatgacactacgcgaccccgcttggctcttctgcgggctgtatcgcttgctgnttgctcttcgcttgaggtgcttgtttnaacaaggagtgcaagggaacttggananagggaccttnttaaaaaacnnaaacaagccttngggcaaaaaaagaacttccaaccgancgaacttttnggccaaanaaacaaaaaanaaaaanggggcccnangggt

SEQ ID NO: 9010 - DNA, 596 bp, Homo sapiens
  misc_feature 15, 16, 17, 27, 85, 596: n = A,T,C or G
cgggccccccctcgnnntacttctagnaattaattaacgcggggctctgcttaaaactcttcagaggttcaccatcgcttccagnaaaaagatcaatactcctgacgtggcaacctgtcgagactcaggaccgctaggaaatcagctcttgtttacccctctatccattacactacgatccagctgggtttaggcatcacttcctctgagcaatcctccctgatgtcatgaggcagtgctgagtgccttctctggaccctctgtttacttgcctgttaaatcctgaacatctggaagggagtcgtgttcagcaacatatctacgccttgcagcacggtgcctggcctgcagctggtgttccgtaaacagctgctgactgacgggatgcatcgccaattctagatttgagtcaattctagagaccaccatggtggagagtgcatatgcaggcacgccagttaactgatctggctgagcccagccctccagccatccctgccaaggtgtcaatgtgagtgaaaccatcttgaactctgcatattaacttattctccagctgaatatcaccaagagacctgtcttctgatgctacatgn

SEQ ID NO: 9011 - DNA, 613 bp, Homo sapiens
  misc_feature 2, 3, 4, 10, 11, 13, 14, 20, 22, 26, 30, 31, 38, 57, 69, 79: n = A,T,C or G
gnnntacatnngnnttatgngncagnccgnngttcctnccacaacaaccagtacagnatgtccagtagnacctactggnatatgcaggcctgcagctcaggggagagctgggttaagaaccgtcaaggcagtaatcatctgcatttagatggcgagtgaagccatgacaggggctgaaatggcccagcaagaataaatcaaaccatgagaaacacatacatttaagaataaggagatgtggtcaggcgcggtggctcacacctgtaatcccagcactttgggaggccgaggcgggtggatcacttgaggtcagtagtttgagaccagcctgggcaacctagtgaaatcccgtctctgctaaaaatacagaacttagctgggtgtggtggtgcgtgcctatagtcccagctgcttgggaggctgaggcacaagaatcgcttgaacccgggaggtggaagctgcagtgagccgagatcacaccaccgcactccagcctgggcaacagagaaacaccctgtctcaaaaaaataataataataaggagatgtcatgggctcgggggagggggaaatggggagcgctgttgtttgaatggtatagtttcagtttggga

SEQ ID NO: 9012 - DNA, 958 bp, Homo sapiens
  misc_feature 3, 590, 630, 647, 662, 709, 727, 732, 769, 788, 835, 863,880, 919, 928: n = A,T,C or G
tangactactataaggcgaattggagctccccgcggtggcggccgcggtctcggtcactcgaataacccgacatggcgtcaatggttgcggttggcggggaacgaagtatatagaaaagcgtgcgacaagtcgctggaaatggcctcgatgacggcgaagccttgcgggggcggcagcggaggaaggacaccgatgacccagcccggagctgcactactagagaccggtagaaatgaatgaggtccccgcgtacctcggccgctctagaactagtggatcccccgggctgcaggaattcgatatcaagcttatcgataccgtcgacctcgagggggggcccggtacccagcttttgttccctttagtgagggttaattgcgcgcttggcgtaatcatggtcatagctgtttcttgtgtgaaattgttatccgctcacaattcccacaacatacgagccggggagcataaagtgtaaagcctggggtgcctaatgagtgagctaactcacattaattgcgttgcgctcactgccgctttccagtcgggaaacctgtcgtgccagcttgcattaatgaatcggccaacgccncggggagaggcggtttgcgtattgggcgctcttccgcttnctcgcttacttactcgntgcctcggtcgttcngcttgcggcgagcggtatcagcttactcaaaggcggtaatacggtantcacagaatcaagggatncgcangaaagaacatgttaaccaaaagccagcaaaaggccangaacccgtaaaaaggccgngtttgctggcgtttttcattaggctccgccccctgaccaagcatacnaaaatgcgctcaatccaaagtggggaanccgacaggacttttaantccagcctttccctggagctccttgtgcgctttctttcnaaccttccnttacggatcctgccgctttttccttcggaa

SEQ ID NO: 9013 - DNA, 618 bp, Homo sapiens
  misc_feature 2, 6, 18, 19, 20, 30, 31, 76, 189, 616: n = A,T,C or G
tnttgngctgcccttggnnnacttttcagnntatcagtgtgctaattagtgcacttattatctactttaagccagnatataaaatagccgacccaatctgcacattcatcttttccatcctggtcttggccagcaccatcactatcttaaaggacttctccatcttactcatggaaggtgtgccaaagnagcctgaattacagtggtgtgaaagagcttattttagcagtcgacggggtgctgtctgtgcacagcctgcacatctggtctctaacaatgaatcaagtaattctctcagctcatgttgctacagcagccagccgggacagccaagtggttcggagagaaattgctaaagcccttagcaaaagctttacgatgcactcactcaccattcagatggaatctccagttgaccaggaccccgactgccttttctgtgaagacccctgtgactagctcagtcacaccgtcagtttcccaaatttgacaggccaccttcaaacatgctgctatgcagtttctgcatcatagaaaataaggaaccaaaggaagaaattcatgtcatggtgcaatgcatattttatctatttatttagttccattcaccatgaanga

SEQ ID NO: 9014 - DNA, 466 bp, Homo sapiens
  misc_feature 2, 3, 4, 5, 6, 9, 10, 11, 12, 411, 466: n = A,T,C or G
gnnnnnggnnnnggccgctatcgactactatagggcgaattggagctccccgcggtggcggccgcccgggcaggtaccctagactctctttggaggactcccaagggctcctgaagctgctttgccctcctttgcagagagcaagaggtgccagggatttatgtcctggcagggcagtgctggatcaatgacttagtaggaggtctggaaagcctagtgcccttgccttgagtctggacacactttggagttgcagttcacatccaggctgcagctggggctctcccagcacttccttcagtcacacacacatggattcttgtcttggtgtctggtttgggggaacctgacttaagtcacttttgtggacattttgggagaggcaggttatttcaagcccggcaaccaggnaactagactgaatgcaatcctcccacatccaaggtcccccgcgtacctcggccgn

SEQ ID NO: 9015 - DNA, 912 bp, Homo sapiens
  misc_feature 87, 91, 165, 174, 177, 194, 209, 239, 254, 268, 306, 317,324, 332, 395, 407, 411, 425, 427, 428, 430, 442, 445, 454,467, 472, 485, 493, 508, 512, 518, 527, 548, 550, 556, 557,559, 566, 570, 571, 572, 577, 589, 590, 593, 603, 620: n = A,T,C or G
  misc_feature 621, 626, 630, 653, 659, 663, 671, 677, 689, 693, 701, 706,711, 716, 731, 735, 741, 764, 766, 769, 790, 791, 794, 815,821, 822, 832, 844, 848, 864, 865, 872, 875, 887, 894, 897,898: n = A,T,C or G
ggagctccaccgcggtggcggccgaggtactttattttttttttttttttaatagagatggggtttcatcatgttggccaggctggnctcnaactcctgacctcaggtgatctacctgcctcggcctcccaaagtgcagggattacaggtgttagtgagccaccncggccgctntanaactagtggatcccccnggctgcaggaattcnatatcaagcttatcgataccgtcgacctcnagggggggcccggtncccagcttttgttncctttagttgaggggtaatttcgcccttggcgtaatcntggtcataagntgttttncttgtgtnaaatttgttattcccgctcacaaattttccacacaacataccgagcccggggagcatttaaantgttaaaagccnttgngggtgccctaatgnanntngagcctaaactnacntttaaattngcgattgcgcctncactngccccgctttttncagttcangggaaaacctttttngggnccaaancttgcattntaattgaaatttggggcccancncccccnngngaaaaangccnnnttttncctaatttgggnnccnttttttccgncttttccttgggttcannttaanattngtatagggccttgggggcgtttncgggtntggnggggaaangcgggntttatgtttttnttcnaaaagggnggggnaattnccggngtttttcccaaaaanttangggggnttaaccccccggaaaaaaaattntntgnccaaaaagggccccccccaannggncggggaaaccccttaaaaaanggcccnnttttttgggngttttttttcanaagngttcccccccccccgnncgggcanttntaaaaaaatggnacccccnaanntaaaaaggggggcg

SEQ ID NO: 9016 - DNA, 627 bp, Homo sapiens
  misc_feature 2, 3, 4, 5, 6, 7, 8, 9, 15, 22, 24, 35, 36, 70, 79: n = A,T,C or G
gnnnnnnnnccccgncgtccgngnccttttgtagnnttgatgttggtgtcactggccttcctgtttcagnattccaggnatcatagctggtcttgtgcttcagaaagatttttctgtgtaccgcccagcagatggtgacatgcgaatggtgatagtaacagaaaccattcagcctcttttttccacttctggatcagagtttattctaaattcagaagcacagtttcagacatctcaattttggattatggaaaagacaaaagcaataatgaaacatctacatagtcagaatgtaaaattgctcatatctagtgtgaaacaaccagatttagttagttattatgcaggggtgaatggcatatcagtggttgagtgtttatcatcagaagaagtttctcttatccggaggatcattggtctttctccatttgtaccaccacaggccttttcgcagtgtgaaatacctaacactgctttggtgaaattttgtaaacctcttatccttagatccaaaagatatgttcatctaggcttgataagcacatgtgcatttataccacactctatagttcctttgtggaccagtgcatgggtctcatttgaaccaacatgaggatgcctttacat

SEQ ID NO: 9017 - DNA, 493 bp, Homo sapiens
  misc_feature 2, 35, 224, 228, 297, 393: n = A,T,C or G
gngagctaacactacttagggcgaattggagctcnccgcggtggcggccgcccgggcaggtacgcgggggcgcgacgttcggttcgctgtgtgtgtcgccggctccttgagggtccatgtgatttttacgccagtgctgctgaactgtgcagggtagggagctggcacagtccgattaattgtccttgggtcgaggtgtctcgtcggaccctttggggcttcantggnagaaattaaggcagagtcactgtaattatttctaataccaattccaaaatagtgactcttggacaatangtgcaattatatggaattatggctggttataagcctgtagctattcagacatatcctatacttggtgaaaaaatcacccaagatacactgtacctnggccgctctagaactagtggatcccccgggctgcaggaattccgatatcaagcttatcgataccgtcgacctcgagggggggcccggtacccagcttttg

SEQ ID NO: 9018 - DNA, 459 bp, Homo sapiens
  misc_feature 2, 3, 4, 7, 8, 15, 39, 101, 102, 432: n = A,T,C or G
gnnnatnnttgatcnctttttagggcgaattgggccctntagatgcatgctcgagcggccgccagtgtgatggatatctgcagaattcgccctttcgagcnnccgcccgggcaggtacgcggggctttttcgtctgggctgccaacatgccatccagactgaggaagacccggaaacttaggggccacgtgagccacggccacggcccgcataggcaagcaccggaagcaccccggcggccgcggtaatgctggtggtctgcatcaccaccggatcaacttcgacaaatatgaacagacacgggtgaatgctgctaaaaacaagactggggctgctcccatcattgatgtggtgcgatcgggctactattaaagttctgggaaagggaaagctcccaaagcagcctgtcatcgtgaaggccaaattcttcancaggagagcttgaggagaagattaaga

SEQ ID NO: 9019 - DNA, 604 bp, Homo sapiens
  misc_feature 5, 7, 8, 21, 28, 36, 62, 423, 430, 454, 460, 479, 495, 499,510, 512, 519, 540, 545, 546, 547, 548, 549, 550, 551, 552,553, 554, 555, 556, 557, 558, 559, 560, 561, 562, 563, 564,565, 566, 567, 568, 569, 570, 571, 572, 573, 574, 575: n = A,T,C or G
  misc_feature 576, 577, 578, 579, 580, 581, 582, 583, 584, 585, 586, 587,588, 589, 590, 591, 592, 593, 594, 595, 596, 597, 598, 599,600, 601, 602, 603: n = A,T,C or G
gcgtncnngtactcactctgntggcctnattggaanctccaccgcggtggcggccgctctancaactagtggatcccccgggctgcagggaattcgatatcaagcttatcgataccgtcgacctcggagggggggcccggtacccagcttttgttccctttagtgagggttaattgcgcgcttggcgtaatcatggtcatagctgttttcctgaagaatacattatccgcaacaggctggttcagttaacattttaaaagtgcaattccaggcttacagaatgttaaagtggatggagtcttatatcagctggtctcatggttttcagattgctcggagactccaaagctgttccaaggaggtgactcaatattaatatttttacacggccgctctagaactagtggatcccccgggctgcangaattcnatatcaagcttatcgataccgtcnacctcnaggggggcccggtacccancttttgttccctttantganggttaattgcncncttggcntaatcatggtcatagctgttncctgnnnnnnnnnnnnnnnnnnnnnnnnnnnnnnnnnnnnnnnnnnnnnnnnnnnnnnnnnnnc

SEQ ID NO: 9020 - DNA, 435 bp, Homo sapiens
gcgattggagctccccgcggtggcggccgcccgggcaggtacacgaaggtgctgctcaggaggacggccagggcgaagatccaggagtcattctggttgtcacccttctctacatctcccagaccctcggtgtccagcagaactaggatgtggcctggcttcttggggtggggcacacaccacatccagattcctttagtgtgagactgcaccgtggagcccagagagaagccctttttctttccagccagcttgttcatcaggtaggatttgcctgtgcggtagaggcccacaattgccaccaccaccataggctgtgtaatggcagaaaggatcttcagagcttctggattcgccatcagtcgcccattagtgttctcaatgaggcacattgggcctgtcatgtggatctctgatgccatgtccaggctgttc

SEQ ID NO: 9021 - DNA, 1125 bp, Homo sapiens
  misc_feature 3, 5, 6, 8, 9, 11, 18, 20, 27, 29, 34, 40, 41, 42, 44, 45,54, 55, 56, 57, 63, 66, 69, 73, 74, 75, 84, 88, 90, 94,95, 103, 104, 106, 108, 111, 117, 118, 127, 137, 149, 416,499, 524, 537, 566, 604, 612, 614, 632, 639, 665, 670, 674: n = A,T,C or G
  misc_feature 698, 705, 715, 727, 748, 749, 761, 764, 776, 786, 788, 790,806, 810, 828, 836, 840, 853, 855, 856, 861, 882, 883, 888,889, 892, 895, 898, 899, 900, 908, 909, 912, 931, 935, 942,943, 944, 947, 954, 955, 956, 959, 960, 962, 963, 966: n = A,T,C or G
  misc_feature 967, 972, 973, 979, 980, 981, 983, 987, 999, 1006, 1008,1013, 1020, 1023, 1026, 1027, 1029, 1033, 1039, 1054, 1060,1069, 1070, 1073, 1074, 1075, 1084, 1085, 1088, 1089, 1096,1098, 1106, 1108, 1112, 1113, 1118, 1124: n = A,T,C or G
ccncnntnncngtattgncnatttttntntatantatttnnntnntttttattnnnnactttngtntanatgnnnttatttatnttancntctnngaaggggnngngnttnttacgnntcactatanggcgaattgnagctccaccgcngtggcggccgcccgggcaggtactttggcctccctgggatagaagttattcagcaggcacacaacagaggcagttccagatttcaactgctcatcagatggcgggaagatgaagacagatggtgcggccacagttcgtttgatatccactttggtcccagggccgaaagtgggaggccagttatcatactgctgacagcaataaactgcaaaatcatcagactgcaggctacttgatggtgagactgaactctgtcccagacccacntgccactgaacctggcttgggataccaagttggccctggtgggatgccacccatagatgagggagccctggggagccttggcncaggttttttttgctgggttacctngggcccgctctangaaactagttgggatcccccgggcttgcnagggaatttcgatatcaaagctttattcgatacccgtncgaccctngnagggggggggcccggttnccccaanctttttgtttcccttttaagtggaanggttnaatntgccccgcctttggcggtaatacnattgggncattagctgnattcccttgtgntgaaaaattgtttattctcgnntcaacaaatttncancacaacattacngaagcccggngnangcattaaaaagtgtanaaangcccttggggggtggccnttaaatgnaggnggaatcctaaacntnnacaanttaattttggcgttttgcggnnttcannttnggnccnnntttttcanngtncgggggaaaaaacttggtntggnggccccnnnttnccttttnnntgnnanntcnngctcnnacctcnnncngtgngaataaaggcangtttttncngtatntttgggngcntcnntnttancccgtnttgcttttgctttcnacatgnaaatttatnnagnnnttggggtanntcnnctgtttngnggactttntntagnntttcnatttcnc

SEQ ID NO: 9022 - DNA, 611 bp, Homo sapiens
  misc_feature 611: n = A,T,C or G
tcactatagggcgaattggagctccaccgcggtggcggccgaggtaccaatccaaatagttgtatccattactatgcaggaggctctgactagacctgcaggagatggaggccggctctccaggggtgacgggcagggagagtggagactgagtcatcacaatatccccactggatccagagacccagagcattagcagccccaggagctgagcagggagcctcattgtgagaaggtgaactgaggagtcctgatcagtccccgcgtacctgcccgggcggccgctctagaactagtggatcccccgggctgcaggaattcgatatcaagcttatcgataccgtcgacctcgagggggggcccggtacccagcttttgttccctttagtgagggttaattgcgcgcttggcgtaatcatggtcatagctgtttcctgtgtgaaattgttatccgctcacaattccacacaacatacgagccgggagcataaagtgtaaagcctggggtgcctaatgagtgagctaactcacattaattgcgttgcgctcactgcccgctttccagtcgggaaacctgtcgtgccagctgcattaatgaatcggccaacgcn

SEQ ID NO: 9023 - DNA, 595 bp, Homo sapiens
  misc_feature 3, 7, 8, 40: n = A,T,C or G
ggngtcnncccgcgtccgcgttggttctgtgcgcctcagnatataatgtctcaggaaggcgattatgggaggtggaccatatctagtagtgatgaaagtgaggaagaaaagccaaaaccagacaagccatctacctcttctcttctctgtgccaggcaaggagcagcaaatgagcccaggtacacctgttccgaggcccagaaagctgcacacaagaggaaaatatcacctgtgaaattcagcaatacagattcagttttacctcccaaaaggcagaaaagcggttcccaggaggacctcggctggtgtctgtccagcagtgatgatgagctgcaaccagaaatgccgcagaagcaggctgagaaagtggtgatcaaaaaggagaaagacatctctgctcccaatgacggcactgcccaaagaactgaaaatcatggcgctcccgcctgccacaggctcaaagaggaggaagacgagtatgagacatcaggggagggccaggacatttgggacatgctggataaagggaaccccttccagttttacctcactagagtctctggagttaagccaaagtataactctggagccctcc

SEQ ID NO: 9024 - DNA, 917 bp, Homo sapiens
  misc_feature 3, 4, 10, 11, 20, 25, 29, 31, 37, 106, 107, 108, 123, 153,183, 375, 411, 415, 419, 423, 424, 428, 431, 443, 446, 447,448, 449, 451, 454, 455, 463, 469, 486, 488, 489, 491, 497,499, 506, 508, 513, 515, 520, 521, 522, 524, 525, 532: n = A,T,C or G
  misc_feature 538, 539, 544, 545, 553, 554, 556, 557, 560, 570, 580, 582,583, 584, 586, 587, 600, 605, 611, 612, 613, 620, 621, 622,627, 637, 638, 645, 646, 649, 650, 651, 652, 658, 661, 663,670, 673, 678, 681, 689, 692, 696, 705, 709, 710, 711: n = A,T,C or G
  misc_feature 717, 718, 722, 723, 729, 731, 733, 745, 746, 747, 748, 749,751, 753, 754, 758, 766, 768, 774, 779, 781, 785, 788, 789,790, 791, 792, 793, 794, 795, 796, 797, 803, 807, 809, 810,814, 815, 818, 820, 824, 825, 828, 829, 831, 832, 834: n = A,T,C or G
  misc_feature 838, 840, 841, 845, 846, 853, 854, 858, 861, 862, 866, 867,868, 870, 871, 872, 873, 874, 875, 876, 877, 878, 879, 880,881, 885, 886, 887, 888, 889, 890, 891, 892, 893, 894, 895,896, 897, 898, 899, 900, 901, 902, 903, 904, 905, 906: n = A,T,C or G
  misc_feature 908, 909, 910, 911, 912, 913, 914, 915, 916, 917: n = A,T,C or G
agnngaattnnatacaactnatctnagtntngtcgantggggccctctagatgcatgctcgagcggccgccagtgtgatggatatctgcagaattcgcccttagcnnnggcccggccgacgtncatgcaagctactcttgctctttggatccntggctgaatctggacaccagcagtgaccanctctagagtaaaaaaatcaggaagggggctggccacactgggttggagaatcagacttggggataccatgccatgaggtgtgtggcctctgggcaacaaaacaacaccagtttagactcatctccttgaaacagaaggaaaagccaggcttgaaaacatgggttagaacaaggaatcttgggccaagcgcantggctcaggcctgtaaatctcagcactttggggaanctcnaaantttnngttnttnaaggaccttganaannnntnctnncaacgggnaatttnaaaaaaaaagtggggcncnnancttggntngaaaatngnagaangnaactnnncnnttaactngggttnntaatnnaatcttanngnnggnatggctttcnccccaaaacnannnannatttttttggggncccangccccnnntcaaaannnggggntttttttttnnttcaaannggnnnncttttnacngnttttttnacntttgnccnaaaaaaanaancttncaaaattgncccnnnggcccnncaanngggggnananttgggggttttnnnnncntnnggcnggggaccncncctaanggggngnaaanttnnnnnnnnnnttgggngggncnntttnnttntngggnnccnnanntngggncnnaaannttggggnnaaanaanngggnnnannnnnnnnnnnncggnnnnnnnnnnnnnnnnnnnnnnannnnnnnnnn

SEQ ID NO: 9025 - DNA, 666 bp, Homo sapiens
  misc_feature 4: n = A,T,C or G
tttngcctactgacagcaactttttaagccccaggatcagctttctgccctgcagttgctggtctacctgatgccaccctgccacagtgataccctggagcgtctgctgaaggccctgcataaaatcactgagaactgcgaggactcaattggcattgatggacagttggtcccaggcaaccgtatgacttccactaacttggccttggtgtttggatctgctctcctgaaaaaaggaaagtttggcaagagagagtccaggaaaacaaagctggggattgatcactatgttgcttctgtcaatgtggtccgtgccatgattgataactgggatgtcctcttccaggtgcctccccatattcagaggcaggttgctaagcgcgtgtggaagtccagcccggaagcacttgattttatcagacgcaggaacttgaggaagatccagagtgcacgcataaagatggaagaggatgcactactttctgatccagtggaaacctctgctgaagcccgggctgctgtccttgctcaaagcaagccttctgatgaaggttcctctgaggagccagctgtgccttccggcactgcccgttcccatgacgatgaggaaggagcgggtaaccctcccattccggagcaagaccgcccattgctccgtgtgccccg

SEQ ID NO: 9026 - DNA, 533 bp, Homo sapiens
  misc_feature 2, 3, 4, 5, 6, 7, 8, 9, 10, 15: n = A,T,C or G
gnnnnnnnnnatacnactactatagggcgaattgggccctctagatgcatgctcgagcggccgccagtgtgatggatatctgcagaattcgccctttcgagcggccgcccgggcaggtaccacaatcacaaatgcagcactgtttactgacaggaccattactctgtcaaaatcagcacatcaaaaatattatcctggaatctaaaatagtagtcaactgggttgttaaagcaagggattgctatagatctacaggacaaagttccatagtgaaacacaaactcctgggttagtcctaggccaggcaggtgaccataaatgttcacattctggtagaatcccattttctaaaaattatacaaacacatcgaaatcactagattttatatatatatacacacacacacacttatgtgtatatatacatatacgtattttgtgtgtgtgtgttgtgtttccagcagctaatagcagctaacatttattgagcacttaccacatgccaggaactgtgctaagtacctcggccgcga

SEQ ID NO: 9027 - DNA, 469 bp, Homo sapiens
  misc_feature 3, 6, 9, 15, 17, 19, 22, 24, 27, 37: n = A,T,C or G
ggngangtnatgatncnanaancnatnccttttgcancgaccctcggatccctagtaacggccgccagtgtgctggaattcggcttcgagcggccgcccgggcaggtaccctttccaaggtgaccttcagggggattaaccttcctagctcaagcaatgagctaaaaggagccttatgcatgatcttcccacatatcaaaataactaaaaggcactgagtttggcatttttctgcctgctctgctaagacctttttttttttactttcattataacatattatacatgacattatacaaaaatgattaaaatatattaaaacaacatcaacaatccaggatatttttctataaaactttttaaaaataattgtatctatatattcaattttacatcctttttcaaaggctttgtttttctaaaggctttgttttcctttttattatttttttcttttttatttttttga

SEQ ID NO: 9028 - DNA, 857 bp, Homo sapiens
  misc_feature 612, 693, 700, 718, 723, 727, 743, 772, 773, 774, 805, 810,838, 855, 856: n = A,T,C or G
tactatagggcgaattgggccctctagatgcatgctcgagcggccgccagtgtgatggatatctgcagaattcgccctttcgagcggccgcccgggcaggtacctagcttttattcattttattattcatctttattgctttcattgcacatgctgttaacttcttatgaactctttgttctaataaataagcatatccaggtttttcataaataaatgaggagtctataaattcttactagttttaatagaaacattgccactaaaatggtgtattctagctgtgtgagcttttggaaaatgttttcatttcctttatgtttgaatgttccttccaggtctttgaaaatatacattctgagttgaaaagctttataataggtaaaactcattaacccatatactttccatgctgggcacagcaggtgtggtaggtagaaatataagatgactcccaagatttttgcaccctggcatacacatatgcttttccagttgttgaaacactaatttaggtgctgctgggaagggattttgtagatgtgaataatgttccaaatcagttggccttaagaaagaaagatgaacctggatgggccagatcttatcagntgagtcccttaaagggaacagcccctttctggcaaagagattcaaagccttgaaaggattaaaaaatggagagaagaattntcttttngccagctctgggaaaaanagaanggcnacgtgggaaagtcgtncaagggggccctttagttgctggagagcnnntcccaggtaagaacccaccagggaaaatatngcttncagggagatgaatctggccccactatgnaagcttggaaaggaccnnt

SEQ ID NO: 9029 - DNA, 914 bp, Homo sapiens
  misc_feature 1, 2, 3, 4, 5, 6, 7, 8, 9, 10, 11, 12, 13, 14, 15, 16, 17,18, 19, 20, 21, 22, 23, 24, 25, 26, 27, 36, 38, 40, 41,45, 46, 49, 51, 54, 71, 73, 92, 94, 95, 120, 735, 751, 755,760, 764, 794, 795, 799, 800, 803, 815, 817, 826, 829, 830: n = A,T,C or G
  misc_feature 832, 833, 836, 837, 848, 849, 853, 861, 867, 875, 879, 893,899, 904: n = A,T,C or G
nnnnnnnnnnnnnnnnnnnnnnnnnnntttttttcntntnnggannccntntcncgcgtccggcctgcacngnactgggtaataattaatancnntgtgttctgaacatcaacacaaagnggaagaaccttaagctgaaggtacagtatattatttacactgaaggggcttgtgtgtggacaagaaagcgctgacagctcaaatggatcccatggaactgagaaatgtcaacatcgaaccagatgatgagagcagcagtggagaaagtgctccagatagctacatcgggataggaaattcagaaaaggcagcaatgagcagtcaatttgctaatgaagacactgaaagtcagaaattcctgacaaatggatttttggggaaaaagaagctggcagattatgctgatgaacaccatcccggaaccacttcctttggaatgtcttcatttaacctgagtaatgccatcatgggcagtgggatcctgggcttgtcctatgccatggccaacacagggatcatactttttataatcatgctgcttgctgtggcaatattatcactgtattcagttcaccttttattaaaaacagccaaggaaggagggtcctttgatttatgaaaaattagggagaaaaggcatttggatggccgggaaaaaaattgggagcttttgttttccattacaatgcagaacattgggagcaaatgtcaagctacctcttttatcatttaatntgaactaccctgaagnaatnagaancttnatgggactttgaaaaaaaatactggagaanngggnnctnaagggcaacctncntcatcatanttnngnntgnnggaaataattnnttcnctttccgntccttnaaaaattnaggntatcttgggctatncccagnggganttttttcttt

SEQ ID NO: 9030 - DNA, 482 bp, Homo sapiens
  misc_feature 9, 401, 457, 458, 459, 460, 461, 462, 463, 465, 466, 467,468, 471, 472, 473, 477, 479, 480, 481: n = A,T,C or G
ctgagggcnaattggagctccaccgcggtggcggccgaggtacatggtctttgaactctcgtgtcgaaagagttgaacacaactaaactttaatgtgaaaaggtctcaagtagttaatcagaaatgagaggcgcacatagcattttatactgttttcgatttgctgacacaacatcattctgtgctctctagtgagcaagagtaatcctcaatagcattaagacgaaaggctgaacacaaaaccgcaggcaagtcaagtagtgattttattctttttgtcatttttctttcaagtggaagatccctaacactctctgctcctgacaatgtttataaacagaactctgagaagcatctgaatgtaaaaaaaaataggtctctccaacaaactgtgatagacnatcaaccagctgagtcctcttccagatgacatggggttggaagtacctgcccgggnnnnnnntnnnnatnnngatngnnnc

SEQ ID NO: 9031 - DNA, 517 bp, Homo sapiens
  misc_feature 2, 3, 4, 9, 10, 16, 30, 34: n = A,T,C or G
gnnnaccgnnatagcnactactgttaggcnaatnggagctccacccgcggtggcggccgccgggcaggtacgcgggatgtccctgaagtcctccaggcccacacctccacccgccttctgtcctgtatctgcggaaatatttattttctgtaatgaactttcttggggctccagacaccctctcagcctcttcccacacagaactttgcctacacattcctactacccctggaattctaactcagatgtgggtagcagcttcctcaaagagaaacttttcccagctgggtgctgtggctcacacctgtaatcccagccctttgggaggctggagtgggcagatcgcttgagcccaggagtttgagatcagcctgggcaacatggtgaaactccatctctgtgaaaaatacaaaaattagccaggtgtggtggtgcgcgcctgtaatcccagctactagggaggctgaggtgggaggattgcttgagcccaggaggttgaggctgcaatgggctgcga

SEQ ID NO: 9032 - DNA, 457 bp, Homo sapiens
  misc_feature 7, 8, 457: n = A,T,C or G
gagcgcnntgtaataccgacctcactatagggcgaattggagctccaccgcggtggcggccgaggtacaaaggttcagtggtgagaagagggagcaaggcctttggaataatgaactccagttgttcctcataggtgcagcagaaatagcgagaggtcaggattatggagattggtaaggcgagatcatccaagggccttttgcttggtaagccattttactttaatcttgagtgccatagggattcattgacggattgatacagggaaatgaaatgattttttttttttttggttgggggagacaagagtcttgctctgttgcccaggctggagtgcagtggcacaacgtcggttcactgcagtgtctgcctcccaggttcaagcaattctcatgcctcagcctaccttgtagctgggattacaggtgcacaccaccacacccagctattttttan

SEQ ID NO: 9033 - DNA, 592 bp, Homo sapiens
  misc_feature 2, 3, 4, 5, 6, 11, 17, 22, 63, 297, 459, 475, 494, 514, 532,541, 575: n = A,T,C or G
gnnnnnagggnggaagntttcncccccgcgtccgggagcctggactcggggcacgagagaaangaagcagcagcccaccttctttgtgtttgcacatgtgcctatgtcgtgtacattggtacctgactgtggctcagatctgcgtcgcagcagcgagagaagaaatcactccatatccgatgagaggaagggtggcacagagatggtgtctacaattagagacatttctgactccaccttagcctaagcaaactttatatactgagtaacatttgaaggttgtcttttaatggtggnggggtggttttttcctttttaaactacagtgcttgcacaagagagggagggactcagaaaaggttagggcaggtgagggagacagtagatggcctgggatgacttgagtccatcatactattgcttggcaggtgtcctcccccatgtttgattcaaattccntgagtgacctaccttnccccagtaatgggactganagggtaggctccagcaactnactctgcacagggcttcncccgttcangcttgcttttgctggttgttcttttggaagtatncttctatgcacttcgac

SEQ ID NO: 9034 - DNA, 621 bp, Homo sapiens
  misc_feature 10, 19, 35, 56, 85, 88, 447, 569, 582, 595, 600, 605, 615: n = A,T,C or G
ttttttgtgnggaaaaccnccctttcgtgccgggncatgaaaccaccgcaccaggncctgccttccttttttttcttacaagggnagnaaagcattttccagctgtagatagtggtttgaaagagttagtgattactattttgagctctttgaaatatgtctcttatacaggggagtttctttcaaacacattcttgtagttaggatcaggcattagcatctgagaggaatgagtaatcaccattttctactctgccttttcacctgaggactgtcacgtgtgggaatgtagcgttacctttgctcttcctttttgctgcttattatcaggatatcatcctaggaactgagccgcccagccttcaccacctttacctcctgcatcctgcgttcccctccatccttctggatctggccaacaccaccggcacagtgacggcttcaganggtgagtcccagtgccagcggggagtctgtgtacgcagatggtgggagagtatgtgttggctgtgtgtaatgagaccattgccccccccaggaaaggatgtgtgcttctcaaaacaaagcanggcactttccctnggggtccctgggngcccnctttnctggaatgcntcccct

SEQ ID NO: 9035 - DNA, 648 bp, Homo sapiens
  misc_feature 13, 16, 47, 53, 428, 496, 606, 648: n = A,T,C or G
gtgacactatagnaanactatgacgtcgcatgcacgcgtacgtaagncttggnatcctctagaagcggccgcacttttttttttttttttttttgagacggagtcttgctctgtcgcccaggctggagtgcagtggcacgatctcggctcactgcaagctccgcctcccgagttcacaccattctcctgcctcagtctcccaagtagctgggactacaggcgcctgccaccacgcccagctaatttcttgtatttttttttttttttagtagagacagggtttcaccatgttagccaggatggtcttgatcttctgacctagtgatccgcctgcctcggcctcccaaaatgctgggattacaggcatgattacacacccagcctcattagctgcattttaaggaagtttttgaaactgaaatgttaanaaacaacagttactttagattagattaactagtaagtgtatgactccaaagtctgccatttacacaanaatttcagtctggatttcagtctggattccattgattagaaaaagaaaaaaaaatgcaagtctactgcttgggaggaggaactaaaacaattagcaatttggagacaggnggaaaagcattcattcgggcacacactaaatttacaaagctn

SEQ ID NO: 9036 - DNA, 814 bp, Homo sapiens
  misc_feature 3, 5, 7, 10, 15, 16, 20, 24, 554, 664, 665, 671, 673, 674,675, 676, 677, 678, 679, 680, 681, 682, 683, 684, 686, 687,688, 689, 690, 691, 693, 694, 695, 696, 697, 698, 699, 700,702, 703, 704, 706, 707, 708, 709, 710, 711, 712, 713: n = A,T,C or G
  misc_feature 715, 716, 717, 718, 719, 720, 721, 722, 723, 724, 725, 726,727, 728, 729, 730, 731, 732, 733, 734, 735, 736, 737, 738,739, 740, 741, 742, 743, 744, 745, 746, 747, 748, 749, 750,751, 752, 753, 754, 755, 756, 757, 758, 759, 760, 761: n = A,T,C or G
  misc_feature 762, 763, 764, 765, 766, 767, 768, 769, 770, 771, 772, 773,774, 775, 776, 777, 778, 779, 780, 781, 782, 783, 784, 785,786, 787, 788, 789, 790, 791, 792, 793, 794, 795, 796, 797,798, 799, 800, 801, 802, 803, 804, 805, 806, 807, 808: n = A,T,C or G
  misc_feature 809, 810, 811, 812, 813, 814: n = A,T,C or G
tancngnttnctgtnnggcnaatnggagctccaccgcggtggcggccgaggtacaatgtgggactttggtggaactgcctgggagaacttcataattactaccctgtatgtcatgccccttgcaggtaaaacagaagtggcagagcagaggtcaaaggcacagatcagcaaagggaatcctactggatcctgagactagcctggaaggggtgtcatttgtcactgggaatagaggtgcacggcctggtggaccctccgagagagcttaagattcatttttaaaacagaggatttaaaagacacaataggcattggaatcgggtagtaagaagagaaaaccagagccccaagtgaggaagtgggtgatctgtcctcacacagttggtgggggagctgggcctccccactgactggactctcaggtccttaggaggtgctctgtcctgcacaccccaaatgaccacctaaattcaggcctgaagcagtaagaagtacctgcccgggcggccgctcggctctagaactagtggatcccccgggcttgcaggaattcnatatcaagcttatcgataccgtcgacctcgaggggggggcccggtacccagcttttgttccctttagtgagggttaattgcgcgctttggcgtaatcatggtcatagctnnttttcngnnnnnnnnnnnnannnnnnannnnnnnntnnncnnnnnnnngnnnnnnnnnnnnnnnnnnnnnnnnnnnnnnnnnnnnnnnnnnnnnnnnnnnnnnnnnnnnnnnnnnnnnnnnnnnnnnnnnnnnnnnnnnnnnnnnnnnn

SEQ ID NO: 9037 - DNA, 854 bp, Homo sapiens
  misc_feature 6, 8, 12, 13, 14, 15, 21, 23, 24, 539, 580, 618, 634, 635,646, 653, 659, 698, 699, 708, 710, 721, 735, 737, 740, 759,761, 774, 775, 776, 780, 784, 795, 799, 801, 810, 824, 825,833, 834, 835, 836: n = A,T,C or G
tttttnancccnnnntttttnanngggccctctagatgcatgctctagcggccgccagtgtgatggatttctgcagaattcgccctttgagcggccgcccgggcaggtactggatcagtttctcctgcgtgaggtatgggtgacactcaacctggttagtcactggtttatatttcagtccaggtttgttcaagagcctctcgatctggaagtggttgaaatttgagaccccaagggctttcaccagcccctcgtccaccagctcctccatggcctcccaggcatccaagaacgttccttttccactgatcatattacctttatcatctttgggggaaaaagtcacccccagtcttgaatccctgtggccagtgaataaagatagacgtccagatagctcagcttcaggtccttgagggtcttctcaaaggctttcctcacaaggggtctctcaaagaaagtgggccacaccttgctgacgatgaacgggtcctcccgcatcacagccttctcttggatcttctcttggatggcttctnccacctcatgttgattcttatagaaataggccagtcaaagnggcgatattctgcattaaatggccaccttcaccggttnttttacttttgcccgnngaagagacctnccaagtngccccnggccccccaaatgggggcatttttgggttttggtacccnnggccggggnanccccccttaanggcggaaatttccncnccncttggcgggggccggttantnagtggggattccnnncctncggnacccaagcttnggcngnaaatcaatngggccataaacttnnttcccttnnnnggaaaaattgttttcccg

SEQ ID NO: 9038 - DNA, 506 bp, Homo sapiens
  misc_feature 2, 3, 4, 5, 7, 8, 21, 38, 334, 342, 371, 435: n = A,T,C or G
gnnnnanngaaacgcgtatancgacttactgtagggcnaattggagctccaccgcggtggcggcccgaggtacttcctggcttgttgagcgtgtcctcactgctggccctcttgagcctgctgagtcgggactcaaaagccaaggaagttgaagacttagaactcttcatgccggaagaggctgcaggcagaggccgcacccggtctgggccgtggccccctgctctgatggatgggttccagggcttggctgcactccgcatgcttgacttcgtgggtctgtctgcaaaaactctgcttctcctgcttctcgggagctgccgacctcaatcancaagtcanccactctcccgcgtacctgcccgggcggncgctctagaactagtggatcccccgggctgcaggaattcgatatcaagcttatcgataccgtcnacctcgagggggggcccggtacccagcttttgttccctttagtgagggttaattgcgcgcttggcgtaatc

SEQ ID NO: 9039 - DNA, 599 bp, Homo sapiens
  misc_feature 7, 18, 520, 599: n = A,T,C or G
gatgatnttcgggagtcncacccagaaagcgcgcctgggcgaggttcgcgcccaactcaaggccagcctgccggactatatgcaaccgaccttctgggtactactaccccggttgcccctgacccccaacggcaaactcgaccgcaaggccctgcctgcgccagaccccgcccaggcacacagcgactacgtggccccggcgacgccactgcaaagccaacttgccggcatctggcaggaagtgctgaaagtcgagcgcgtcggcctgcatgacaacttcttcgagctgggcggtcactcgctgctggctactcaggtggtggtgcgggtgcgcgagcagttgggggtggagttacccgttcgcgagctgttcagcgcggaccacttgctggacctcgccgaaaaggtactggcccttgaaagtcggccgccaacccactgcaggacgaactcgcccggaccctggcgctgctcaagagcctgtccagcgacgatattgaagacctgattgctcaataanggaatttttcgcgtgcaaagagttactagcgtccgtcggttcgttttcgtccaaagaaccaaaagcgctggcgacattn

SEQ ID NO: 9040 - DNA, 824 bp, Homo sapiens
  misc_feature 2, 3, 4, 5, 6, 7, 15, 23, 24, 108, 110, 118, 182, 247, 349,407, 649, 653, 661, 691, 719, 724, 727, 730, 732, 740, 746,756, 769, 803: n = A,T,C or G
gnnnnnnaaatgganataactgnntactgggcgaatggggccctctagatgcatgctcgagcggccgccagtgtgatggatatctgcagaattcgcccttagcgtggncncggccgangtacttataggcaataaggcgagtctaagacctaaactagataatttgagaacagggaaaaaanattccatttcgattcctgaaggttacccccatacctattataacagaataaaataaaataattcnaaactgcacaacctctaacttatcaaatcctatatatgcctcattttctcaaatgactcctaatttgtgtaaagaaaaaggcaaaaagagaaaggacagaantatgtcaaggtgggctaaagctatgaatacccttttatgtaaactaagaaaaaaatanatacacacgcattttttaaaagggaactttttgaaaccttgagccgcaaagaggaaaaattcctggctaaattgcaccactcaaagacaactagacttacggtcataaatttcttctccaacccatttctttcaggattcttacagatccatagcattttgcaagctgacataggaccctttcaaacaatgcaacctacctttcccaacagctatgattctcttcctctctttctgcacaanagangccctganccttaactgtcgcttggaactcgaaatggnggccaaggcgaaagcagtcaagccgganaactnccnaangnggtttttnaggaancagctggtanatttcatcttggngagttaactttgcctacctaggccaagggggccntgggcctgggtttaaaaaaat

SEQ ID NO: 9041 - DNA, 905 bp, Homo sapiens
  misc_feature 293, 453, 473, 486, 488, 496, 512, 520, 521, 528, 531, 553,561, 562, 572, 578, 582, 596, 598, 611, 614, 615, 616, 627,658, 659, 661, 666, 667, 676, 689, 690, 705, 709, 713, 728,731, 733, 738, 746, 749, 756, 768, 769, 770, 775, 776: n = A,T,C or G
  misc_feature 778, 784, 790, 794, 796, 801, 805, 810, 812, 813, 826, 835,837, 843, 844, 845, 846, 847, 848, 849, 850, 851, 854, 856,857, 861, 862, 863, 864, 865, 866, 875, 876, 877, 878, 880,881, 882, 884, 885, 887, 892, 893, 899, 900, 904: n = A,T,C or G
cccgcgtccggatggataaagaaaaggaagagttggggttagttgagtcagagtacagtcatcttttgtcatgtccttagtctgttgcttaagattttcatttgtggtttgcaaacaaccttttaaaaagtcaatttttgattaatttagtcttttagaagcttctgcataccaataaaagaatatgtgccactgttttttgagggttttgatccccctatttaatatgtcttgaagataaaaaattttatccaaattaaaacttctccattgcagccatctgaattctaagntttctttaatgagtttaacccatttttttaaaaatgcacacacctgggcctataatttgtacacataaaattagctgaagtcccagaatgtggattcccagactctttgagttgaaatgatcccattattaaaaataagggacctgatcagggcaatcangcaggaaaaaaaaaaaaagnggggggccgttanantattttanaaaaaaaaccttccanactttccnntggaccntgnaaacttaaaatggaatgccaantggttggnngtaaacctgntttttnggcncctttataaggggngnccaaaaaaaagcnttnnncctccccaaantttcccaaaaaaaaaaaattttttttccccnncnttctnntttgggggnttggcccaacccnncaaagggttttttanaaanggtngggaacccccggggnccncncctcnaaaaaaanttnttttttnccgtttttcttnnntaaannantccgtnggcccntggntntttcnggtnggggngnnggggtttcccccncccccaaangnggggannnnnnnnnttncnntttnnnnnnaaaaaaaannnncnnncnngnccccnngggggnngggng

SEQ ID NO: 9042 - DNA, 822 bp, Homo sapiens
  misc_feature 2, 103, 142, 167, 349, 425, 459, 468, 476, 494, 534, 540,546, 550, 554, 572, 595, 597, 615, 623, 667, 677, 686, 689,697, 700, 725, 736, 739, 740, 748, 749, 751, 763, 776, 779,783, 785, 795, 796, 804, 811, 812, 822: n = A,T,C or G
tncgggtcagcccctctccggccccggccggggggcgggcgccggcggctttggtgactctagataacctcgggccgatcgcacgccccccgtggcggcgacngacccattcgaacgtctgccctatcaactttcgatggtngtcgccgtgcctaccatggtgaccncgggtgacggggaatcagggttcgattccggagagggagcctgagaaacggctaccacatccaagggaggcagcacagtgcaagcaaatgtttcttgggaggaagaagcctgatccatcaccatctgcttgactatgtagctttggattctcctttgtacctatcccttttcgatttggctntacctttcatctatcttggatcctttcctggccaaatatcctattgggcccaaatgaacattgtaccatagtcttntggaaagcaaacaatgcttctgctattgtaattnctaacaatncatattanatgatgtgcctgtagctngaatcttaccttaagcctactgccactgaaggcagtaggnttttanggtggnatcntaantgcctctatgattaattntaagtctttaaaattttccatcntnccttctttgggatctatnttggcctntcaaaatgaaactgagaatccctgttaaaaaaaagaattggatngttattgggnctcttggtnganggaaactnaantaaaagtggggtggaccttgtgtgngacagaaaacnacnntatatcanntnggtgccggcccnttagaacttatgnctnagananaaaaaccttnncaacaccntgccccnngacccttgan

SEQ ID NO: 9043 - DNA, 514 bp, Homo sapiens
  misc_feature 2, 3, 4, 6, 11, 12, 15, 19, 22, 33, 42, 44, 49: n = A,T,C or G
gnnnangcgcnnatngacnacncgcgtataacnacttactgnanggctnattggagctccaccgcggtggcggccggccatgctctcctcctctgccagtctcctccaccactctctaacctgagagcctgtggaacctgcccgtctcccctcctccatcagacacacctgcctaggaaacaggaaaggacctcggaagtcttctaaggagagtcatggcgtattaccaggagccttcagtggagacctccatcatcaagttcaaagaccaggactttaccaccttgcgggatcactgcctgagcatgggccggacgtttaaggatgagacattccctgcagcagattcttccataggccagaagctgctccaggaaaaacgcctctccaatgtgatatggaagcggccacaggatctaccagggggtcctcctcacttcatcctggatgatataagcagatttgacatccaacaaggaggcgcagctgactgctggttcctggcagcactggg

SEQ ID NO: 9044 - DNA, 530 bp, Homo sapiens
  misc_feature 2, 3, 4, 5, 6, 7, 8, 9, 10, 11, 13, 14, 15, 16, 19, 23, 24,25, 26, 27, 28, 31, 43, 55, 56, 62, 63: n = A,T,C or G
gnnnnnnnnnngnnnnacncgcnnnnnngangagcgcgcgtantacgacttactnnagggcnnattggagctccaccgcggtggcggccgaggtacctgactttgggtaagttgccagaataagatcatcaggcttggcttggaaattacatactttttcccaccattcttttgataatatcaacgtagggactccatctacttccatgatgttaaacagttctggctttttttccatcgtgggagcgtttttctcaatcttcgccattgggaatctggtatctcaggcagcagaggaagcagcttgctgcctttagtcaaactgcttcctggaaacccagagccaggtccagctccaggacactgtgcaagcaagagcacagcaggtgaccccgcgtacctgcccgggcggccgctctagaactagtggatcccccgggctgcaggaattcgatatcaagcttatcgataccgtcgacctcgagggggggcccggtacccagcttttgttccctttagtgagggttaat

SEQ ID NO: 9045 - DNA, 909 bp, Homo sapiens
  misc_feature 2, 3, 386, 630, 722, 752, 764, 778, 837, 873, 874: n = A,T,C or G
gnnagaggttgtatcgactactatagggcgaattgggccctctagatgcatgctcgagcggcccgccagtgtgatggatatctgcagaattcgccctttcgagcggcccgcccgggcaggtactggatcagtttctcctgcgtgaggtatgggtgacactcaacctggttagtcactggtttatatttcagtccaggtttgttcaagagcctctcgatctcccaggcatccaagaacgttccttttccactgatcatattacctttatcatctttggggaaaaagtcatccccagtcttgaatccctgtggccagtgaataagatagacgtccagatagctcagcttcaggtccttgagggtcttctcaaaggctttcctcacaanggggtctctcaaagaaagtgggccacaccttgctgacgatgaacaggtcctcccgcatcacagccttctcttggatcttctcttggatggcttctcccacctcatgttgattctcatagaaataggcacagtcaatgtggcgatattctgcatcaatggccaccttcaccgcttctttcactttgcccgagaagagacctccaagtgcccaggcccacaatgggcatcttgacttttgtacctnggccgcgaccacgctaagggcgaattccagcacacttggcggccgttactagtggatccgagctcggtaccaagccttggcgtaatcatggncatagctggtttctgtgtgaaattgttatncgctcacaattncacacaacataccnacccggaagcctaaaagtgtaaagccctggggtgcctaatgaggtgagctaacccacanttaattgcggtggcgcctactggccgcttttcaggnngggaaacctgtcgtgccaacttgcatttaatgaat

SEQ ID NO: 9046 - DNA, 775 bp, Homo sapiens
  misc_feature 2, 3, 4, 5, 6, 8, 9, 10, 12, 31, 34, 37, 112, 741, 752, 767: n = A,T,C or G
gnnnnngnnnanccttagggagtcactatcnggngantggggccctctagatgcatgctcgagcggctcgccagtgtgatggatatctgcagaattcgcccttagcggccgnccgggcaggtacagagctggaggcccaaacagccagccaaatcttgctgtattttatccaccatagtataatccagagactgtggaccccaaattgggatgcttttaaaatccaaagtagttctgtatacacatttgaagaaaaatgctgttgaagaaatgtatccataaaacacttcaggtcaaaaagcaaaagaatatcaagaaaaagtttaaataacatgattcctactggttttagatcataattatcatcctatattatttatattcgtatcactgttatctttctctgacaaataattctgaaatacaatacattttaaagttatgcaggattttaaagacctcgtcttcaagcaaatacaagaagtttaataacaaactttaaataaatgctcatttaaataaaagtttatttttctcctggccaaatatttggtgaattacttacaaagatactttcaatgattagattccttagcttaaaaaaaaattcatttgaatacgctttagcccaaaagctccttacatattttcgcatcacatggagacagagcatctcatatcacagtggatgggtatgttttttaatttctataaaaaatgctatttttatattaacaatanaccccctcagnccctaatggcataanccctttgg

SEQ ID NO: 9047 - DNA, 736 bp, Homo sapiens
  misc_feature 1, 3, 5, 18, 707: n = A,T,C or G
ntnantatagggcgaatngggccctctagatgcatgctcgagcggccgccagtgtgatggatatctgcagaattcgccctttcgagcggccgcccgggcaggtactttgctacacggccgggggccattgagactgccatggaagacttgaaaggtcacgtagctgagacttctggagagaccattcaaggcttctggctcttgacaaagatagaccactggaacaatgagaaggagagaattctactggtcacagacaagactctcttgatctgcaaatacgacttcatcatgctgagttgtgtgcagctgcagcggattcctctgagcgctgtctatcgcatctgcctgggcaagttcaccttccctgggatgtccctggacaagagacaaggagaaggccttaggatctactgggggagtccggaggagcagtctcttctgtcccgctggaacccatggtccactgaagttccttatgctactttcactgagcatcctatgaaatacaccagtgagaaattccttgaaatttgcaagttgtctgggttcatgtctaagcttgttccagctatccagaatgcccacaagaattcaactggatctggaagaggaaagaaactgatggtgttaactgaacccattttgattgagacctacacagggctgatgtcattcattggaaaccgcaacaaacttggctattncctttgccgtgggagtattggttttttga

SEQ ID NO: 9048 - DNA, 496 bp, Homo sapiens
  misc_feature 5, 10, 11, 12, 15, 29, 384, 408, 455: n = A,T,C or G
taccnttgannnccnctatatggcgaatngggccctctagatgcatgctcgagcggccgccagtgtgatggatatctgcagaattcgcccttagcgtggtcgcggccgaggtacctgcaaaggcactgaggtgggagggagcatgccaatgtagggaaatgaagaaacccagtgtgtatgagccaagctgaataaaacatgagaagaagctggagaatgagagagaccagtccccaagctctcaaggagcaagaggaagccttttcggcatttgaagtggagggatggcatgatctcgtgcgtagtttttaaaagaaccactcaggctactcttttgagaatattgtgggaggccagagtagatacctatagacttatacagangttaaggcagttgataagaatatnaacaatgatggtagcttacctcacatgctttttagattataggctanaaggtggcccaagcccatataccatcatggcacagtgaatc

SEQ ID NO: 9049 - DNA, 634 bp, Homo sapiens
  misc_feature 9, 465, 490, 491, 492, 493, 494, 495, 496, 497, 501, 503,511, 513, 517, 521, 525, 539, 540, 541, 544, 550, 552, 557,558, 560, 566, 568, 569, 570, 572, 573, 575, 576, 577, 578,580, 581, 584, 586, 589, 591, 594, 595, 596, 598, 599: n = A,T,C or G
  misc_feature 606, 608, 609, 613, 621, 624, 625, 626, 627, 628, 629, 631,633: n = A,T,C or G
ctcactaanggaacaaaagctgggtaccgggccccccctcgggtcgacggtatcgataagcttgatatcgaattcctgcagcccgggggatccactagttctagagcggccgaggtactagaccctatccctgcaaggactgagctgtatttcaacaatcagagattagaataagatggcaccaatgcccagcagaagatggtcacagatgagatgagcagcaaataacatttgtggactgactttatcagaactcaacagaaactggccctttggcctgcaaaggtcagatatcaggtgaaaaatatatgggtaatgagtaaatatcatatctaggcatcaggaaatctcagttcttagctcagtgtccccattcacaagaaacagagctcagggctccagaaaagctggtcaggaaaagtggaaaataagattttctgctttgcaagcttgtctgggactgangttgaccactgtaccttgcccgggnnnnnnnngggnangtagtagncnagancctntttnggattacctgcttnnnggntttggntngtttnngntagggntnnntnntnnnngnnagncnctncngtnnnannatggtgngnnaggntgcccgtngannnnnnantng

SEQ ID NO: 9050 - DNA, 639 bp, Homo sapiens
  misc_feature 16, 393, 394, 395, 396, 397, 398, 399, 400, 401, 402, 403,404, 405, 406, 407, 408, 409, 410, 411, 412, 413, 414, 415,416, 417, 418, 419, 420, 421, 422, 423, 424, 425, 426, 427,428, 430, 431, 432, 433, 434, 436, 437, 438, 439, 441: n = A,T,C or G
  misc_feature 442, 443, 444, 445, 446, 447, 448, 449, 450, 451, 452, 453,454, 455, 456, 457, 458, 459, 460, 461, 462, 464, 465, 466,467, 468, 469, 470, 471, 473, 474, 475, 477, 478, 480, 481,482, 483, 486, 487, 488, 491, 494, 496, 498, 499, 502: n = A,T,C or G
  misc_feature 503, 506, 507, 508, 509, 510, 511, 512, 514, 516, 517, 518,519, 520, 521, 524, 526, 528, 529, 530, 531, 532, 533, 534,537, 538, 539, 540, 541, 542, 545, 548, 550, 552, 553, 556,557, 558, 561, 562, 564, 565, 568, 569, 570, 571, 573: n = A,T,C or G
  misc_feature 577, 578, 579, 582, 583, 585, 586, 587, 588, 590, 591, 592,594, 598, 601, 603, 609, 611, 613, 614, 618, 620, 622, 624,626, 627, 628, 630, 632, 636, 637: n = A,T,C or G
tatagggcgaattggnagctccaccgcggtggcggccgaggtaccagcacgtgcagaaaagaaagagtctccgcttgtctttgtctgattctcctgtcctctccatggaagttacattttctgtaaaggatgagctgaaaattctcctggtcgttgccagttgaacttctgctgtgctctgggaaggcattctcactctgtttatgttgtctaagtgcagacatggatgtgcaggtttgctagaacctcctgaggatgtgcaatggttctgttcatgcctgaatcagttcttttgggagtggacattctttctctccctcatgcacagcctcaggcacatggcttgagctatggcggcacgcagtatggccatcacccaggtacctgccccgnnnnnnnnnnnnnnnnnnnnnnnnnnnnnnnnnnnnannnnnannnnannnnnnnnnnnnnnnnnnnnnngnnnnnnnnannnannannnnaannnagnaananannaannagnnnnnnngngnnnnnnagngngnnnnnnnggnnnnnnggnggngngnngannnggnntnnggnnnnangggnnnaannannnnannngngggnggngnaagggngngnngagngngnangnnnangngaannag

SEQ ID NO: 9051 - DNA, 629 bp, Homo sapiens
  misc_feature 6, 8, 231, 467, 515, 531, 558, 577, 628: n = A,T,C or G
gggagngngttcgccacgcgtccggacaggccgccatagaactttggccttggggaatgaaccaaagctagtttggagagtagggtgattggggtgatcacttttccctttaaaggtggcatgctgcaagaagaaaggctttgaagagtgatgggtagtcactaaccatggcactatgctatcttctaaccaacgtgatggggtcctggaatgatcctaggtctgcactanaagaggtagacccagaggaccttgtctaacataccccttgcttcttgacttcttcccatacctgcgttctctccggcctcaattactgcctgagatgttacacccttccagcataaatgatgaaccgcttcatggtgcctgtagaggcctcttgcagagcaccctgcagtggtatggtttgtgtatgcctcactgcactgtagagaaatgaagagcatgaggggaaaaatgagtanggcctggacttttagctagttttgaacactgcagttgctatgacttgnggttgttagcagccanagaggagctttcatgagagggcacagnaatacataacttgtctggntctttactatgacccatgagggttttagttaaccaaaatgccaagtctaana

SEQ ID NO: 9052 - DNA, 763 bp, Homo sapiens
  misc_feature 5, 12, 638, 640, 679, 685, 696, 702, 703, 709, 712, 725,737, 742, 752, 760, 763: n = A,T,C or G
ctatntggcgantggggccctctagatgcatgctcgagcggccgccagtgtgatggatatctgcagaattcgcccttagcgtggtcgcggccgaggtactccagctatcaaaggagaatagcctttaaaacaccaggatcctggtcgagatggtagaggtggtctgtttgaatttgggtgaatagaggaaatgccagttaagggatagccattctacagacaaaaatgcagccgtctatacttttactccgtggtaatacattatttgtatttcttctttcttaagcctcttgtctgtttgtcttaggtatttgtcttatgtatttgtcacctacataaaatatgctcactaaaacgccactgactttaaggaattttaagtatgattatatgtggtccttgtagaaaaaccatctttaaagtgtaaaaaaagaagtttttttaaaagctaaattagaaacaaaaaagatctgaaaactctggaatgtatacatatagaaatggttttttgaggaccatatgctcctctttgtaatacaaatgtgtcgaaagagcaaatatctgcaaaaatcaactacaaagaataccatgcgagttaatgcatatcaagccgtcagtcagagaaaaatttggagtancngcagtggggtccttccaaatcctttttttgcacgggganaaaatncaaatccgggnccaccnngggggnggngctcaggttgganatcccctggatnttttntttggggaangcagaccnctn

SEQ ID NO: 9053 - DNA, 795 bp, Homo sapiens
  misc_feature 5, 19, 593, 594, 601, 602, 603, 604, 605, 606, 607, 608,609, 611, 612, 613, 614, 615, 616, 617, 618, 619, 620, 621,622, 623, 624, 625, 626, 627, 628, 629, 630, 631, 632, 633,634, 635, 636, 637, 638, 639, 640, 641, 642, 643, 644: n = A,T,C or G
  misc_feature 645, 646, 647, 648, 649, 650, 651, 652, 653, 654, 655, 656,657, 658, 659, 660, 661, 662, 663, 664, 665, 666, 667, 668,669, 670, 671, 672, 673, 674, 675, 676, 677, 678, 679, 680,681, 682, 683, 684, 685, 686, 687, 688, 689, 690, 691: n = A,T,C or G
  misc_feature 692, 693, 694, 695, 696, 697, 698, 699, 700, 701, 702, 703,704, 705, 706, 707, 708, 709, 710, 711, 712, 713, 714, 715,716, 717, 718, 719, 720, 721, 722, 723, 724, 725, 726, 727,728, 729, 730, 731, 732, 733, 734, 735, 736, 737, 738: n = A,T,C or G
  misc_feature 739, 740, 741, 742, 743, 744, 745, 746, 747, 748, 749, 750,751, 752, 753, 754, 755, 756, 757, 758, 759, 760, 761, 762,763, 764, 765, 766, 767, 768, 769, 770, 771, 772, 773, 774,775, 776, 777, 778, 779, 780, 781, 782, 783, 784, 785: n = A,T,C or G
  misc_feature 786, 787, 788, 789, 790, 791, 792, 793, 794: n = A,T,C or G
aactnctattgggcgaatngggccctctagatgcatgctcgagcggccgccagtgtgatggatatctgcagaattcgccctttcgagcggccgcccgggcaggtacatgataatttttctagtctagagctggatgagaacctgctccgttctgctaccttgtcaaacccacctacacccctggcagggcagatccaggggcagttctctgccccagccaacgttggccttacttctgccactctgatcagccagagtgcacttggggagagagccttcccaggacagtttcatggacttcatgacggcagccatgcctcccagaggccacatcctgcccagctgctgagcaaggcagatgacctaatcacctcacgacagcaatacagcagtgatcactcacactcctcaccccatggaagccattatgatagtgagcatatgccgtctccctacagtgaccatatcacctctccccacacaacatcgtaccttggccgcgaccacgctaagggcgaattccagcacactggcgggcgttactagtggatccgagctcggtccaagcttggcgtaatcatggtcatagctgnntctgggnnnnnnnnnannnnnnnnnnnnnnnnnnnnnnnnnnnnnnnnnnnnnnnnnnnnnnnnnnnnnnnnnnnnnnnnnnnnnnnnnnnnnnnnnnnnnnnnnnnnnnnnnnnnnnnnnnnnnnnnnnnnnnnnnnnnnnnnnnnnnnnnnnnnnnnnnnnnnnnnnnnnnnnnnnnnnnnnnnnnnnnnnnnnnnnng

SEQ ID NO: 9054 - DNA, 643 bp, Homo sapiens
  misc_feature 484, 486, 492, 495, 517, 591, 631, 643: n = A,T,C or G
actactatagggcgaattgggccctctagatgcatgctcgagcggccgccagtgtgatggatatctgcagaattcgccctttcgagcggccgcccgggcaggtacttccgatcagcctcctacaaaccctctgctttcagtcttcaagccattctccacacagaagctgggaagagctctcaaaggcaatgccaaccatgttcctaccctgctgaaaacctcccaatgagttaggatgttaggctctcaaagcacttaacagcctaactccatcccatgacctcgggccctccttgctcttttcccacctttccctcattgcttcttacctcgggtccagccacaatggtttcctttctgtttcctgaacaactcagaccttttccagtcttaggacttttgctgttgttctttctgcctgaagccttctttctgccagctctcggcatgcttttctttttagtattgatgtgctagcttgaangncacctnctnaaaacagtgcaacttgtacctnggccgcgaccacgctaagggcgaattccagcacactggccggccgttactagtggatccgagctcggtaccaanctttggcgtaatcatgggcatagctggtttcctggggtgnaattggtattcn

SEQ ID NO: 9055 - DNA, 496 bp, Homo sapiens
  misc_feature 2, 3, 4, 5, 6, 7, 8, 9, 35, 40, 42, 43, 45, 48, 63, 67, 72,73: n = A,T,C or G
gnnnnnnnnaaaatggtctagctgtttcctgtganaaaangnncngcnagatgcatgctcgancggncgtcnntgtgatggatatctgcagaattcggcttcgagcggccgcccgggcaggtacaagcgcgccctgcaggtggcacacaaagctgagatattgtcacctttgggagcactgtattacaacactggccgatacgaagaggctttgcagatttaccaggaagctgcagcacttcagccttctcagagggagctccgcttggcactggctcaggttttggccgtgatgggtcagacaaaagaagctgaaaagatgaccaatcacattgtgtcagaggagaccggatgccttgaatgctatcgcctcttgtcagccatctatagcaagcaggagaaccacgacaaggcacttgatgctatagacaaggctctccagctgaaaccaaaggacccaaaagtcatttctgaactttttttcacaaaaggaaac

SEQ ID NO: 9056 - DNA, 505 bp, Homo sapiens
cgactcactatagggcgaattgggccctctagatgcatgctcgagcggccgccagtgtgatggatatctgcagaattcgccctttcgagcggccgcccgggcaggtactcttccttccagaggtttccccatgccctcttttggacttgatgggggtcatttgggacaataaggcctgataactccttggacttaggaagcgagagagcaggaatcaagaaaagcttttgtgttttttggtttgtgtagaaaatatgatggattgagataaaatttttcaaaataggcccaatgaagaagagcagattcaaggagtaaaggattatttatgaggatggcctgtgcaaaaagacacccagagatttcatgctgttgattcacagaaagcctgttcctcttcactccgtagagtcctcagagtctggatcatcccttacagaagatccttgataatatttctgatatacctccaaggttccgtttgtcaaatgtgtgcgacccttct

SEQ ID NO: 9057 - DNA, 928 bp, Homo sapiens
  misc_feature 2, 5, 411, 416, 419, 495, 559, 611, 622, 640, 669, 679, 689,711, 734, 739, 747, 759, 763, 787, 793, 797, 802, 806, 827,861, 869, 871, 875, 876, 877, 880, 901, 914, 928: n = A,T,C or G
tnatnacggtccgagctcggatccctagtaacggccgccagtgtgctggaattcggcttctagttgaagggcctgtaccttgattgtggtagtggctactcaaatctatgtatggaataaattaaataaaattatacatatacacacaaataactgcaggtttaaaatgttaaaaaaaatgttgaaaactaagtaaaatttagtctagctaacaataatgaaccaatgtcaactaactgtttgggtatatacagctaaataagatgtcatcattttcttgaacttctcataatgatagtcatcagttgccttctcgttagcaggacgcttgcggttaggaggggaccgctcaggctctggcttctccgtgtcgcctactctcaagggcccgggccttgggctcttctttgnttctncgnatgggcgccgttgagctcctcatgataaaatctggtgggctgcacataattcacagccatgttggtaggcaccaangagggctcgctggctttcttcttgttctgctgctctgccagcaaaccgggccttggcattcctncgggggaaatgattttttttattttaagcattcgatgcccagggcccccctnaaggaatggcncctcaaccattttgggtnggaaagcatctaagcccgaattctgcaanatattcaatnacaactggcnggccggttcgagccatgccttntagaggggcccaatttcgccctntaagngaggtcgntattacaaattnactnggccgtcggtttaccaacggccgnggactngggnaaaancctngccgttcccaaacttaaattngcctttggaagcacattcccccttttctgccagnttggcgtnantaannnaanaggggcccgtacccgatcggnctttccaacagtnggccaccccggaan

SEQ ID NO: 9058 - DNA, 851 bp, Homo sapiens
  misc_feature 513, 527, 531, 543, 594, 640, 644, 648, 667, 684, 703, 710,717, 726, 732, 734, 735, 736, 741, 745, 746, 747, 750, 751,752, 754, 757, 758, 759, 760, 761, 762, 764, 765, 766, 768,770, 771, 775, 778, 781, 782, 783, 786, 787, 789, 791: n = A,T,C or G
  misc_feature 793, 796, 798, 799, 800, 804, 806, 808, 810, 813, 814, 815,819, 820, 821, 825, 826, 830, 832, 833, 834, 835, 841, 845,846, 847, 848, 851: n = A,T,C or G
atgatcgactactatagggcgaattgggccctctagatgcatgctcgagcggcccgccagtgtgatgggatatctgcagaattcggcttcgagcggcccgcccgggcaggtacccccagagattattcaatcattgcttatgactgtggcaaacaattttgttaccgacaagaactctggagaagtcatgacagtaggaatcaatgctataaaggagataacagctcgatgtcctctggccatgactgaagaacttctccaagacctggctcagtataaaacacacaaggataagaatgtaatgatgtctgctagaactttgattcacctcttccgaacactgaatcctcagatgctgcagaagaaattccggggtaagcctacagaggcctccatagaagcaagagtacctcggccgcgaccacgctaagccgaattcagcacactggcggccgttactagtggatccgagctcggtaccaagcttggcgtaatcatggtcatagctggttnctgtgtgaaaatgntatncgctcacaattnccacaacataccaagcccggaagcataaaagtgtaaagcctggggtgcctnatgagtgagctaactcacattaattggcgtgcgcttactggccggntttncagncgggaaacctgtctgcccncttgattaatgaatcgnccacccccggggagaggcngttgcgnattgggngccttttcngtttcntnnntactnactnnnttnnntnggnnnnnngnnngngnnaagnggnttnnnttnntnananggngnnntccngntntnccnnnatannngggnntacncnnnnaaaacntttnnnnccn

SEQ ID NO: 9059 - DNA, 551 bp, Homo sapiens
  misc_feature 2, 10, 12, 28: n = A,T,C or G
gncacgcgcntnctactcttatttggcnaattgggtaccgggccccccctcgaggtcgacggtatcgataagcttgatatcgaattcctgcagcccgggggatccactagttctagagcggccgaggtactgccccgcagagggcctgggtgaaggggccacccagcaaggatggcaatgtgtatgggaggagagccgcgttgcttctagaggctgaatgcctgtcaaatggagaaggcttccatttacttcagaaagctacactgactctactaaaaggcccctttcctgctggcttttaggaaaagagagaattccctcatcagtctcaaaatcacaagcaacagaaatgggaaatcgttttactaagaatgaaatgtgtcgattcagtaatactcttcatcttccccttagccaagaacccactagctctcagaatattctgagtagctgtagagggtgtccttacagacagcaaattgctaataacatttgttgaatatttactaagcgccaggcactgggctaagggctccttgtgaatttttcac

SEQ ID NO: 9060 - DNA, 516 bp, Homo sapiens
  misc_feature 2, 3, 4, 6, 19, 25, 35: n = A,T,C or G
gnnngnttggatacaactnactatntgggcgaatngggccctctagatgcatgctcgagcggccgccagtgtgatggatatctgcagaattcgccctttcgagcggccgcccgggcaggtacggggaaaagtgatgacagcgtgactatgtagagttatataaactatgtaaaaagtcataaaaatgtgagtggagtgaatttgtcacctcgattttcttttcccttaaccactctactttccttctctctccatctgtaatgctatgcagtaacttcagttttatgcttccatccatggcagatatcatcaagcaatctaacacttattcttgttgaggttccagtaagccttgagtccaagctgccactactacagggggttatccacatggaaagtgcagattgttactactcacctcattccgtaagcagaagcaaattctgtatagatgaaggacttaactatgacagccaatactttaaaatatttagaaaataaatatttttattatca

SEQ ID NO: 9061 - DNA, 805 bp, Homo sapiens
  misc_feature 1, 9, 20, 651, 657, 658, 659, 660, 661, 662, 663, 664, 665,666, 667, 669, 670, 671, 672, 673, 674, 675, 676, 677, 678,679, 680, 681, 682, 683, 684, 685, 686, 687, 688, 689, 690,691, 692, 693, 694, 695, 696, 697, 698, 699, 700, 701: n = A,T,C or G
  misc_feature 702, 703, 704, 705, 706, 707, 708, 709, 710, 711, 712, 713,714, 715, 716, 717, 718, 719, 720, 721, 722, 723, 724, 725,726, 727, 728, 729, 730, 731, 732, 733, 734, 735, 736, 737,738, 739, 740, 741, 742, 743, 744, 745, 746, 747, 748: n = A,T,C or G
  misc_feature 749, 750, 751, 752, 753, 754, 755, 756, 757, 758, 759, 760,761, 762, 763, 764, 765, 766, 767, 768, 769, 770, 771, 772,773, 774, 775, 776, 777, 778, 779, 780, 781, 782, 783, 784,785, 786, 787, 788, 789, 790, 791, 792, 793, 794, 795: n = A,T,C or G
  misc_feature 796, 797, 798, 799, 800, 801, 802, 803, 804: n = A,T,C or G
naactgctnttgggcgaatngggccctctagatgcatgctcgagcggccgccagtgtgatggatatctgcagaattcgcccttagcgtggtcgcggccgaggtacccagagagccagaaggctgttggtgagatggagcagtcactgagcgggtcaccaggagaacttactttatgagatctgctgctaatttctgactttgggcaagtcacctcaccagtctggggctaagattcactcctcatcagtaaaatgaatactttggatgagacgggaggttttcccattctgatgctaggatcttgttcatgagttaatgaagacagttgaggaaggtaaggagctatttctacttgattagtgaggcttcagtctatttcaacatttcaaagtttttcatgataatttgttcatgaaaaaaaaagaaaacagaggagttgctccagctctaaaaaaatttgaaaaccacaccctgtgctaattgcaagtctagtctactctggtgctgctctgtggtattgcagacatagagtctgctctgtggtacctgcccgggcggccgctcgaaagggcgaattccacacactggcgggccgttctagtggatccgagctcggtaccaagcttggcgtaatcatggtcatagctggnttcggnnnnnnnnnnnannnnnnnnnnnnnnnnnnnnnnnnnnnnnnnnnnnnnnnnnnnnnnnnnnnnnnnnnnnnnnnnnnnnnnnnnnnnnnnnnnnnnnnnnnnnnnnnnnnnnnnnnnnnnnnnnnnnnnnnnnnnnnnnnnnnnnnng

SEQ ID NO: 9062 - DNA, 518 bp, Homo sapiens
  misc_feature 2, 3, 4, 5, 7, 468, 474: n = A,T,C or G
gnnnntngaatacgactactatagggcgaattgggccctctagatgcatgctcgagcggccgccagtgtgatggatatctgcagaattcgccctttcgagcggccgcccgggcaggtacctttctttccaggccatggcaaaaaaatccaattatgcccgtcttgagtctgtggtcttgcttcttatgtagtatttcctttgtgagctgaagattaatgcatggattcacctccttcagcacatttcatttcaattgtgaagaaaagattccaggcactgaatgtaaaattgaacatgacattttgacattccttcttctgagagctgggttggtcttagttgctgtgaggctctagacaccgaccatacagggcgtggggctgctcctggacatgaacatcctccgaagttctccccagtccactttaccccctctgggctcacctctgaatgtccccgcgtacctnggccgngaccacgctaagggcgaattccagcacactggcggccgttactt

SEQ ID NO: 9063 - DNA, 806 bp, Homo sapiens
  misc_feature 3, 5, 6, 12, 18, 19, 20, 759, 779, 781, 799: n = A,T,C or G
cgntnngatcgnaaccannnctttagggcgaattgggccctctagatgcatgctcgagccggcccgccagtgtgatgggatatctgcagaattcgcccttagcgtggtcgcggcccgaggtacgcgggaattgaatgtcaactttagctgtgacttttctggcagctagaataaaagtaagatcgttgtctgatagaactgaatgtctcagtttattagaacaacaaaatactgtaatctttctcaaaacctacatggaacaaactggaacaagtatttcatgaaaaccaaatgaaaaataagtaaataaatgatttcatcaccactgtcaccaaaaacaaatgaattttttggataggaaaacatggctaagttggtaattgactgagacattggcctggtgtgttatctgtggttgtattttattaaacttatatttacagaaatggaaaaaaactaacttttcatacagtttggtgtattcatagcaaaatatgaatagaaatcacctctggaatcttgatgaacaaggcctttagtggttcattggtgtagaatgaatatcaatttagagaaataggtctataagtcaggaagtgatgcagaaatgtcataaggcttattcataatcacaacatttttcaaatttttccacgttaaatctgaaattttaatttctttgataaaaaatctggtatttttgattttttttacttttggtttgatttggaaaaattctatttcatttctctcttttanggttgagaattttcctaagngngaaaagtctgcctttttnttaataa

SEQ ID NO: 9064 - DNA, 386 bp, Homo sapiens
tcgactactatagggcgaattgggccctctagatgcatgctcgagcggccgccagtgtgatggatatctgcagaattcgccctttcgagcggccgcccgggcaggtacttttttttttttctttctttctttttttttttgtatttttagtagagactaggttttaccgcgttagccaggatggtctggatttcctgacctcgtgatccgtccgcctcggcatcccaaagtgttgggattacaggcgtgagccacggagcccggccataggcctgtttcttattctatattcctgttaatgtaaacctcctgagattggaagacaatcagttttacagggtaagaattgttttaattatgtggcagcttttctccaaacatgaaat

SEQ ID NO: 9065 - DNA, 822 bp, Homo sapiens
  misc_feature 5, 13, 589, 590, 591, 592, 593, 594, 595, 596, 597, 598,599, 600, 603, 604, 606, 607, 610, 611, 613, 614, 615, 616,617, 618, 619, 620, 621, 622, 623, 624, 625, 626, 627, 628,629, 630, 631, 632, 633, 634, 635, 636, 637, 638, 639: n = A,T,C or G
  misc_feature 640, 641, 642, 643, 644, 646, 647, 648, 649, 650, 651, 652,653, 654, 655, 656, 657, 658, 659, 660, 661, 662, 664, 665,666, 667, 668, 669, 670, 671, 672, 674, 675, 676, 677, 679,680, 682, 683, 684, 685, 686, 687, 689, 690, 691, 692: n = A,T,C or G
  misc_feature 693, 694, 695, 697, 698, 699, 700, 701, 702, 703, 704, 705,706, 707, 708, 709, 710, 711, 712, 713, 714, 715, 716, 717,718, 719, 721, 722, 723, 724, 725, 726, 727, 728, 730, 731,732, 733, 734, 735, 736, 737, 738, 740, 741, 742, 743: n = A,T,C or G
  misc_feature 745, 746, 747, 749, 750, 751, 753, 754, 755, 758, 759, 760,761, 762, 763, 764, 768, 769, 770, 771, 772, 773, 775, 776,777, 778, 779, 780, 783, 784, 786, 787, 788, 789, 790, 791,792, 793, 795, 796, 798, 799, 800, 801, 802, 804, 805: n = A,T,C or G
  misc_feature 806, 807, 808, 809, 810, 811, 812, 813, 814, 815, 816, 817,819, 820, 822: n = A,T,C or G
tatanggcgaatngggccctctagatgcatgctcgagcggccgccagtgtgatggatatctgcagaattcgccctttcgagcggccgcccgggcaggtactctgctaattgggcactgtccatttatatctctgggccatgtcttgttctgccgcggtgtatgtggaagagatgaacggttaggtaaggactgagaaagagagaaaatggagagagagaaatacaattctaagtggtagcctggaattctttctaaatcccctctgtgtgttatgtgtgcctatctcactgctgacttgcatcttatctcttaagaagacttaattatacagttcataactttaatcagcatatataaattgtgcctcgctcactttttcctggaagcagttggtcctcttccctttgctgctgctcctgagcagccaaaatgtcttcttccctctcagcgatcttccacccaccctgttctctgtacctcggccgcgaccacgctaagggcgaattccagcacactgggcggccgttactagtggatccgagctcggtaccaagcttggcgtaatcatggtcatagctgggtttcggnnnnnnnnnnnnaanngnnaanngnnnnnnnnnnnnnnnnnnnnnnnnnnnnnnnnannnnnnnnnnnnnnnnnannnnnnnnntnnnnanntnnnnnnannnnnnnannnnnnnnnnnnnnnnnnnnnnngnnnnnnnnannnnnnnnnannnntnnnannngnnnggnnnnnnnaaannnnnnannnnnnganntnnnnnnnnanngnnnnnannnnnnnnnnnnnngnnan

SEQ ID NO: 9066 - DNA, 826 bp, Homo sapiens
  misc_feature 2, 344, 589, 618, 660, 672, 676, 679, 701, 707, 709, 742,768, 781, 793, 796, 803, 818, 825, 826: n = A,T,C or G
gncgttttttaatccgggtgtcgaccccgcgtccggagaagcggaagacggagaaggagggagtcgaaggctttcccgatcacaaatctcacctccactacaactctctttatacttttcttgcagaaataataatagaaataaggaggtggtggggtttccaaaaatcttaaccttcaaccatctggggaaaaggcaaaaatcccatctaccgcaactctcagttcgagagtaaaggtttcccaacagtgatgtcacaagattgaccacattgatcacaatatggagtctggagaacggttaccatcctcagcagcctcctctactacaccaacttcatcttngacaccttctgtggcttcagtagtttcaaaaggtggcctttccactggagttgcttcacttagctctacaatcaacccatgtggacatttattcagaacagctggggatcaaccgtttaacctgtccacagtgtcgagtgccttcccaatggtcaagccacccagtctttggtctacattcaaccagctcagggcattcagaatttggtggtttggggacacttggtacacccacagccttaagncgcacatccccaactagcatctttttcangtgcagaatggtggcgaacaactgatgctcatactcgtacangagcaacctttntttncancattactgggaatttcccactntttggntncccaacccagaaacatgattctttcttcatttncattcaagggctttggggaaaaaagnaatcgaaatgggncccgaaaaaggngtnaatgggncaataaatggaagtnatccatnn

SEQ ID NO: 9067 - DNA, 863 bp, Homo sapiens
  misc_feature 5, 193, 384, 679, 755, 757, 782, 789, 813, 818, 832: n = A,T,C or G
acttngggagtcacccacgcgtccggggaagttggcctgccggaagttcccagggagaagggcagcgcgttgtacccgagaaaaaagaaatcctctttttagaacatctcttggtggtaccatcagaaatgtcttccttaagtggaaaagtccaaaccgttttgggccttgtagagccaagcaaactgggccnaccctgacccatgaacacctggccatgacctttgactgctgttactgtccacctcccccgtgccaggaagctatttccaaagaacctatcgtgatgaaaaatttatattggattcagaaaaacgcctattcccataaagaaaaccttcaattaaatcaggagacagaagccataaaggaagaactgttgtnttttaaagctaatggtggaggggctttggtggaaaacacaaccactgggattagccgagacacacagacgttgaagaggcttgcagaagagactggcgtccatatcatatctggagccgggttttatgtggatgcaactcactcctcagagaccagggccatgtcagtggagcagcttaccgatgtccttatgaatgaaattctccatggagctgatggaaccagtatcaagtgtggcattattggaaaaattggttgctcctggccttttgactgagagtgaaagaaaggtctncaggccacagctcatgcccagctcactttgggtgtcctgttattatccatcctggacggacttcagggcccatttnanatattccaatttgcaagaagcagcncaacatnttcaaaacatctttcccctggttngactntcttgataaaaaanctttggagtttgctcacttggctgctcttgg

SEQ ID NO: 9068 - DNA, 733 bp, Homo sapiens
  misc_feature 7, 14, 692, 696, 728, 730: n = A,T,C or G
tactatntggcgantggggccctctagatgcatgctcgagcggccgccagtgtgatggatatctgcagaattcgcccttagcgtggtcgcggccgaggtacaggcggagggggcagaaactgacatcatggagtgtcaggcacggtgctggtgctatgcatacactcaacaagggcctgggtaatgcaacatggagaagggaaaactggggggcagaacaattttgtcgtctgaaagcctttcacagagaggccctgaacccatagctctccttctctgaggacagaaaaggaggaagtgtgtctgtcctgcagtatgtgggatggatagatggatgcgaaattaagcactgaagtgggttgcttggagaggcaatgactgccccctgccctcacctgaaaatccttaaagacagaagggatcatccgcccaggaagctgaggctgcaggataagctggccttttcctgaacagtgacagttggagcgttcaccctcactgtccttgtcagagttacaggcaagaaaggagaatccttttggataaagtgtcttaaaggaactgttgatttacccttttgctttatggtctcctgatgtagtgagcaaggttcagggagattagctaactgcaggcagactgatcttcctgtgcagagaaataaggtagattctcattatcttccagctcantttncccagaattatttatttttccggccaaaaacnanctc

SEQ ID NO: 9069 - DNA, 612 bp, Homo sapiens
  misc_feature 24: n = A,T,C or G
ccacgcgtccggcttctcacaagnagaccacacagtttcagtgtccctcctctgtacacatggccctttgttcatgttactctaatcgtggaataatgcgttgtcacatctctgtcacttcctggaccctgagctcccgggggtggactcatgctgctaatgctcctactaagcctcctccattattctcttctttgttttcctcttacctataatcatcactaacatttttattattgtcatctttgcatctctatctaacctgaccctctagcacccagcacagagcatatagtaaatgtatcctgattaatttagaattagtaagtaatttatcaatatatagtaggtctttttttttttttaagactaatggaaatgctctcatctgcatagttgctcctttttggatccttcttgatcatcaaaagtgttttttccttctcacctttgacagatccttgagcagagttctctttcagcccctgtgatctggcagtacaaatattcctagtaaattcaatcattcattcgttcattcatgcagcatgaattcatatttcccgagcttatggtatgcacaatactaggaaaagttcaaccatgagcaac

SEQ ID NO: 9070 - DNA, 833 bp, Homo sapiens
  misc_feature 4, 12, 13, 14, 16, 17, 18, 19, 55, 601, 604, 641, 651, 665,715, 727, 728, 733, 734, 735, 736, 737, 738, 739, 740, 743,745, 746, 747, 748, 749, 750, 751, 752, 753, 754, 755, 756,757, 758, 759, 762, 763, 764, 765, 766, 767, 768, 769: n = A,T,C or G
  misc_feature 770, 771, 772, 773, 774, 775, 776, 777, 778, 779, 780, 781,782, 783, 784, 785, 786, 787, 788, 789, 790, 791, 792, 793,794, 795, 796, 797, 798, 799, 800, 801, 802, 803, 804, 805,806, 807, 808, 809, 810, 811, 812, 813, 814, 815, 816: n = A,T,C or G
  misc_feature 817, 818, 819, 820, 821, 822, 823, 824, 825, 826, 827, 828,829, 830, 831, 832, 833: n = A,T,C or G
gtanccttgaannncnnnnaatttattattgggcgattggggccctttagatgcntgctcgagcggccgccagtgtgatggatatctgcagaattcgccctttcgagcggccgcccgggcaggtacgcgggagttttaatttttccaaagtatcatatgaatggaatcatgtgatatgtagcccatgaatcatgtatatgggtttttcacttagtagagcacatttaagattcatcattgttactatgtgaatcaatagctggttccttttatctctccgcagctcctactgcactgagaagcacgtgttctccatttccctgggggagaccattgtattgggcagtttggaacaaaacaccatggactgggaggcttacacaacagaaatttatttcttgctgttctagaggctgggaagctcaaggtgctggctgcatattcattctgaggcctcttctgatgtgcaggcagctgccttctgacttgtgctcacattggagagagggagtcagctttggtgtctcttcttgtaaggacactaaccccattcactagggccccaccctcatgacctaatcacccccaaaggtcctgtctncanacatattacatggggcagagctttaatgtacctcggncgcgaccacncttagggcgaattncacacactggcggccgttactatggaatcccaactcggtaccaacctggngtaaaaatgggnntaaannnnnnnnttngnnnnnnnnnnnnnnnaannnnnnnnnnnnnnnnnnnnnnnnnnnnnnnnnnnnnnnnnnnnnnnnnnnnnnnnnnnnnnnnnnnnnnnn

SEQ ID NO: 9071 - DNA, 814 bp, Homo sapiens
  misc_feature 2, 7, 592, 616, 622, 635, 664, 668, 681, 683, 686, 705, 782,785, 790, 802, 804: n = A,T,C or G
anaactnctattgggcgaattgggccctctagatgcatgctcgagcggccgccagtgtgatggatatctgcagaattcgccctttcgagcggccgcccgggcaggtacctgccttgttcatatccaactaattttttttggctaattaagtaataataatcaaaacacttaaggttttaaaggatgaatgaccagttgagagttacttcttatttgctcctaaatccaatatatttcctgatcagtcaataacacttagaacatctagttataattggtaatacaattgtttaaaaaatgataattaaaaggactaagactatatatggtcttttgaggggataacaattgaattatttaaacaaagtatattaggataataaaacacgagaagtcagtccagtggttcaatccattattcagaatttcattctgtttataattaagcaacagtgaccttcaggttagtcttccttagctgttaacaaccagctggagaagctgagggctatttttgcaattataatctgtgaaagattgaaaaaccgttaagataaataacgtgtccaccttattaacaggcactcatttncacactttgaatacatatcaatangggttncaagttcaatttncttaccgaactttttttaactcttttaanaaancccctgtagggangnggngcctcactggactcttttntgggcattgcaatctaatttcaaaagcttgggggaagggggaatggtgtttgaaaataataccccattcttaaagcnttnaaatnctttttggaaananaacatgttca

SEQ ID NO: 9072 - DNA, 804 bp, Homo sapiens
  misc_feature 2, 3, 4, 5, 8, 13, 430, 477, 478, 479, 480, 481, 482, 483,484, 485, 486, 487, 488, 489, 490, 491, 492, 493, 494, 495,496, 497, 498, 499, 500, 501, 502, 503, 504, 505, 506, 507,508, 509, 510, 511, 512, 513, 514, 515, 516, 517, 518: n = A,T,C or G
  misc_feature 519, 520, 521, 522, 523, 524, 525, 526, 527, 528, 529, 530,531, 532, 533, 534, 535, 536, 537, 538, 539, 540, 541, 542,543, 544, 545, 546, 547, 548, 549, 550, 551, 552, 553, 554,555, 556, 557, 558, 559, 560, 561, 562, 563, 564, 565: n = A,T,C or G
  misc_feature 566, 567, 568, 569, 570, 571, 572, 573, 574, 575, 576, 577,578, 579, 580, 581, 582, 583, 584, 585, 586, 587, 588, 589,590, 591, 592, 593, 594, 595, 596, 597, 598, 599, 600, 601,602, 603, 604, 605, 606, 607, 608, 609, 610, 611, 612: n = A,T,C or G
  misc_feature 613, 614, 615, 616, 617, 618, 619, 620, 621, 622, 623, 624,625, 626, 627, 628, 629, 630, 631, 632, 633, 634, 635, 636,637, 638, 639, 640, 641, 642, 643, 644, 645, 646, 647, 648,649, 650, 651, 652, 653, 654, 655, 656, 657, 658, 659: n = A,T,C or G
  misc_feature 660, 661, 662, 663, 664, 665, 666, 667, 668, 669, 670, 671,672, 673, 674, 675, 676, 677, 678, 679, 680, 681, 682, 683,684, 685, 686, 687, 688, 689, 690, 691, 692, 693, 694, 695,696, 697, 698, 699, 700, 701, 702, 703, 704, 705, 706: n = A,T,C or G
  misc_feature 707, 708, 709, 710, 711, 712, 713, 714, 715, 716, 717, 718,719, 720, 721, 722, 723, 724, 725, 726, 727, 728, 729, 730,731, 732, 733, 734, 735, 736, 737, 738, 739, 740, 741, 742,743, 744, 745, 746, 747, 748, 749, 750, 751, 752, 753-804: n = A,T,C or G
gnnnntgnatacnactcactatagggcgaattgggccctctagatgcatgctcgagcggccgccagtgtgatggatatctgcagaattcgcccttagcgtggtcgcggccgaggtacgcgggtgagatggcaaatatttattaatcatccaactgtgtatcagacactaagaataagctgggaggccatggcaagtgaggtcaccacagtccctgccacagtggaggttatggtatacaggtaaggcagggaagagcactgcaaagggtttgcccattgcatcagtcatttatttatgcacatgttgattcaacaattatttctatgccaagctgtcttcaaggtgctggaggaaatgaagcgtacctgcccgggcggccgctcgaaagggcgaattccagcacactggcggccgttactagtggatccnagctcggtaccaagcttggcgtaatcatggtcatagctgtttcctgnnnnnnnnnnnnnnnnnnnnnnnnnnnnnnnnnnnnnnnnnnnnnnnnnnnnnnnnnnnnnnnnnnnnnnnnnnnnnnnnnnnnnnnnnnnnnnnnnnnnnnnnnnnnnnnnnnnnnnnnnnnnnnnnnnnnnnnnnnnnnnnnnnnnnnnnnnnnnnnnnnnnnnnnnnnnnnnnnnnnnnnnnnnnnnnnnnnnnnnnnnnnnnnnnnnnnnnnnnnnnnnnnnnnnnnnnnnnnnnnnnnnnnnnnnnnnnnnnnnnnnnnnnnnnnnnnnnnnnnnnnnnnnnnnnnnnnnnnnnnnnnnnnnnnnnnnnnnnnnnnnnnnnnn

SEQ ID NO: 9073 - DNA, 791 bp, Homo sapiens
  misc_feature 3, 7, 565, 643, 659, 694, 734, 744, 759, 782, 787, 790, 791: n = A,T,C or G
acnactnctattgggcgaattgggccctctagatgcatgctcgagcggccgccagtgtgatggatatctgcagaattcgcccttagcgtggtcgcggccgaggtacactgagcctagaatatcttgtggggtcaaaaggtaaggcagtgctcaaaaaacaacagtaaaatggcaaaaatacatagaacccaacttgaagggcatcctaatgtaaaatctagaaaaatctgagcacaaaatgtattatagtcatgggttataaccaatataatgagaatccaagagtccagactgatttttaaaaaattgcattttttcaatataaaagaaaatatcttccttatagtaacattttaattgacaaatgtagaagtaatgatggaagtagaaaatcactgtttggcacacactgtagtaataactgtttcagacaagaattatccacgaatgctaaaattagtttggtgaaagtatgatgagaaacaagatacttacataggtccaaagcatctcctgacaagatacttattcattcacagaaaaaaaaatagaaactttacagtanagaaatctggcagacatcccttaatcaagtgatggaagtaaacatcttagtaatgtgacaagcccacaccagggcctnctgatctgaggcctgnaagacacacatctcttctttttagtggcgactgancattgtcctgcccggcggccgtcgaaaggcgaattccacnccctgggcgncgtctatggatcccnactcggaccaaacttgggtaatntggcntann

SEQ ID NO: 9074 - DNA, 621 bp, Homo sapiens
  misc_feature 2, 3, 5, 15, 29, 31, 543, 582, 600: n = A,T,C or G
tnntncgactcactntagggcgaattggnanctccaccgcggtggcggccgagtacgcgggaagaaacttgtggccatctcatctatgcctgcaggcaactgaaaagcagtgatttggacctttttcgagtttggatgggagtgtggacagggcggttagggggctgggcccaggtcatgtttcagtttctaagccaggggttttactgtggagtaggactgtttactcgttttcttaagctgctgggtgctttgctgctcctggctctggccctctttttgggctttctacagttgggatggcggtttctggtgggactaggtgaccggttaggctggagggataaggctacctggctcttctcttggctggattctccggccttgcagcgttgcttgactctgctgagagatagcaggccatggcagcggctggtaagaatagttcagtggggctggctggagttgccttgggtcaagcagaatattaataggcaggggaatgcacctgtagctagtgggcgctactgccagcctgaagangaagtggctcgactcttgaccatggctggggttcctgangatgagctaaaccctttncatgtacctgcccgggccggc

SEQ ID NO: 9075 - DNA, 492 bp, Homo sapiens
  misc_feature 18, 420, 449: n = A,T,C or G
actactattgggcgaatngggccctctagatgcatgctcgagcggccgccagtgtgatggatatctgcagaattcgccctttcgagcggccgcccgggcaggtaccacctatgaagtattctgcctaaagatattaaacctgaagcttatcaaatctgtaaatctgactacgacttgactgaaaatttagtggcaaaggaatatagtaaatgacatcacaaggatatagcatccaaacccagaaagcggatattctttaggataaatgacccagtttcctcaacaatgaaatggcctggaatagaaaaaagagggagaacttaaaataacataccaaccaaatatagcacatggatcctgttttaatatggattcagaaatccaattctgaaatgacattttttaaaaatcaagaggccnggcgtgatggctcatgcctgtaatcccancctttgggaggctgaggtgggcggatcacaaggtcaggagata

SEQ ID NO: 9076 - DNA, 522 bp, Homo sapiens
  misc_feature 3, 4, 10: n = A,T,C or G
gtnngattgnatacgactcctatagggcgaattgggccctctagatgcatgctcgagcggccgccagtgtgatggatatctgcagaattcgcccttagcgtggtcgcggccgaggtacttttctttatgaatgttataccagaacttaggaggaaaaaatttttgagcatactgaatattaggaattggatatctccctaaattattaaagttcatcttccataaattctgtaaaactgaatgtagtatttccccctcttcccatgcaagtaactgatatcactttagaaaacctgatatgaacattatttgttattgtgcttttatgaagaattctgtctaatcttctcataagaagaaagaattagaaccaaaaatctaattatcagatttagtaagatgtaggcaagatccacctattttttcatttatgtctttcaaaatcaatcacattctattattcaccgatccactaaacagatgtagaattcctattatgtagcaggcattgttctgttaatg

SEQ ID NO: 9077 - DNA, 404 bp, Homo sapiens
  misc_feature 3, 135, 143, 152, 154, 156, 157, 159, 175, 180, 187, 190,191, 195, 198, 213, 215, 229, 232, 241, 248, 250, 260, 274,275, 276, 279, 280, 287, 299, 304, 305, 331, 332, 333, 335,336, 339, 349, 386: n = A,T,C or G
gantgtatacgactcactatagggcgaattgggccctctagatgcatgctcgagcggccgccagtgtgatggatatctgcagaattcgccctttcgagcggccgcccgggcaggtacttcatttttttttttttntttttttnttttttttntntnntnttttttattgttttanttgancttttgnttnntctnaanttccttgagctcaananatttaccatttttnatncttccaaancgccaanantacaggcatnatacactgtgcctnnncannaattttnttttattatatnaaggnnaggtttataccaccttcttctgattnnngnnggnatacatgctnattatgtaacactgaaaatgtaagcagtataaaaaanaaaataaaaaagaatatg

SEQ ID NO: 9078 - DNA, 518 bp, Homo sapiens
  misc_feature 2, 5, 25: n = A,T,C or G
tngcntaacaactactattggcgantggggccctctagatgcatgctcgagcggccgccagtgtgatggatatctgcagaattcgccctttcgagcggccgcccgggcaggtacaaacaaacagcccacaacaattctctaatggtgagggagtaaataagtgaccgataatgctggaggaagaggaagtgaatgggtccccagtataggttagaatgaaaaaatccctaccaatgtaaatcaaatataaaataaacaaaagagttcatgtatgtgtgcgggaaggaaagtgatatttgggggttgggaggtgtcactgagggtaccgagtacatataaacaactctttagtcactcccaaaggtctgggatgagcattttttaacatttgatactctactaacttacctggactatgttgacatggaaattcacctcccgttatccacagctcctctccctgctccaacttaatgatgacgtttggcttggtgatatcatatcttgttaatgggaaa

SEQ ID NO: 9079 - DNA, 496 bp, Homo sapiens
  misc_feature 2, 3, 4, 5, 6, 7, 8, 13, 32: n = A,T,C or G
gnnnnnnnatacnactcactatagggcgaatngggccctctagatgcatgctcgagcggccgccagtgtgatggatatctgcagaattcgcccttagcgtggtcgcggccgaggtaccaggttcaaatagtcagcagctcatcataatcaatgagcgaggacataaagtaggaaaaatgcatcaccatggtgagcaaggaaggcaagttattggaggcacatgttaacacataaaatataaaattaatatgatcacactggaaaggcttgcctgagcccacagtttgaatgcctacaataagatgagatgcacaacaaaaagcaagagaacctgatcaagtgggtgacctggccatggtgctctcatcagtggggacccaaatgcttatgtggactcaccaggtatcgaattagacatgaataggagtgtttgttgtgatggcaagaaactatataatcaaatgaatacaatgaaactttaaaaataattgtaaga

SEQ ID NO: 9080 - DNA, 506 bp, Homo sapiens
  misc_feature 506: n = A,T,C or G
cgactactatagggcgaattgggccctctagatgcatgctcgagcggccgccagtgtgatggatatctgcagaattcgcccttagcgtggtcgcggccgaggtacagtttctgagtatgggaacttccctccccaagtggtgggaagttacagttaactacagcttactcaactatcacttccagaggtttagtgtttttaatatgggaaagaggagaaatctcaggtctaatcagggttctgcccatcagcttttcactgaaactttcaactgtgttttgttttttgtttttttttccatctttcagtttctagctgtgtttgccttctccctccgcgttccctcctctttttttgcttttggtctcctttccagcttcatgtctccatgagttcagctgtaccctgcatttgggaacagagagaaaaacaaagaatttgctgaaaaaaaataggccaggtgcggtggctcacacctgtaattccagcattttgggaggctgagn

SEQ ID NO: 9081 - DNA, 520 bp, Homo sapiens
  misc_feature 2, 3, 4, 5, 6, 7, 8, 11, 407, 423, 426: n = A,T,C or G
gnnnnnnnacnactactatatggcgaattgggccctctagatgcatgctcgagcggcccgccagtgtgatggatatctgcagaattcgccctttcgagcggccgcccgggcaggtacaaggttggtaggaggaagagaagaaatgattggctcccagaggcttcatgggctcccaattcatgattctttctctgtggctaatttttgttaagtataagaattccaggaatctcttaggaattgtggagactgctttctcctgaaatataaaacatctgctcttggtctgtttggcgctccactgtctgaggggaaaacagggaaaaagaggtaatataaaacagacattgtttcagacaataaatccccctttactcattaatgagaaaataaatttagggccagangtgtcagacttttcangangcctctttgtcttttcttttcttttttttaataatttaaaaaaagttcccacactacactgatgtacctcggccgcgaccacgctaagggcgaa

SEQ ID NO: 9082 - DNA, 511 bp, Homo sapiens
  misc_feature 2, 3, 4, 5, 6, 7, 8, 9, 13, 17: n = A,T,C or G
gnnnnnnnnaacnactnctatatggcgaatggggccctctagatgcatgctcgagcggccgccagtgtgatggatatctgcagaattcgccctttcgagcggccgcccgggcaggtactcccccagcaaaaaccaaatgccagacacattttatataagaatgaacaattaatctgaataataaaaataaggcttatttataaaggttaagttgaatagtatatacatgcacatatatgcaaatatatataattcagatattttatctttcttaatgcttacatgactctaaactctcacaattttaaattaaaacataaatatgacataattgtaaatttttcagctttatacatcagcattttaccatcatgagaaaagatattctttttcttctttctaatttccccaaagttaaatttttaaaacatagtttactataaaaaaattatcaacaaattagcactgaataaattgttctttatttctagttaatttatttgaaaagttg

SEQ ID NO: 9083 - DNA, 495 bp, Homo sapiens
  misc_feature 5, 12, 17, 18, 22, 417: n = A,T,C or G
gtgcnatcactncttannatanggcgaattggagctccccgcggtggcggccgaggtacacacatggcattcacacccccaatacacacttcctccttctatctccctgtctgatttccactcatccattctcagctcctgtttgtctgaggccacatgcaactggatttgtcaagcccccttttcacaacttgttgtcacagtccattaccaaattgcatatagttatatattccactaattaggcttctaaaatatcattaacatgtctcttgatcattagcataacgtatgaggccgaccgtcgttaggcacgactcgagtttgttaaccgtggtaatgaaaggcacaaggcaggctctgcaggaaccaagaagcacaggagaagtggggaatattccaagcaccaagatgctngccacaaaggcatagacagagacacagagagacaaaggcaagcacagagaggagatgcaaggcacgaggaaaagggca

SEQ ID NO: 9084 - DNA, 831 bp, Homo sapiens
  misc_feature 6, 585, 721, 730, 736, 756, 757, 762, 772, 777, 782, 788,802, 805, 829: n = A,T,C or G
gcactnctatagggcgaattggagctccaccgcggtggcggcccgagatactgtccaactggatgctgccctggtggctgaaggcacacttcatgatgctgtccagggtcatcagggagacatgttgaaagagctccagacgtgagttttgggcaatgtgttcctcccatttgttcagcatcatccgaacactctcagacatcatggtgatgaatattttcagaatgctgatgttgaagccaggtttcacaatctggcggtgctttttccatttagaaccatccagggtcacaagtcctcgaccaacccaggattcaaggattttgtggctaacagcacttttgggatcttgtcttttcaggagaatcttggcatagtctgggtcatggacactgaagaacatcgtaaagggtccaacccacaagggaacagcacatgggtatttttccatcagcttatgatacacctcaaactcctttactgggtaaaactccttgtggccatagaaccagtgggcagggggtgcaggaaacaggtgcagggctctgatcatccatctcctcctctggtacctgcccgggcggnccgctctagaactagtgggatcccccgggctgcaggaattcgatatcaaagcttatcgataccgtcgacctcgagggggggcccggtacccagcttttgttcctttagtgagggttaatttgccgcttggcgtaancatggcatngcttgntttctgggtgaaaattggtnntccgnttacaaattncacancacantccgancccggagcataaanggntaaagcctgggggtgcctaatgantg

SEQ ID NO: 9085 - DNA, 824 bp, Homo sapiens
  misc_feature 2, 3, 4, 5, 6, 7, 8, 9, 12, 17, 29, 30, 34, 226, 698, 729,747, 761, 765, 776, 778, 800, 801, 802, 803, 804, 805, 806,807, 808, 811, 814, 815, 816, 817, 818, 819, 820, 821, 822,823, 824: n = A,T,C or G
gnnnnnnnncgngttancgacttactgtnnggcngattggagctccaccgcggtggcggccgcccgggcaggtaccgcagtatggttggccatgggattatccttcattacatcaaatgaggtatggtggacaatcttgtttataacatcacctgaccaagttttctccaagaattccaacaccttgtggatctcatgttttggattttttttaatatcctcgtanaagaggtagaggatccggtgcatgtcttttgcagcccaccatcctttcacatggtcaaaccaggacccgccaacaacttttccggacatgaatttctcataaaattcctctaagttctgaggatctggcataaaggaagccatcctgtgaaagtggtagtaggacaccaggcaatccttgggatttctggccacatagacaatcttgcagttttctttccagatagatggtggaatcagatgtgaagggagatgtgtttttatcagttgtggtgaggacatttcaagaacgaactccaaatctggtttttctttatggggaaatttcagttcaaggaaagcgtgtctatctagagtctgggctcttttgcatttctcccatcaccatcatttaaaatcatgtctaaaatttcatgcatccatgttgtacctcgccgtctagaactagtggatccccgggctgcaggaattcnattcaagcttatcgataccgtcgacctcganggggggccccggacccanctttgttcccttantganggttaattgcncncttgcgtaatcatgggcataannnnnnnnnttnggnnnnnnnnnnn

SEQ ID NO: 9086 - DNA, 611 bp, Homo sapiens
  misc_feature 8, 11, 47, 56: n = A,T,C or G
actatagnaanactatgacgtcgcatgcacgcgtacgtaagcttggntcctctagnagcggccgctcgcgatctagaactagtttttttttttttttttttttaactttgaaagggctgtattacagggaagctatgagagcaggtcgtggggtcatcttgcctcctggctcttggagctacagcaattcccaaggccaggctgggtagacagagcctcaaggcatcaatagcacttgcagtagagggcagagatggagtcggaccagtctccaaagatgcctttgcggtactcttccaggcgagggtaagaacccgcggtgaacttgcgggtcttgccatgcttaccggggagagaccacacagtgatctcacagcgctggcccactaccagagacgatgcagtgttagaccagcccgagggcagatagggcaggtcagtacctggctccacagacaacacgggcccctggcagcagttgtcatagtatggatcactcttctcatagagtctggcgcacgtacgcgtcccatctgacttcttcaggtctgcgggcaccgggcaattgccatgggcaccagggacagccaccagggctaaagccagcagcc

SEQ ID NO: 9087 - DNA, 487 bp, Homo sapiens
  misc_feature 5, 6: n = A,T,C or G
taacnnctactgagggcgaattggagctccccgcggtggcggccgaggtactcattggaggatcagctcacctgctttgctctcgatgtagcctagctgggtttagagccttcccttgaatgaagaaccctccccagctggaaggggatgctcttgaaagctcagctgacaacacacatgggcatcaagtcattggccacattcatgcctcaagtgtcctaaaaccgaatatgatcaaaagaaaactgctgttcagcaagtggagactggcatgcagattccctggcctgcaagcctagtgtaaaaagataccaaatactgctggaagaatgaaaaggatgaagggatgtcatcaaagtagttttttcacttgatggaaaagactaaaacagcaaagcaagttcaagatcaaacacaacaccacagggatcctttgatgagaagtgaacttaagaccatgaaatgctgttggtgattttaaccccct

SEQ ID NO: 9088 - DNA, 836 bp, Homo sapiens
  misc_feature 1, 3, 5, 6, 8, 23, 567, 660, 668, 721, 750, 766, 784, 786,804, 809, 811, 812, 813, 815, 816, 817, 818, 820, 822, 823,824, 825, 826, 827, 828, 829, 830, 831, 833: n = A,T,C or G
ngntnncnacttactgtagggcnaattggagctccaccgcggtggcggccgcccgggcaggtaccgcagtatggttggccatgggattatccttcattacatcaaatgaggtatggtggacaatcttgtttataacatcacctgaccaagttttctccaagaattccaacaccttgtggatctcatgttttggatttttttaatatcctcgtagaagaggtagaggatccggtgcatgtcttttgcagcccaccatcctttcacatggtcaaaccaggacccgccaacaacttttccggacatgaatttctcataaaattcctctaagttctgaggatcaggcataaaggaagccatcctgtgaaagtggtagtaggacaccaggcaatccttgggatttctggccacatagacaatcttgcagttttctttccagatagatggtggaatcagatgtgaagggagatgtgtttttatcagttgtggtgaggacatttcaagaacgaactccaaatctggtttttctttatggggaaatttcagttcaaggaaaacgtgtctatctanaagtctgggctcttttgcatttctccacatcaccatcatttagaatcatgtctaaaatttcatgcatccatgttgtacctcggcccgctctanaaactagngggatccccccgggctgcaggaattcgatatcaaagcttatcgatacccgtcnaccctcgaagggggggccccggtacccancttttggttccctttnaatgagggttaattggcncncttggcgtaatcattggncatancnnngnnnntngnnnnnnnnnnanaac

SEQ ID NO: 9089 - DNA, 781 bp, Homo sapiens
  misc_feature 1, 3, 4, 5, 6, 13, 14, 17, 18, 34, 555, 619, 659, 660, 661,662, 663, 664, 665, 666, 667, 668, 669, 670, 671, 672, 673,674, 675, 676, 677, 678, 679, 680, 681, 682, 683, 684, 685,686, 687, 688, 689, 690, 691, 692, 693, 694, 695, 696: n = A,T,C or G
  misc_feature 697, 698, 699, 700, 701, 702, 703, 704, 705, 706, 707, 708,709, 710, 711, 712, 713, 714, 715, 716, 717, 718, 719, 720,721, 722, 723, 724, 725, 726, 727, 728, 729, 730, 731, 732,733, 734, 735, 736, 737, 738, 739, 740, 741, 742, 743: n = A,T,C or G
  misc_feature 744, 745, 746, 747, 748, 749, 750, 751, 752, 753, 754, 755,756, 757, 758, 759, 760, 761, 762, 763, 764, 765, 766, 767,768, 769, 770, 771, 772, 773, 774, 775, 776, 777, 778, 779,780: n = A,T,C or G
ngnnnntccgcgnntanngacttactgttgggcngattggagctccaccgcggtggcggccgaggtacaacatggatgcatgaaattttagacatgattctaaatgatggtgatgtggagaaatgcaaaagagcccagactctagatagacacgctttccttgaactgaaatttccccataaagaaaaaccagatttggagttcgttcttgaaatgtcctcaccacaactgataaaaacacatctcccttcacatctgattccaccatctatctggaaagaaaactgcaagattgtctatgtggccagaaatcccaaggattgcctggtgtcctactaccactttcacaggatggcttcctttatgcctgatcctcagaacttagaggaattttatgagaaattcatgtccggaaaagttgttggcgggtcctggtttgaccatgtgaaaggatggtgggctgcaaaagacatgcaccggatcctctacctcttctacgaggatattaaaaaaaatccaaaacatgagatccacaaggtgttggaattcttgganaaaacttggtcaggtgatgttataaacaaagattgtccaccatacctcatttgatgtaatgaangataatcccatggccaaccatactgggggtcccctcgggnnnnnnnnnnnnnnnnnnnnnnnnnnnnnnnnnnnnnnnnnnnnnnnnnnnnnnnnnnnnnnnnnnnnnnnnnnnnnnnnnnnnnnnnnnnnnnnnnnnnnnnnnnnnnnnnnnnnnnnnnna

SEQ ID NO: 9090 - DNA, 817 bp, Homo sapiens
  misc_feature 2, 3, 4, 5, 6, 7, 13, 18, 628, 631, 642, 660, 669, 701, 734,735, 736, 737, 738, 739, 740, 741, 743, 744, 745, 746, 747,748, 749, 750, 751, 752, 753, 754, 755, 756, 757, 759, 760,761, 762, 763, 764, 765, 766, 767, 768, 769, 770: n = A,T,C or G
  misc_feature 771, 772, 773, 774, 775, 776, 777, 778, 779, 780, 781, 782,783, 784, 785, 786, 787, 788, 789, 790, 791, 792, 793, 794,795, 796, 797, 798, 799, 800, 801, 802, 803, 804, 805, 806,807, 808, 809, 810, 811, 812, 813, 814, 815, 816, 817: n = A,T,C or G
gnnnnnnggatanaactnactattgggcgaattgggccctctagatgcatgctcgagcggccgccagtgtgatggatatctgcagaattcgcccttcgagcggccgcccgggcaggtaccagaggaggagatggacgatcagagccatgcgcctgtttcctgcaccccctgcgcactggttctatggccacaaggagtcttacccagtaaaagagtttgaggtgtatcctgagctgatggaaaaatacccatgtgccgttcccttgtgggttggaccctttacgatgttcttcaatatccatgacccagactatgtcaagattctcctgaaaagacaagatcccaaaagtgctgttagccacaaaatccctgaatcctgggttggtcgaggacttgtgaccctggatggttctaaatggaaaaagcaccgccagattgtgaaacctggcttcaacatcagcattctgaaaatattcatcaccatgatgtctaagagtgttcggatgatgctgaacaaatgggaggaacacattgcccaaaactcacgtctggagctctttcaacatgtctccctgatgaccctggacagcatcatgaagtgtgccttcagccaccagggcagcatcanttngacagtacctnggccgcgaacacgcttanggcgaattncacacactggcggccgttactagtggatccanctcgtaccaacttggcgtaatcatggcatactnnnnnnnngnnnnnnnnnnnnnnnannnnnnnnnnnnnnnnnnnnnnnnnnnnnnnnnnnnnnnnnnnnnnnnnnnnnnnnnnn

SEQ ID NO: 9091 - DNA, 606 bp, Homo sapiens
  misc_feature 58: n = A,T,C or G
tcactatagggcgaattggagctccaccgcggtggcggccgaggtacaagttcagggnacctaactgtggaagaactaaggaatgtaaatgtatttttcccacatttcaaatattccatggacacctatgtttttaaagatagttctcagaaagacctgctgaattttactggcacaattcctgtgatgtatcagggtaatacatataacataccaattcgtttctggattttggattctcaccctttcgctccccctatttgcttcttgaagccaactgcaaatatgggaatcttagtcggaaaacatgtggatgctcaaggcagaatatatttgccctatctccaaaactggagccatcctaaatctgtcattgttggattaattaaagaaatgattgccaagtttcaagaggaacttcccatgtattctctatcatcatctgatgaggcacggcaggtagacttgctagcctatattgcaaaaatcactgaaggtgtttcagatacaaattcaaagagctgggcaaatcatgagaataaaacagtcaataaaattactgtggttggaggtggagaactcggtattgcctgcacattagcaatc

SEQ ID NO: 9092 - DNA, 625 bp, Homo sapiens
  misc_feature 625: n = A,T,C or G
gggccctctagatgcatgctcgagcggccgccagtgtgatggatatctgcagaattcgccctttcgagcggccgcccgggcaggtacctggatcaaggtggagtcctggttgctatgaaacacacatctctcccaattcgacatctttggttgagttttgatgaagggagatcttggagcaaatacagtttcacatctattccactttttgtggatggggttctgggtgagcctggagaagagactctcatcatgacagtgtttggacacttcagccaccgctctgaatggcagctggtcaaagtagattacaagtccatttttgatagacggtgtgccgaagaggactacagaccttggcagctgcacagccagggggaagcatgtatcatgggaacaaaaaggatatataagaagcgaaaatcagagcggaagtgtatgcaaggaaaatatgcaggagctatggaatctgaaccctgtgtctgcactggggctgattttgattgcgactatgggtatgagcgacacagcaatggccagtgcctgccggcattttggttcaatccatcctctctgtcaaagggattgcagcttgggacagagttacctcaatagtacctcgccn

SEQ ID NO: 9093 - DNA, 516 bp, Homo sapiens
  misc_feature 17, 56: n = A,T,C or G
gaaagttgaactgggcnccacgcgtccgtgtcgggccggcgctcccttctctgccnggtggcgagtacacctgctcacgtaggcgtcatgaggtctccggttcgagacctggcccggaacgatggcgaggagagcacggaccgcacgcctcttctaccgggcgccccacgggccgaagccgctccagtgtgctgctctgctcgttacaacttagcaattttggccttttttggtttcttcattgtgtatgcattacgtgtgaatctgagtgttgcgttagtggatatggtagattcaaatacaactttagaagataatagaacttccaaggcgtgtccagagcattctgctcccataaaagttcatcataatcaaacgggtaagaagtaccaatgggatgcagaaactcaaggatggattctcggttcctttttttatggctacatcatcacacagattcctggaggatatgttgccagcaaaataggggggaaaatgctgctaggattttgggaa

SEQ ID NO: 9094 - DNA, 839 bp, Homo sapiens
  misc_feature 2, 7, 9, 13, 15, 17, 232, 597, 636, 657, 686, 693, 764, 766,770, 771, 774, 776, 777, 780, 781, 787, 789, 792, 795, 797,801, 803, 805, 806, 808, 810, 812, 814, 819, 820, 821, 824,825, 826, 828, 829, 830, 831, 834: n = A,T,C or G
gncgtantngagntntngggagtcgacccacgcgtccgccatttctctcttcccggaactccagtggcaagggaatccagaaacgttttctttttgcctggagatgctaatccttagcctaagaataaggaaactggtccatgtaaggactgaccatcctttcacccatctgtctgcccacttgtgcatccatcccattttatccatccattcctccagttgtggacaccanatgactttcagctccccctaccccaaccagaactttgctgcaatggccattcttatatgcccctatggacccatgggacaattctctgggatacatgctaggagcagaattgctgaatcatagggaatgcatgtgcttagcttggctaagcaatgttggagtaaaagcttttggttttgcatcttctcagcacttctagggaggcaccaaaagggaggatggcactgactgagcccacctgagatagctcctagaccccagccctctgtgtcctcagaatcacacactgctgctcatcactttagctttccgaagatcatggcaatagcagcatgcctgtaactgtcccaaggtcaaccaaaaanttttctaaagagaggggacccaagtcacaccgggcaccntggccacctgtgggggcgtgnttatggtcacataccctttcttgccttcnttaaggnagggctgggcccaagcccagcttttgcttatgaaatgtgaaaggagtcaaagggcggcccccggggttttncntcgnnaancnntgnncttttnanatntgncncttnangnntntnananggggnnngtnnntnnnnacnagatg

SEQ ID NO: 9095 - DNA, 531 bp, Homo sapiens
  misc_feature 1, 3, 375, 379, 380, 381, 382, 383, 384, 385, 386, 387, 388,389, 390, 391, 392, 393, 394, 395, 396, 397, 398, 399, 400,401, 402, 403, 404, 405, 406, 407, 408, 409, 410, 411, 412,413, 414, 415, 416, 417, 418, 419, 420, 421, 422: n = A,T,C or G
  misc_feature 423, 424, 425, 426, 427, 428, 429, 430, 431, 432, 433, 434,435, 436, 437, 438, 439, 440, 441, 442, 443, 444, 445, 446,447, 448, 449, 450, 451, 452, 453, 454, 455, 456, 457, 458,459, 460, 461, 462, 463, 464, 465, 466, 467, 468, 469: n = A,T,C or G
  misc_feature 470, 471, 472, 473, 474, 475, 476, 477, 478, 479, 480, 481,482, 483, 484, 485, 486, 487, 488, 489, 490, 491, 492, 493,494, 495, 496, 497, 498, 499, 500, 501, 502, 503, 504, 505,506, 507, 508, 509, 510, 511, 512, 513, 514, 515, 516: n = A,T,C or G
  misc_feature 517, 518, 519, 520, 521, 522, 523, 524, 525, 526, 527, 528,529, 530, 531: n = A,T,C or G
ngngaccgcgtaatacgactactatagggcgaattggagctccaccgcggtggcggccgcccgggcaggtacttgcctgggagaaggcagcggacgcatcacttgcacttctagaaatagatgcaacgatcaggacacaaggacatcctatagaattggagacacctggagcaagaaggataatcgaggaaacctgctccagtgcatctgcacaggcaacggccgctctagaactagtggatcccccgggctgcaggaattcgatatcaagcttatcgataccgtcgacctcgagggggggcccggtacccagcttttgttccctttagtgagggttaattgcgcgcttggcgtaatcatggtcatagctgtttnctgnnnnnnnnnnnnnnnnnnnnnnnnnnnnnnnnnnnnnnnnnnnnnnnnnnnnnnnnnnnnnnnnnnnnnnnnnnnnnnnnnnnnnnnnnnnnnnnnnnnnnnnnnnnnnnnnnnnnnnnnnnnnnnnnnnnnnnnnnnnnnnnnnnnnnnnnn

SEQ ID NO: 9096 - DNA, 875 bp, Homo sapiens
  misc_feature 2, 3, 5, 7, 8, 9, 10, 11, 12, 13, 15, 23, 24, 27, 28, 30,31, 41, 43, 48, 57, 64, 69, 78, 88, 90, 91, 105, 118, 155,413, 463, 712, 736, 744, 745, 756, 764, 776, 778, 786, 788,826, 829, 831, 832, 838, 843, 844, 845, 846, 847, 848: n = A,T,C or G
  misc_feature 849, 850, 851, 852, 853, 854, 855, 856, 857, 858, 868, 875: n = A,T,C or G
gnnangnnnnnnngnaataactnnctnntnnctgtgagaananggccngatcatgcntgctcgngcggncgtgtgagngatggatatntnnataattttagcggncgcccgggcaggnactaccccaaataactttcttattgctctgaaagaanaaaagcaatgtaaatcactatgattattgcacaaacaaccagaattctccaacaattttaagtaatctgatcctcttcttggagaaaattgttacctaatagtttttccttatgaatgttattactactggtataaatcaaatttctataaatttcctacttaagtcttaagaactgggttcttcctttgatgttattcatgttcagaaaggaaacaacactttactcttttaggacaattcctagaatctatagtantatcaggatatattttgctttaaaatatattttggttattttgaatacanacattggctccaaattttcatctttgcacaatagtatgacttttcactagaacttctcaacatttgggaactttgcaaatatgagcatcatatgtgttaaggctgtatcatttaatgctatgagatacattgttttctccctatgccaaacaggtgaacaaacgtagttgttttttactgatactaaatgttggctacctgtgattttatagtatgcccatgtcagaaaaagcaagacaaaatggcctnttgtaccttcgggccgcgaccacnctaagccnnaatttccaccncactggcnggccgttactantnggatcccnanctcggtacccaagccttggcgtaatcatgggccataanctngnngttttnctggnnnnnnnnnnnnnnnncaccagaaanaacacan

SEQ ID NO: 9097 - DNA, 579 bp, Homo sapiens
  misc_feature 4, 498, 535, 537: n = A,T,C or G
gggngtcgccccgcgtccgccgcgtccggtttgccgccagaacacaggtgtcgtgaaaactacccctaaaagccaaaatgggaaaggaaaagactcatatcaacattgtcgtcattggacacgtagattcgggcaagtccaccactactggccatctgatctataaatgcggtggcatcgacaaaagaaccattgaaaaatttgagaaggaggctgctgagatgggaaagggctccttcaagtatgcctgggtcttggataaactgaaagctgagcgtgaacgtggtatcaccattgatatctccttgtggaaatttgagaccagcaagtactatgtgactatcattgatgccccaggacacagagactttatcaaaaacatgattacagggacatctcaggctgactgtgctgtcctgattgttgctgctggtgttggtgaatttgaagctggtattcttcaaagaatggggcagaccccgagagcatgcccttctngcttacacactggggtggtgaaacaactaattgttcngngggttaccaaaatggatttccactgagccccccctaccagct

SEQ ID NO: 9098 - DNA, 489 bp, Homo sapiens
  misc_feature 1, 12, 15, 20, 37, 51, 89, 120, 127, 156, 159, 173, 175,176, 180, 181, 196, 216, 228, 231, 241, 246, 255, 261, 266,333, 335, 337, 344, 348, 351, 352, 357, 373, 388, 394, 395,396, 454, 476, 483, 487: n = A,T,C or G
ngatggaaccantcnctatngggcgaattgggccctntagatgcctgctcnagcggccgccagtgtgatggatatctgcagaattcggnttagcgtggtcgcggccgaggtaccccaatntgaagtnagtaaatgaactaatctacaagcgtggtnatngcaaaatcaataananncganntgctttgacagatancgctttgattgctcgatctnttggtaaatacnggnatcatctgcntggangattggatncatganaactntactgttgtaaaacgcttcatagaggcaaataacttcctgtggcccttcaaattgccttctccaccnangnggaatgnaganacnnaccancccttttgtagaacgngggagtatgctggcnacaggnnngacccagatcaacaggcttattagaagaatgaactaaaggtgtctaccatgattattntttaagcctggttggttaatanacagtcncttnac

SEQ ID NO: 9099 - DNA, 820 bp, Homo sapiens
  misc_feature 2, 3, 6, 7, 11, 13, 97, 576, 608, 662, 663, 712, 741, 783,787, 800, 804: n = A,T,C or G
gnnaannctantnccacttagctcggatccctagtaacggccgccagtgtgctggaattcgcccttagcgtggtcgcggccgaggtactgtgatatntcacatatttttgagaaaaattcccaagccaggcgaatgtggattggaataaagacataggcagtgtataccaccatagcaataatggttagtaagatggtgttaaacatagatcgctcccagggctctaaaacagcacagcagctaatgatttggtattgatagtagagccaggagaaatattccttcacacgcctcaaatccatggttggctccttcaagctgcagtaagtttgtcctaagaaagtccaggtctggttcttcagccttgctccttcgcgaaatgatcctgtgtgggttagttctcctctctgggttgctgtttcctcatctcccagttgggtgtatctccctgcggcttaggtgagcgccgaggctttggctcctccccagctgctgcgagcttccgctgcccccgcgtacctgcccgggcggccgctcgaaaagggcgaattctgcagatatccatcacactggcngccgctcgagcatgcatctaagagggcccaantcgccctatagtgagtccgtattacaattcactggcccggcgtttacaacgtcnngactgggaaaaccctggcgttacccaacttaatcgccttgcagcacatncccctttccccagctggcgtaaataaccnaaaaagcccgcaccgatcgccctttcccaaaatttccccatnctgnatggcgaatggancccnccctgtaaccggccct

SEQ ID NO: 9100 - DNA, 661 bp, Homo sapiens
  misc_feature 32, 33, 497, 504, 505, 579, 597, 600, 623, 633, 635, 651,652, 656, 657, 659: n = A,T,C or G
gaccagcgtccggttcaacgtgacgggcgagnnggcggccccctttccggccgcaccccgtttcccaagacgaacggctctccgcaccggaccccggtcccgacgcccggcggggggagaccccgcgccgccgcggggacgacgcggggaccccgccgagcggggacggacggggacccggctatccggggccaaccgaggctccttcggcgctgccgtatcgttccgcctgggcgggattctgacttagaggcgttcagtcataatcccacagatggtagcttcgccccattggctcctcagccaagcacatacaccaaatgtctgaacctgcggttccttctcgtacttgagcaggattaccatggcaacaacacattcattcagtaggggtaaaactaaccttgtctcacgacggtctaaacccagctcacgtttccctattagtgggtgaacaaatccaacgctttggtgaaattctgcttcacaatgaatanggaagannccgacatcgaaggatcaaaaagcgacgttcgcttatgaacgcttgggcccgccacaagcccagtattcccctgngggtaactttttttgacnccntcctgcttaaaaccccaaaaggncagaaagatncnggagcccccgcttttnngggnntngt

SEQ ID NO: 9101 - DNA, 509 bp, Homo sapiens
  misc_feature 6, 8, 12, 14, 29: n = A,T,C or G
acgcgngnatancnacttactgtagggcnaattggagctccaccgcggtggcggccgaggtacagatgcaaaacaaaagtggttacttctgactggtatatctgcacagcaaaatcgtgtggtgggagctatgcagctatattctgtagataggaaagtgtctcagcccattgaaggacatgcagctagctttgcacagtttaagatggaaggaaatgcagaagaatcaacgttattttgttttgcagttcggggccaagctggagggaagttacatattattgaagttggcacaccacctacagggaaccagccctttccaaagaaggcagtggatgtcttctttcctccagaagcacaaaatgattttcctgttgcaatgcagatcagtgaaaagcatgatgtggtgttcttgataaccaagtatggttatatccacctctatgatcttgagactggtacctcggccgctctagaactagtggatcccccgggctgcaggaattcga

SEQ ID NO: 9102 - DNA, 619 bp, Homo sapiens
  misc_feature 494: n = A,T,C or G
tatagggcgaattggagctccaccgcggtggcggccgaggtacatttcttgtttaggagggttttcctatctacctttctactgaagtagtttctggaactttcctggtggatcagagttacgtaatgcagtctgagccttcagactgctagttagaattgttttaggtgttcagaaagggcaaaataggctgatgtggcctgtcagagtgatgtgttctcaaaaaagttcacttgcacatctgtgggccgcttttgtcctcagacccttagtggacagactccacaaaccctctgatgagacgattgatgtggccagggtccagttagcatcagtagaaggatgtcactaggaaaggcccaggtatctggtaagtgactgtgaggtgtcacagtacctgcccgggcggccgctctagaactagtggatcccccgggctgcaggaattcgatatcaagcttatcgataccgtcgacctcgagggggggcccggnacccagcttttgttccctttagtgagggttaattgcgcgcttggcgtaatcatggtcatagctgtttcctgtgtgaaattgttatccgctcacaattccacacaacatacgagccgggagcataa

SEQ ID NO: 9103 - DNA, 618 bp, Homo sapiens
  misc_feature 2, 10, 12, 19, 24, 42, 67, 78, 171, 172, 194, 218, 242, 250,254, 256, 257, 273, 282, 283, 286, 292, 294, 295, 310, 313,317, 322, 324, 334, 350, 351, 352, 357, 358, 362, 371, 375,379, 380, 383, 388, 393, 397, 401, 406, 410, 419: n = A,T,C or G
  misc_feature 455, 470, 472, 475, 477, 483, 491, 500, 502, 506, 511, 514,516, 517, 526, 527, 528, 529, 533, 537, 539, 555, 565, 574,578, 580, 582, 587, 592, 593, 602, 603, 607, 615: n = A,T,C or G
gncgagtttngntccgacncgccncgcgtccgcagaagttgnttatgatgctatggctggagatttngtgaatatggnggaaaaaggaatcattgacccaacaaaggttgtgagaactgctttattggatgctgctggtgtggcctctctgttaactacagcagaagttgnngccacagaaattcctaaagaanagaaggaccctggaatgggtgcantgggtggaatgggaggtggtatgngaggtatncctngnntctcggattaaactgntcaccttcnnccnttatcnannagttttcattcactnggnctantcctncntttgccgtcnatattttcacaacccnnnctaanntctncctttattnccgncctnnttnacttntgtanttcncccnaaggnaccnccaccttanccttttttctaataaccccatttaatttcctctgcncaactcttcttacanantcntntccttngtcccctnctctcttgnancttngcttnacntnncctttagcnnnnattngctntncttaatttcaccctanttcttacggnaccttctcncccncngnaaaanttttnnccctactcnngagntaagcttnttc

SEQ ID NO: 9104 - DNA, 646 bp, Homo sapiens
  misc_feature 21, 51, 628: n = A,T,C or G
gcatttaccctcactaagggnaacaaagctgggtaccgggccccccctcgngtcgacggtatcgataagcttgatatcgaattcctgcagcccgggggatccactagttctagagcggccgcccgggcaggtacgcgggggtgcagggcagtcagactggaaccatggagctcagcgtcctcctcttccttgcactcctcacaggcctcttgctactcctggttcagcgtcaccctaactcccatggcaccctcccaccagggccccgccctctgccccttttggggaaccttctgcagatggacagaagaggcctactcaaatcctttctgagggagtggatctgattgccgtcaatcaataatacctttgaccaagggactccaatcaattcagcatgctttgcctaatgccttttgtttgtaatactgttgcgggacaatcaaagactggagagaccaaaaaaaaaaaaaaaaaaaaaaaaaagtacctcggccgccaccgcggtggagctccaattcgccctatagtgagtcgtattacgcgcgctcactggccgtcgtttacaacgtcgtgactgggaaaaccctggcgttacccaacttaatcgccttgcagaaattccccntttcgccagctggcgtac

SEQ ID NO: 9105 - DNA, 861 bp, Homo sapiens
  misc_feature 2, 3, 4, 5, 619, 624, 634, 704, 723, 729, 733, 748, 771,777, 784, 786, 788, 796, 799, 814, 823, 831, 832, 836, 838,842, 852, 853, 857, 860, 861: n = A,T,C or G
gnnnnggcgccgtaatacgactcactatagggcgaattggagctccccgcggtggcggcccgcccgggcaggtaccaaatgaagtgtgaagacaaggccatccaccactttatagagggtgtaaaaataaaccagaaatcaagggagaaagaaaagatgaaagacaaactgcaaaaaattgccaaaatgcgactttctaaaaatggagcagattctgaggctttgcatgtcttggcattccttcaggagctgaatgaaaaaatgcaacaagcagatgaagactctgagaggggtttggagtctggaagcctcatcccttcagcatcaagctggaatggggaatgaagaatagagatgtggtgcccactaggctactgctgaaagggagctgaaattcctccaccaagttggtattcaaaatatgtaatgactggtatggcaaaagattggactaagacactggccataccactggacagggttatgttaacacctgaattgctgggtcttgagagagcccaaggagttctggggagagggaccagattggggggtaggtccacgggcttggtgatagaaatatttctcgattgacttcttgggtgccattttgaactgnaacanttgcttaaanccctttagtggagtaatctactgggcttggttctatatttatataaagcagcccaaacccttatggtaanattgaaggccattttttgnaatggnggtncctaccttggaggcnttttgcatcccatagagggtagncctgcnttacccngnangggctaanttnatccaaaaacttggngggccaaantttaaatnngggntnaatnttcccccatnntttnttnn

SEQ ID NO: 9106 - DNA, 841 bp, Homo sapiens
  misc_feature 3, 479, 501, 512, 584, 609, 644, 647, 650, 661, 702, 741,744, 745, 746, 747, 748, 749, 750, 751, 752, 753, 754, 756,758, 759, 760, 761, 762, 763, 764, 765, 766, 767, 768, 769,770, 771, 772, 773, 774, 775, 776, 777, 778, 779, 780: n = A,T,C or G
  misc_feature 781, 782, 783, 784, 785, 786, 787, 788, 789, 790, 791, 792,793, 794, 795, 796, 797, 798, 799, 800, 801, 802, 803, 804,805, 806, 807, 808, 809, 810, 811, 812, 813, 814, 815, 816,817, 818, 819, 820, 821, 822, 823, 824, 825, 826, 827: n = A,T,C or G
  misc_feature 828, 829, 830, 831, 832, 833, 834, 835, 836, 837, 838, 839,840, 841: n = A,T,C or G
agngcgtaatcgactactatagggcgaattggagctccccgcggtggcggccgcccgggcaggtacccagggaacaaatgctactgggactccacacctacctaagaagcagctctacccagactccacatggctctctgttttggtctggagaccccagctggggtatctcctgagcccagggattcaaaggttcgtggcagaaatatgcatcccacgggactctcactcactcaccattttcttgtagggggattcccctgggtctgtgccactcctgggtgaatggttgatctgtctcactcttctccgtgatccgaaggtcacactatgtcactgatgaatccttatgtgtccacctggatgttccggttgaagagctagtgtctcaccactcttcctgctatttgtgagagtggcacacactagctgcttctagtcaaccatcttggccccaccttactcacttttctcaagtnatcaaagaccacaaaggatgtnctttacaagancagatcccccaaaatgtaagagttcactgaaaaggtgggagctcaaaccaagagaggacttatcttgcaggntaaaagacacttgtaccttggccgntctaaaactaagtggatccccccggctgcaggaantcnatntcaagcttatngattccgtcgacctcaaggggggcccggacccactttggtncctttaatgagggtaattgccccttggcgtaacatgggntannnnnnnnnnncngnnnnnnnnnnnnnnnnnnnnnnnnnnnnnnnnnnnnnnnnnnnnnnnnnnnnnnnnnnnnnnnnnnnnnnnnnnnnnnnnnnnn

SEQ ID NO: 9107 - DNA, 468 bp, Homo sapiens
  misc_feature 2, 3, 4, 5, 27: n = A,T,C or G
gnnnnagggggggcgccgtatcgactnctatagggcgaattggagctccccgcggtggcggccgcccgggcaggtacagtattgagaagtagggaaagaatagaaggaggagttgaatctgtaattgactgagcaatcagttgagataactcactgcctccacataaccttgggctgtcctatgagtcagtggagagcaacccctctcatgtaggttcagtctgaggtagctcactggcactgggaaagttgatcagggtagtcccatctcatgcacagccccatttccccatgagccgctagagtggctcgtatcagaaagatgccataccaaatgctggcaaggacctggagcaactagaatgcatgtgcatttaccttgtcctgacagccactttggagaactctttggctgtttcttataaagctaaacataatcttcccaaataacatggcaatcccacttcc

SEQ ID NO: 9108 - DNA, 614 bp, Homo sapiens
  misc_feature 596, 613: n = A,T,C or G
gactcactatagggcgaattggagctccaccgcggtggcggccgaggtacaagttgtctttatgctgcgagataagtcctctcttggtttgagctcccaccttttcagtgaactcttacattttgggggatctgctcttgtaaaggacatcctttctggtctttgattacttgagaaaagtgagtgaggtggggccaagatggttgactagaagcagctagtgtgtgccactctcacaaatagcagaaagagtggtgagacactagctcttcaaccggaacatccaggtggacacataaggattcatcagtgacatagtgtgaccttcggatcacggagaagagtgagacagatcaaccattcacccaggagtggcacagacccaggggaatccccctacaagaaaatggtgagtgagtgagagtcccgtgggatgcatatttctgccacgaacctttgaatccctgggctcaggagataccccagctggggtctccagaccaaaacagagagccatgtggagtctgggtagagctgcttcttaggtaggtgtggagtcccagtagcatttgttccctgggtcctgcccgggcggnccgcccggcaggtacana

SEQ ID NO: 9109 - DNA, 437 bp, Homo sapiens
gaattgtaatacgactcactatagggcgaattgggccctctagatgcatgctcgagcggccgccagtgtgatggatatctgcagaattcggcttagcgtggtcgcggccgaggtacctggtgctaacatccctgcctggctggctcctttattagtgcccatctgcagactaattgtggtctggtcaaaaggtttgtcagtttgcattttgggatcataaagatgcctcctagtcccgtaagctgtcatacctgcctggctggcacatttgttggttcccatctgcagaccaattacactttggccagcttttaattttccttcatcaaaacgtcttgtttgtttttctgcatacttaactccaatgtcaatggttgtatggaatccttttgttttagccagacctgctagagccaccagagtagtctgaacctggg

SEQ ID NO: 9110 - DNA, 843 bp, Homo sapiens
  misc_feature 2, 247, 463, 505, 508, 512, 517, 535, 567, 586, 589, 612,619, 620, 635, 662, 677, 683, 704, 716, 729, 731, 738, 747,748, 749, 753, 754, 759, 772, 781, 810, 812, 816, 821, 822,824, 829, 832, 833, 840: n = A,T,C or G
tngggcgaattggagctccccgcggtggcggccgaggtacaggctgacagagaagattcccgagagtaaatcatctttccaatccagaggaacaagcatgtctctctgccaagatccatctaaactggagtgatgttagcagacccagcttagagttcttctttctttcttaagccctttgctctggaggaagttctccagcttcagctcaactcacagcttctccaagcatcaccctgggagtttnctgagggttttctcataaatgagggctgcacattgcctgttctgcttcgaagtattcaataccgctcagtattttaaatgaagtgattctaagatttggtttgggatcaataggaaagcatatgcagccaaccaagatgcaaatgttttgaaatgatatgaccaaaattttaagtaggaaagtcacccaaacacttctgctttcacttaagtgtcnggcccggaatactgtagggaacaagcatggatcttgttactngcngatnttttnaaatatccacagtacctngggccggttcttagaaactagtgggatccccngggctgcagggaatttccnatnttaaaccttattggttacccgtngacctcnnaggggggggcccggnccccaagcttttggtcccctttagtgnggggtgaaattggcncccttngccgaaattattgggtcatanctggtttcccgngggggaaattggntntccgctncccattccnnncaannaaacnagcccgggggccntaaaggggnaaaggcctggggggcctaatgagggggcnanctcnctttnntnggcgnggnngcccctngct

SEQ ID NO: 9111 - DNA, 664 bp, Homo sapiens
  misc_feature 1, 3, 9, 10, 18, 19, 20, 27: n = A,T,C or G
ncngctccnngagggccnnnttgggtnccgggccccccctcgggtcgacggtatcgataagcttgatatcgaattcctgcagcccgggggatccactagttctagagcggccgcccgggcaggtacagtttttgatcttgtggaagagtatgaaaacatctgtggtagtcaggtgaatatactgagtaaaatagtgagtcgagcaacacctggacttcaaaaattttcaaaaacagccagtatgctctggcttcttcaacaggagatggtcacatggaggctgctggcttctttgtatagagacagaatacagtctgcattagaagaggaaagtgtattcgcagttactgctgttaatgccagtgaaaaaacagttgtggaagcgttatttcagagggattcacttgttcgacaaagtcagctggtggtagattggttagagagtattgccaaagatgaaattggagaattttctgataatattgagttttatgcaaaatcagtatattgggaaaatactctgcataccttaaaacaacggcagctgacttcttacgttggaagtgttcgtccgcttgtcactgaattggaccctgatgctcccataagacagaaaatgccccttgatgatctggatagagaagatgaagttagattactcaac

SEQ ID NO: 9112 - DNA, 795 bp, Homo sapiens
  misc_feature 2, 3, 4, 5, 6, 7, 8, 9, 10, 12, 13, 17, 18, 20, 24, 612,643, 647, 648, 658, 668, 678, 684, 696, 703, 719, 732, 739,740, 763, 767, 768, 775, 776, 784, 785, 787: n = A,T,C or G
gnnnnnnnnngnnttgnntntcgnaccctccggctgaagcgctttgtgtgtagcggggccgcgtcagcccggccgggtacgaggcgcctcgggtccccgcaccacctcctgctgccttcccgtcgccgctcccgaagcttttccagatgtccctggtagatttgggaaagaagcttttagaagcggcacgagcaggtcaagatgatgaagttcgtattttgatggcaaatggagctccctttactacagactggctgggaacttctccacttcatctagcagcacagtatggtcattattccaccacagaggtactgctgcgagctggtgtgagcagagatgccagaaccaaagtggaccgaacaccattacatatggcagcttctgagggccatgccagcatagtagaggttttacttaagcatggtgctgatgtcaatgcaaaggacatgttaaagatgacagctctccattgggccacagaacacaatcatcaagaggtggtggaacttttaatcaaatatggtgctgatgtacacaccccaaagtaaattttgtaaaactgctttgatatttcaatagacaatgggaaatgaagaattagcagagatnttcaaattggtttccgaaccaatcacacaancccnnaggtctggancttggaaatnatggttgacnccaaanttttttggcccnggggggngggaccaaaaaaaaanggttctttttatnaaacttnnaaaaattaacaatactcctaaanactnnttcttgnntttaaaanntnggccaaaa

SEQ ID NO: 9113 - DNA, 981 bp, Homo sapiens
  misc_feature 2, 3, 462, 470, 475, 483, 508, 536, 547, 570, 585, 591, 593,595, 612, 614, 615, 624, 633, 634, 637, 643, 654, 665, 671,676, 678, 682, 686, 692, 698, 699, 702, 706, 707, 709, 716,727, 730, 733, 734, 735, 743, 747, 749, 751, 754: n = A,T,C or G
  misc_feature 760, 763, 765, 767, 770, 772, 775, 777, 779, 780, 788, 790,795, 796, 798, 799, 803, 806, 810, 812, 813, 815, 816, 818,821, 830, 831, 832, 841, 843, 846, 848, 850, 872, 879, 880,888, 892, 893, 895, 903, 905, 912, 921, 923, 929, 932: n = A,T,C or G
  misc_feature 934, 937, 938, 939, 947, 950, 956, 958, 963, 965, 967, 969,973: n = A,T,C or G
gnnagatggtcacccacgcgtccggcggagcgtctcaatgctcgagcccccagtctgggcaatatagttgagaccccatctctgcaaaaaaagaagttccagaggcccagacttgctactggtgcccagggggctgtggggcagcttgggcattgagccctcatgctgtgggatctgatgctgtctctaggtagatagtgttggaattgaattggaggacacccaactggtgtccgctgcagaactgattgcttgcctggtggtggggagaaatccttacatattttttggagtcacagaagtcttctgtgttgattgttgtagtgtgaaagcagaggaaaaacaatggtttgggttttttcaaaacaactttcatgacacatacgaggaatgtaaattccagaaggccaatgccatgtctggtttacctactctttttcccccaagcttctagtacatagnaggcattntgatntatccaancaaacaagcaagtgacttgctagtngatgtcctggagaatctttttgctgctngaagggtcctnctgccctcacatttctctttggnagcttttagctactntctcantnangcccaccttttttgtcntnngtcaaaaanccaattaanntgnccctgnaggctggcttngtcacttcacnggtacnccatnanttgntggnttatancatggnnttntacnntncacttgnctcccttattnaanttnnntccccganaatntncncancctggntgnananaangngtngntnnccttttanantcttnncnnattnaanaacnanntnngntcntttcccctnnnctgaatcantngcntntngcttctccacagggtccttttncgaaaanntactcggngtcnntnctgggggntncccctanccattcatngnctattnctncnagnnnaaattggngtntaattntntcctngnanangcgngttgtcct

SEQ ID NO: 9114 - DNA, 857 bp, Homo sapiens
  misc_feature 7, 8, 13, 16, 25, 26, 404, 410, 411, 412, 413, 414, 415,416, 417, 418, 419, 420, 422, 423, 424, 425, 426, 427, 428,429, 430, 431, 432, 433, 434, 435, 436, 437, 438, 439, 440,441, 442, 443, 444, 445, 446, 447, 448, 449, 450, 451: n = A,T,C or G
  misc_feature 452, 453, 454, 455, 456, 457, 458, 459, 460, 461, 462, 464,465, 466, 467, 468, 469, 470, 471, 472, 473, 474, 475, 476,477, 478, 479, 480, 481, 482, 483, 484, 485, 486, 487, 488,489, 490, 491, 492, 493, 494, 495, 496, 497, 498, 499: n = A,T,C or G
  misc_feature 500, 503, 504, 505, 506, 507, 508, 509, 510, 511, 512, 513,515, 516, 517, 518, 519, 520, 521, 522, 523, 524, 525, 526,527, 528, 529, 530, 531, 532, 533, 534, 535, 536, 537, 538,539, 540, 541, 542, 543, 544, 545, 546, 547, 548, 549: n = A,T,C or G
  misc_feature 550, 551, 552, 553, 554, 555, 556, 557, 558, 559, 560, 561,562, 563, 564, 565, 566, 567, 568, 569, 570, 571, 572, 573,574, 575, 576, 577, 578, 579, 580, 581, 582, 583, 584, 585,586, 587, 588, 589, 590, 591, 592, 593, 594, 595, 596: n = A,T,C or G
  misc_feature 597, 598, 599, 600, 601, 602, 603, 604, 605, 606, 607, 608,609, 610, 611, 612, 613, 614, 615, 616, 617, 618, 619, 620,621, 622, 623, 624, 625, 626, 627, 628, 629, 630, 631, 632,633, 634, 635, 636, 637, 638, 639, 640, 641, 642, 643: n = A,T,C or G
  misc_feature 644, 645, 646, 647, 648, 649, 650, 651, 652, 653, 654, 655,656, 657, 658, 659, 660, 661, 662, 663, 664, 665, 666, 667,668, 669, 670, 671, 672, 673, 674, 675, 676, 677, 678, 679,680, 681, 682, 683, 684, 685, 686, 687, 688, 689, 690-857: n = A,T,C or G
ggactanncgacntantttagggcnnattggagctccaccgcggtggcggcccgcacagtaacagtaatagtcagcctcatcctcaacgtgggccccactgatggtcaaggtgactgtggtccgtgaactggagccggagaatcgctcagagatccctgagggccgctcgctgtctttatacatcactaacacaggggcctggcctggcttctgctggaaccaccgagcatctttttttgccagtacctcggccgctctagaactagtggatcccccgggctgcaggaattcgatatcaagcttatcgataccgtcgacctcgagggggggcccggtacccagcttttgttccctttagtgagggttaattgcgcgcttggcgtaatcatggtcatagctgttnctggannnnnnnnnnnannnnnnnnnnnnnnnnnnnnnnnnnnnnnnnnnnnnnnnnngnnnnnnnnnnnnnnnnnnnnnnnnnnnnnnnnnnnnnggnnnnnnnnnnncnnnnnnnnnnnnnnnnnnnnnnnnnnnnnnnnnnnnnnnnnnnnnnnnnnnnnnnnnnnnnnnnnnnnnnnnnnnnnnnnnnnnnnnnnnnnnnnnnnnnnnnnnnnnnnnnnnnnnnnnnnnnnnnnnnnnnnnnnnnnnnnnnnnnnnnnnnnnnnnnnnnnnnnnnnnnnnnnnnnnnnnnnnnnnnnnnnnnnnnnnnnnnnnnnnnnnnnnnnnnnnnnnnnnnnnnnnnnnnnnnnnnnnnnnnnnnnnnnnnnnnnnnnnnnnnnnnnnnnnnnnnnnnnnnnnnnnnnnnnnnnnnnnnnnnnnnnnnnnnnnnnnnnnnnnnnnnnnnnnnnnn

SEQ ID NO: 9115 - DNA, 876 bp, Homo sapiens
  misc_feature 67, 84, 181, 313, 399, 411, 472, 528, 530, 591, 598, 608,616, 628, 632, 690, 752, 768, 790, 817, 827, 831, 837, 841,852, 860, 862, 871: n = A,T,C or G
tcgtatacgactactatagggcgaattggagctccccgcggtggcggcccgcccgggcaggtacgcngggggagacgagcccancactggaagtcgccggtgtttccattcggtgatcatcactgaacacagaggactcaccatggagtttgggctgagctgggttttcctcgttgctctnttaagaggtgtccagtgtcaggtgcagctggtggagtctgggggaggcgtggtccagcctgggaggtccctgagactctcctgtgcagcctctggattcatgttcagtaactatggcatgcactgggtccgncaggctccaggcaaggagctggaatgggtggcagccatatcatatgatgggattaatagatactatgtagactccgtgaagggccnattcaccatctncagagacaattccaagaacacgctgtatctgcaaatgaacagcctgagcgctgaaaacacngctgtattttactgtgccaaaggctatagtggctacccgcagtggtacctctgccngntctagaactagtggatcccccggctgcaagaattcgatatcaagcttattgattccgtcgncctcganggggggcccngtacccancttttgtttccnttantgaggggttaattggcgcgcctggcgtaatcattggcatagcttgtttcctggtgtgnaaatggtatccgtcacaatttcacacaacatacgagccgggagcataaagtgttaaagcctngggtgcctaatgaatnagctacctcacatttaattgcntttggcctacttggcccttttcaatcngggaaacctntttngcccanttgnatttaataatnggccaacncncggggaaangcggt

SEQ ID NO: 9116 - DNA, 785 bp, Homo sapiens
  misc_feature 2, 3, 15, 216, 667, 693, 730, 750, 770: n = A,T,C or G
anncgactactgtanggcgaattgggtaccgggccccccctcgaggtcgacggtatcgataagcttgatatcgaattcctgcagcccgggggatccactagttctagagcggccgaggtaccgcggggatccgaagtatgcttatccaggtgggctgcctcaagcctcgatcccacccccgcgctggtagatggtgtcaaggtccttgcgtggganaaggacttgggtgagatgcatgcggagattgcccccaattccggcctggagccaagggaaagggatgcctggatttgtgtctctattggtggtccacgctgcggatgcctgggtagcccagaggttatctacgccatacttctcactgtttttgagcatacctagatgttcctttcctaggcggagtatagatcgcacgtgttctagcctcttagactcagagggttcgagctctataagcccctccactcccttcattttacaaatgagactcaaacctagagcgcggtaatgaccttactaagaccaaatggctggtgaattggggcttcactagaatccaggcttgctggctaacaccaatgctccctccatcatttcatgttatgttttcatttcccctcttgtctgagagattgctctgatgtctttccttccataaagtcctacngagatcgagcttacctcatttttctnccagcctaggagctcattaccaggatcactttctttnccccagggtgtaccttgccnggccggccgccaccgcgggnggagcttcaactttt

SEQ ID NO: 9117 - DNA, 869 bp, Homo sapiens
  misc_feature 2, 3, 4, 5, 7, 8, 9, 17, 24, 33, 34, 35, 44, 574, 583, 619,620, 621, 622, 623, 624, 627, 628, 629, 630, 631, 632, 633,634, 636, 637, 638, 640, 641, 642, 643, 644, 645, 646, 647,648, 649, 651, 673, 675, 688, 691, 696, 715, 716, 719: n = A,T,C or G
  misc_feature 720, 723, 728, 729, 730, 736, 740, 742, 743, 744, 745, 746,747, 748, 749, 750, 751, 752, 753, 757, 758, 760, 762, 764,765, 766, 767, 768, 769, 770, 771, 773, 774, 775, 776, 777,778, 779, 781, 782, 785, 786, 787, 788, 789, 790, 791: n = A,T,C or G
  misc_feature 792, 793, 794, 795, 796, 797, 798, 799, 800, 801, 802, 803,804, 808, 809, 810, 811, 812, 813, 815, 816, 817, 818, 819,820, 821, 822, 823, 824, 825, 826, 827, 828, 830, 831, 832,833, 834, 835, 836, 837, 838, 839, 840, 841, 842, 843: n = A,T,C or G
  misc_feature 844, 845, 848, 851, 853, 854, 855, 856, 857, 858, 860, 861,862, 863, 864, 865, 866, 867, 868: n = A,T,C or G
gnnnntnnnttgatganattgccngcgcgcaannnattcctaantaaagggaacaaaagctgggtaccgggccccccctcgagagtacttctagaattaattaaggcggggaagtgataagtggtaaaatgagacatttcctaggggtagaggtacaaagctaaaaaagaaggaaacccagactgaattttacgtttcttatttccaactcctctcgatgtctacctggaaacctttccaatctttaagcattcaactgcagtgaaatatcctctggggaccttctgggacatcccaagacagagttcatcacccttttttaatagtgtcctgtacttttcttatctttctattgttgcttttaaaacatattttcttgcaattaccttcacatgcactgtgaacacccgacaatttaatgtgtttttgtgcatgtgtatgcatgcacgctgaataagttccttgcatgctaaaaaatgtttcaacctacaaaataaatagtaatgtcattgcctggttcgtgaaaatttggtgataatagatttcacagaaccaggagaaacttataaagatnaagctccanacatattactatggaggccaaaatatcaaaccattnnnnnngannnnnnnnannnannnnnnnnnngngggcccccccccgggggggggncnccaaatccccccnttnagggngggttttttcccccccccnnccnnggnccccnnntttttnaaanannnnnnnnnnnncatnnanangnnnnnnnntnnnnnnntnngtnnnnnnnnnnnnnnnnnnnnacannnnnngnnnnnnnnnnnnnntnnnnnnnnnnnnnnnntgngtntnnnnnnannnnnnnnnc

SEQ ID NO: 9118 - DNA, 637 bp, Homo sapiens
  misc_feature 24, 60, 444, 464, 499, 517, 519, 528, 533, 542, 582, 601,613, 619: n = A,T,C or G
gcccacgcgtccgggcgagccggntcctagtgccgtaccgtcagtccccggccgcgcggnagccgggatgcactgttcctgctgtgggtcctcatcatggagaccaaacgggtggagattcccggcagcgtcctggacgatctctgcagccgatttattttgcatattcccagcgaggaaagagacaatgcaatccgagtgtgttttcagattgaacttgcccattggttttacttggatttctacatgcagaacacaccaggattacctcagtgtgggataagagactttgctaaagctgtcttcagtcattgtccgtttttgctgcctcaaggtgaagatgtggaaaaagttttggatgaatggaaggaatataaaatgggagtaccaacatatggtgcaattattcttgatgagacacttgaaaatgtactactgggtcangggtacctagccaaaatcangctggggatttccaaaaggaaaagtaataaagaanaagctcctcatgaattgngnctgctaaanaaggnctttgaaanaaactgggttttgatttcaaagacttttttttgtagggangattaccttggaacttccnatcaaatgaccngcttgntccggttggacatcattc

SEQ ID NO: 9119 - DNA, 658 bp, Homo sapiens
  misc_feature 8, 26, 98, 370, 392, 403, 405, 428, 451, 489, 494, 511, 512,535, 536, 543, 549, 552, 562, 569, 572, 582, 587, 592, 593,598, 601, 605, 606, 607, 622, 623, 625, 626, 627, 628, 630,634, 638, 639, 641, 644, 649, 653, 654, 656, 658: n = A,T,C or G
ggtgtcgncccacgcgtccgggcagnacagtacggtggctgctgctgccgccaccaccacctcaacagcaacagcagcagcagcagcagcatctgagnaagcaagtgcgaacacaacctgtgctgaatgatctgatgccagacatcgcggtgggtgtgtccacactgtcactcaaggacaggaggcttccagagcttgctgtagacacagaattaagccagtcagtttctgaagcaggaccagggcctccccagcatctgtcgtgtattccacagagacatacacacacttctcggaaaaaacacacactagagcaaaaaacagacaccagagaaaatccacaggaatatccggatttctatgacttctnaaatgctgcttgcagacctttntactcctgctntnagcagacgcaccccttccccttngcaaggtggatattttggtcccnatctgtacagccacaataaggcatcaccaagtggcttnaagtnaggctacctacctggtnngacgtttgctaaaacaggaagannttggagngaaatncantttcccctgncgggatntanacagacatanatganccctnncctgntgngagnnncaacctcccatgagnnannnngntttntaanncnganagttntccnntnan

SEQ ID NO: 9120 - DNA, 610 bp, Homo sapiens
tccccgcggtggcggccgagtactgctccctgcacgatccagtcagcccctgcccggctggttatgtaacaagcaagtctgtgtctgtgtggagtgttgcaggacgagtggaaatgactgtttccaagttcatggcaattcagaaggcccttcagccagactggttccagtgcctctccgatggagaagtatcttgtaaggaagcaacttccataaaaagggtcagaaagtctgttgaccgatcacttcttttcttggataactgtctgcggctgcaggaagagtcagaggttcttcagaagagtgtgatcattggagtgattgaaggtggagatgtgatggaagagaggctgaggtcagcacgagagacagccaagcggcctgtgggtggcttccttctggatggttttcaaggaaatccaacaaccctggaggctagactacgcttgctgtcatcagtcactgcagagctgccggaggacaagccaaggctcatatctggtgttagtcggccagatgaggtgctcgagtgtattgaaagaggagtggacttatttgagagttttttcccttatcaagtaacagagcggggatgtgccctgactttcag

SEQ ID NO: 9121 - DNA, 608 bp, Homo sapiens
  misc_feature 7, 59, 88: n = A,T,C or G
gaccccncgtccggtggtatgtgtctaattgcaggggcgggggtaggggggaggccagnggattaacactctttaaatagacatcagnaaaactaagaatagccttgctgcctggtaattgatgggcattcctgactacgggccacacactcagtaggtgctcgataaacatgggtgaaatacaggaataaacaaatactgaaaatgggtcattgggtgagcacttagccagtaaaaatctgtgctttgtataaaaagaactttggactgaggttatatgagtcttcctgcaggctggagacctctgttacctttacttctctacttttgttgtcttgagaccagcttttttatttttggtgaggagaacagcaggcagttcaaatgtcagggaaagacaagttcagcttgctttttccttatttctgtcttgttacctgctatcctgccaggttagaaagatggaatcactcccttttgccctatcatcaagacttcagtgttccctggagcactctaaatttgccatcagacttggatcatcctctaataccaagctcctgggtccttcctgaaggctgcctccttgtcttgctgagaagaattaa

SEQ ID NO: 9122 - DNA, 670 bp, Homo sapiens
  misc_feature 3, 4, 5, 8, 12, 14, 17, 31, 84, 164, 403, 407, 533, 581,619, 647, 656, 661: n = A,T,C or G
ggnnntgnatcnanccnaccccgggctcatntggctgggaagtccatggactcttccagggagagagaccagctgaggcgtctntctctgaggttgtgttgggtctaagcgggtgtgtgctgggctccaaggaggaggagcttgctgggaaaagacaggagaangtactgactcaactgcactgaccatgttgtcataattagaataaagaagaagtggtcggaaatgcacattcctggataggaatcacagctcaccccaggatctcacaggtagtctcctgagtagttgacggctagcggggagctagttccgccgcatagttatagtgttgatgtgtgaacgctgacctgtcctgtgtgctaagagctatgcagcttagctgaggcgcctagattactanatgngctgtatcacggggaatgaggtggggggtgcttattttttaatgaactaatcaaagcctcttgagaaattgttactcattgaactgggagcatcaagacatctatggaagtggataccggagtganttggtgtccatgcttttcactctgaggacatttaatcggagaaccctnctggggaattttgttgggagacacttgggaacaaacancaccctgggaatgcagttgcaagcacanattcttgcnccagntctttgact

SEQ ID NO: 9123 - DNA, 900 bp, Homo sapiens
  misc_feature 537, 560, 562, 585, 605, 611, 618, 623, 666, 698, 728, 739,748, 749, 755, 765, 801, 814, 817, 819, 827, 837, 845, 859,864, 868, 869: n = A,T,C or G
ggagtcgacccacgcgtccgccacctcacatgttgatttccaggtcactacaaggagcggaagagagcaggcttctcttccccgtggaagaattccccgtggccccacccacttcccccagtgcgtacgtcaggctccagttcactgtgggatgcccagacaagccctgggcaggttccctcatcgacccaaaagcatctaatgtaaacattcttgggacgcttggagattctccagggaccccattttatctgcctaagcatttggctgtctcatgttaaggtatcatccagccctcgtggcttgtgatggccatttctggttgcgtgagcattagtcatcctgtctctgcattgtggcatgccatggtctcttgcaagggctttgttacaaggtatctgcatttaagatagcccagtcatcgagcgttgcgaacagccccacccaatcgggcctggccaggagatttcatcactgtgatcttaagttctttaccagagcccttattagaacagttaggatgcagccgggcacggntggctcatgcctgtaatccccancncttttggggaagggtgaaggcangcgggatcaccgaaggtcanggaagnttcaagnaccangcctgggcccaaacattagttgaaaacccccgtcacttgtttnaaaacaccacaaaaaaaattaagcttgggatnttgggtggcgggccgaattgcaattcccangccttccttangaagccctnngggcangaaaaaatcngcttggaaccttgggaaggccggaaggttgcaaatngaacctttaaaantcncncccttttngcacttccanccccttgnggacaagtgcaaanaattncctnntcaaaaaaaaaaaaaaaaaaaaaaaaaaaat

SEQ ID NO: 9124 - DNA, 892 bp, Homo sapiens
  misc_feature 4, 6, 12, 13, 19, 34, 40, 173, 193, 293, 314, 331, 426, 555,558, 573, 584, 586, 587, 682, 685, 686, 696, 707, 713, 736,739, 741, 750, 758, 759, 775, 788, 792, 807, 808, 811, 818,837, 838, 842, 846, 848, 854, 859, 860, 862, 864: n = A,T,C or G
  misc_feature 882, 891: n = A,T,C or G
ttgncncgtttnnaatacnactactatagggttntattgngccctctagatgcatgctcgagcggcccgccagtgtgatgggatatctgcagaattcgccctttttagcggcccgcccgggcaggtaccgcgggagggttggtcaatttcgtgccagccaccgcggtcacacnattaacccaagtcaatagangcccggcgtaaaagagtgttttaagatcaccccctccccaataaagctaaaactcacctgagttgtaaaaaactccagttgacacaaaatatgactaccnaaagtggctttaacatatctnaacacacaatagctaanacccaaactgggattagataccccactatgcttaaccctaaacctcaacaagttaaatcaacaaaactgctcgccagaacactactagccacaancttaaaactcaaaggacctggcggtgcttcatatccctctaaaggagcctgttctgtaatcgataaaccccgatcaaccttaccacctcttgctcagcctatataccggcatcttagcaaaccctgatnaangctacaaagtaagcncaagtaccttngnncgggaccactcttagggcgaatttcaagcacactggccggccgttactagtggatcccagctcggtaccaaccttggcgtaatcatggtcataantgnnttcctggtgngaaaattggtnattccnttcacaaatttcacaccaacatnccnancccggaaancataaaanngtaaaacctggggtgncctaattgagtgngctnacttacattaaattnncgntggcctnaattggcccgtttttcaanncggnaaancnttttgngccanntngntttaataaattggccacnccccggggnt

SEQ ID NO: 9125 - DNA, 673 bp, Homo sapiens
  misc_feature 672: n = A,T,C or G
attggccctcgaggccaagaattcggcacgagcaattctccttctagatatcaatgacaaccctcctcttgttttgtttcctcagtctaatatgtcttatctgttagtactgccttctactctgccaggctccccggttacagaagtctatgctgtcgacaaagacacaggcatgaatgctgtcatagcttacagcatcatagggagaagaggtcctaggcctgagtccttcaggattgaccctaaaactggcaacattactttggaagaggcattgctgcagacagattatgggctccatcgcttactggtgaaagtgagtgatcatggttatcccgagcctctccactccacagtcatggtgaacctatttgtcaatgacactgtcagtaatgagagttacattgagagtcttttaagaaaagaaccagagattaatatagaggagaaagaaccacaaatctcaatagaaccgactcataggaaggtagaatctgtgtcttgtatgcccaccttagtagctctgtctgtaataagcttgggttccatcacactggtcacagggatgggcatatacatctggtttaagggaaggggaaaagcatcccagggaagatgaaaatttggaagtacagattccactgaaaggaaaaatggcttgcatatgccaana

SEQ ID NO: 9126 - DNA, 664 bp, Homo sapiens
  misc_feature 577, 612, 614, 616, 624, 627, 632, 637, 639, 652: n = A,T,C or G
cgcgtaatacgactcactatagggcgaattggagctccaccgcggtggcggccgcccgggcaggtacaaaacaaattcaaagggttaagaatttcaagttggtagcttcagagcattaagccccaaatgtggggtcccttctgagcccaggattatgtgtgactgcactggtcacattgccatgaagccagccctggtggttggtagaggggtgggcactggacctaagcagggccaatcagagccattcctggaaatggatatataaatattaggaatgcaaagttatttattttgttagagtttgaacaacgtgatctgtagaaaaccagtcacatttccttaaggatgcatcaataaatatgagctaaatgtaataattagaactttggtttccaagcagattccatgctctaattccctggatagtgaatataataagatgatatatccatgaataagttactttacattgccaaagggacagatgtaaataaggctactaatcagttgaccttaaaataaaggttatcctggattatccatgtaggtccagtgcaatcacatgagcccttanaaacagaggcagaagtagtagttagggaagtgcancntntgaagtgnganatccnaaggncnagaagggtgcacncattgttccgcc

SEQ ID NO: 9127 - DNA, 358 bp, Homo sapiens
  misc_feature 3, 4, 5, 6, 7, 11, 13, 21, 22, 33, 39, 46, 48, 59, 61, 80,313, 348: n = A,T,C or G
tannnnntacntncttcactnngagggtcgacnttgggnccctctnanagcatgctcgnancggccgccagtgtgatggnatatctgcagaattcgccctttcgagcggccgcccgggcaggtaccgcggccgttaaacatgtgtcactgggcaggcggtgcctctaatactggtgatgctagaggtgatgtttttggtaaacaggcggggtaagatttgccgagttccttttacttttttaacctttccttatgagcatgcctgtgttgggttgacagtgagggtaataatgacttggttggttaattgtanatattggggctgttaattgtcagttcagtggtttnaatctgaccc

SEQ ID NO: 9128 - DNA, 682 bp, Homo sapiens
  misc_feature 3, 6, 8, 95, 605, 620, 648: n = A,T,C or G
gantgnanacagactcactatagggcgaattgggccctctagatgcatgctcgagcggccgccagtgtgatggatatctgcagaattcggcttcnagcggccgcccgggcaggtacctatttttataagtccctccggtctgcttctgatttttgcttattcactgcacccatagacacaatttataccatgaaggtgcctgatgcttttctgattctacttctgcacagagcaaggacatgagtgcagtgatggtataagggccaacaagttgagaggctgtaagcccagctctcctccatcctgctactgacatcagagcctctactagatctgagagtgccatgcaccagacctactgtaatcgtgaaaccaatgatccatatgaccctaaagttattgtatactggtgttcaatgatcagtgcgattgggtctttttaaattttttcctttcaatttttattcattcagcaaatactaagctcccactatgcacataagagatgttcaatcaatgttagatgaagggaaaatattcagaaattcacaagtcactccagcactccaaaaacatacaactcttcatgctcctcccttctccgntcttggcctcatctntgcccacatcacaggttggtaaatgctnacatgaacaagaacttaagcacagtatgacatgg

SEQ ID NO: 9129 - DNA, 576 bp, Homo sapiens
  misc_feature 32, 38, 116, 156, 158, 159, 160, 161, 162, 163, 164, 165,166, 167, 168, 169, 170, 171, 172, 173, 174, 175, 176, 177,178, 179, 180, 181, 182, 183, 184, 185, 186, 187, 188, 189,190, 191, 192, 193, 194, 195, 196, 197, 198, 199, 200: n = A,T,C or G
  misc_feature 201, 202, 203, 204, 205, 206, 207, 208, 209, 210, 211, 212,213, 214, 215, 216, 217, 218, 219, 220, 221, 222, 223, 224,225, 226, 227, 228, 229, 230, 231, 232, 233, 234, 235, 236,237, 238, 239, 240, 241, 242, 243, 244, 245, 246, 247: n = A,T,C or G
  misc_feature 248, 249, 250, 251, 252, 253, 254, 255, 256, 257, 258, 259,260, 261, 262, 263, 264, 265, 266, 267, 268, 269, 270, 271,272, 273, 274, 275, 276, 277, 278, 279, 280, 281, 282, 283,284, 285, 286, 287, 288, 289, 290, 291, 292, 293, 294: n = A,T,C or G
  misc_feature 295, 296, 297, 298, 299, 300, 301, 302, 303, 304, 305, 306,307, 308, 309, 310, 311, 312, 313, 314, 315, 317, 319, 322,324, 325, 326, 327, 328, 329, 330, 331, 334, 335, 336, 337,340, 341, 342, 344, 345, 346, 347, 348, 349, 350, 351: n = A,T,C or G
  misc_feature 352, 353, 354, 355, 356, 357, 358, 359, 360, 361, 362, 363,364, 365, 366, 367, 368, 369, 370, 371, 372, 373, 374, 375,376, 377, 378, 379, 380, 381, 382, 383, 385, 386, 387, 389,390, 392, 393, 394, 395, 396, 398, 399, 400, 401, 402: n = A,T,C or G
  misc_feature 403, 404, 405, 407, 408, 409, 412, 414, 415, 416, 417, 418,419, 420, 421, 425, 426, 427, 428, 430, 431, 433, 435, 436,437, 438, 439, 440, 441, 443, 444, 445, 446, 447, 448, 451,452, 453, 454, 455, 456, 458, 459, 461, 462, 463, 464: n = A,T,C or G
  misc_feature 466-468, 470, 475-478, 480-482, 485-487, 492-495, 498, 502,504, 508-510, 512-513, 516-521, 523, 525, 527-528, 530-533,535-536, 539-540, 542-545, 548-552, 554-555, 557-558, 563-564,566, 570, 572-575: n = A,T,C or G
agctatgacgtcgcatgcacgcgtacgtaagncttggnatcctctagaagcggccgcccttttttttttttttttcaaagtaaacgcttcgggccccgcgggaacactcagctaanagcatcgagggggcgccgagaggcaaggggcggggacggncnnnnnnnnnnnnnnnnnnnnnnnnnnnnnnnnnnnnnnnnnnnnnnnnnnnnnnnnnnnnnnnnnnnnnnnnnnnnnnnnnnnnnnnnnnnnnnnnnnnnnnnnnnnnnnnnnnnnnnnnnnnnnnnnnnnnnnnnnnnnnnnnnnnnnnnnnnnnnntntntgntnnnnnnnnttnnnnttnnntnnnnnnnnnnnnnnnnnnnnnnnnnnnnnnnnnnnnnnnntnnntnncnnnnntnnnnnnnnannnttntnnnnnnnnttcnnnngnnangnnnnnnntnnnnnngtnnnnnngnngnnnntnnnantaatnnnngnnnatnnnaggannnnatnaatngngcgnnntnnttnnnnnntngncnnannnngnnttnntnnnnttnnnnntnngnngtggnntngttntnnnnt

SEQ ID NO: 9130 - DNA, 838 bp, Homo sapiens
  misc_feature 3, 5, 6, 7, 8, 29, 601, 639, 677, 707, 719, 724, 789, 809,825: n = A,T,C or G
ggncnnnncgactcactatagggcgaatnggagctccccgcggtggcggccgaggtacctgttagcaaaagtgtcacgatgctgcacctctaccgaaactgatacccacgaactacggaatctaaacagactacaccctgtaactgcgtattactgtccacaatggaatctccaaagacaaaagagtatgaaatttatctgtagtgattatagccaccattttgaattaaattttacactctgcgctcaaataaattagctcaggccagacttagttgggacctgagagttaagtgctggatggtattatttcactttgatttttgataggaatttcttttattccctcatgtttttttttctttaaaaagtatttccagtactcactcctcctcttttatcccccctccccaggcgctacacacaaatcacccccaaagtcgtgttttaaatgcacctgtatttgcttaaacgaaaatgtcagaagtatttgtcctacaagcagtctgagtggtttgtcccgcagctggtctggtgacgctggcccccgcgtacctgcccgggcggccgctctagaactagtggatcccccgggctgcangaattcgatatcaagcttatcgatccgtcgacctcganggggggcccggtacccagcttttggtccctttagtganggttaattgcgcgcctggcgtaatcatggncatagctggttnctggngggaaaatggtattccgctcacaatttcacacaacatacgagccgggagccataaagtgtaaagnccgggggggcctaatgaggngggctacctcacattnaatggcggtggcc

SEQ ID NO: 9131 - DNA, 729 bp, Homo sapiens
  misc_feature 406, 417, 418, 419, 421, 422, 425, 432, 458, 469, 477, 491,492, 494, 496, 497, 502, 509, 514, 527, 530, 543, 549, 550,554, 560, 561, 562, 563, 564, 567, 575, 576, 577, 580, 581,588, 601, 622, 628, 639, 642, 646, 658, 671, 676, 686: n = A,T,C or G
  misc_feature 689, 691, 695, 697, 704, 723, 727, 728: n = A,T,C or G
tactatagggcgaattggagctccccgcggtggcggccgaggtacagtggccccccgtgaaagacagaattgtggttttcctggtgtcacgccctcccagtgtgcaaataagggctgctgtttcgacgacaccgttcgtggggtcccctggtgcttctatcctaataccatcgacgtccctccagaagaggagtgtgaattttagacacttctgcagggatctgcctgcatcctgacgcggtgccgtccccagcacggtgattagtcccagagctcggctgccacctccaccggacacctcagacacgcttctgcagctgtgcctcggctcacaacacagattgactgctctgactttgactactcaaaattggcctaaaaattaaaagagatcgatatctcctgnagtggaaattnnnanncanttgtacntgcccgggcggtcgttttagaactantggaatccccngggcctgnaggaatttcaattnnangnntatcnaaacctnattancttttaggggggnggnccccggacttaanttttgnnaccnttggcnnnnngtnaaattgtnnnctnnggcggtnaaacatggcgganaagaaggccggccttggcgtnaaaagngggcttttgcntcntaanttgcttaacaanaattccgatgcgnttagntctatacggnttnangccnangggggtntctaaatgaatttaaaagncctnnt

SEQ ID NO: 9132 - DNA, 607 bp, Homo sapiens
  misc_feature 1, 2, 3, 6, 7, 8, 11, 12, 43, 392, 420, 426, 445, 450, 497,507, 511, 513, 524, 528, 535, 538, 543, 574, 591, 597, 599,601, 604: n = A,T,C or G
nnnggnnncgnnccacgcgtccggcttggcaatgcagctctancttctaatgcccttttttaaccctttaggtatctgatcgctttgccaattttgcgttactgggcaggctaagagatcttcttttaattcagcctgcttaagacgggaactgataactgtagtgtatcctctgccttttttcttatctattggaggaagctcagatggtgtcacaagaaggatctgaagtggagcttctagtatccccaggagcgcgaagtgaacacggaaggtacctgcaggatccaattgtgtccattgatctctcagagtggctgaggataatagagtttcttcttcaaggtctcaaggtctgaagcatcccacagaatgatcctactgaataactnccataagctgctggcccctatacaaatncttggncaggagcattccctgagtncctgnaagtgtatggctttgggtattacattaaattaccgggaacccccttnacatggaggngctngnggattcctggnctgnattttanaanggtantattccggcctcaaaagccggaaatgactgntgacctggatttttacncaaacntntnttngtc

SEQ ID NO: 9133 - DNA, 731 bp, Homo sapiens
  misc_feature 2, 6, 8, 12, 725, 731: n = A,T,C or G
gnagantntccntcggaaaagctgcacgcttggtgctacctctcggccgcctcatgcattcaggggacctgtgcctgtcattcaggcacaaggtgacggggctgcactctggcacactccaggtgtttgtgagaaaacacggtgcccacggagcagccctgtggggaagaaatggtggccatggctggaggcaaacacagatcaccttgcgaggggctgacatcaagagcgtcgtcttcaaaggtgaaaaaaggcgtggtcacactggggagattggattagatgatgtgagcttgaaaaaaggccactgctctgaagaacgctaacaactccagaactaacaatgaactcctatgttgctctatcctctttttccaattctcatcttctctcctcttctcccttttatcaggcctaggagaagagtgggtcagtgggtcagaaggaagtctatttggtgacccaggtttttctggcctgcttttgtgcaatcccaatgaacagtgataccctccttgaaatacaggggcatcgcagacacatcaaagccatctgtgggtgttgccttccatcctgtgtctctttcaggaaggcattcagcatgcgtgagccataccatcctccatcctgattacaaggtgctccttgtagcaaattatgagagtgagttacgggagcagtttttaaaagaaatctttgcagatggctatgatgttatgtgttcngagatn

SEQ ID NO: 9134 - DNA, 645 bp, Homo sapiens
  misc_feature 498, 516, 534, 561, 563, 567, 586, 607, 608, 620, 628: n = A,T,C or G
gaattggagctccaccgcggtggcggccgcccgggcaggtactgctgactgccctggctggtcagtggggcaaagccaggcatgaagaagtgcaggtaggggaatgggatgatgttcatggtcagcttccacaggtcagcattcagctggcctgggaatcgcaggcaggtggcgaacccatttatggtggcagatactaggaggtttaggtcactctaggtgggcatgggcagctttagggttctgaagcagatgtcatagaaggcttcataatcaatgcaaaaagtctcatctgcatttgctatgagacttggagggtgacattgtggggctctagcatggtgcctgacaccttgggcaagagcagaatgctgaatgtgtttatgatcctatttaaatggtctgaataactgtgatgaatttacttgtataatcagaattcagattaaaaattaagacaactctttttgtttccaacagaaagaaaaaaaaaaaaanaaaaaaaaaaagtacctnggccgctctagaactagnggatcccccggggctgcaggaaattcngntatnaagcttatcgataccgtcnacctaaaggggggggcccggnncccaacctttgnttcccttnagtggaggggttaattg

SEQ ID NO: 9135 - DNA, 859 bp, Homo sapiens
  misc_feature 3, 12, 18, 315, 568, 575, 616, 639, 685, 709, 713, 730, 747,803, 823, 852: n = A,T,C or G
ccngctactatngggctnattggagctccccgcggtggcggccgcccgggcaggtacgcggggatggctggccagaggaggaacgctttgtgttctcatcggagctgcatgggaagtctgcatacagcaaagtgacctgcatgcctcaccttatggaaaggatggtgggctctggcctcctgtggctggccttggtctcctgcattctgacccaggcatctgcagtgcagcgaggtaagtattctgctcacctggcatctcagatgtcaaggaagacctacaagtgaggatagaagtgcagagaaggtggctcangtaaggaagaggaattggcagttctaaagcaaaaactcagagctagaagtcaagggaagcataatgagaaacaatggaaatcaagtcacaatctctcaaagagcctaatcagaaattcctctgaaagggcagtgggagccagttaacataatttcccatgcccatatctttgggagattagagaccccagattaaagaagatcaagaaatacataactcagtcccttgtgctggcaagtgccttcttcttttnctgaaanggctagattaaatgatctcttttatgaaatgggcaattcanatacttgcagaaaggagtcttangcttaaaattagagtgccaaatttcaacccctggaagaaggtgggnaagggtacttgacttattggaagnctcnatgggaaaaaaccattntaagaataccaaatccngggattccttgcttaaaataattcatgcctgaccaagtttgaaaatcttttttttnaaagggcctttttatgtgtnttttaacctgtccaaacttggaaaatttnttttttt

SEQ ID NO: 9136 - DNA, 1166 bp, Homo sapiens
  misc_feature 460, 467, 474, 486, 495, 513, 537, 539, 549, 572, 586, 625,634, 640, 674, 675, 685, 686, 696, 701, 718, 731, 739, 754,766, 773, 779, 792, 801, 806, 807, 810, 819, 827, 835, 850,853, 854, 859, 860, 863, 866, 873, 874, 881, 882, 888: n = A,T,C or G
  misc_feature 889, 897, 902, 904, 905, 918, 920, 924, 928, 929, 935, 936,941, 958, 961, 965, 967, 976, 977, 982, 983, 988, 989, 990,991, 994, 995, 998, 999, 1001, 1002, 1003, 1004, 1005, 1009,1010, 1011, 1012, 1015, 1020, 1024, 1031, 1032, 1036: n = A,T,C or G
  misc_feature 1046, 1047, 1050, 1056, 1061, 1065, 1067, 1068, 1076, 1082,1088, 1089, 1090, 1091, 1096, 1097, 1098, 1101, 1107, 1108,1109, 1114, 1121, 1122, 1130, 1131, 1133, 1134, 1135, 1136,1137, 1143, 1146, 1147, 1148, 1150, 1151, 1152, 1160: n = A,T,C or G
  misc_feature 1165, 1166: n = A,T,C or G
gccgccagtgtgatggatatctgcagaattcgccctttcgagcggccgcccgggcaggtacttttcctacctctttcgcctgcatccttagaaaactcccgtggatgagaagatccccaggcctttacaagctgttgttttacaaaaggagaaactgaggcaggaagaggcggtggatgtgcaccagagcacgtggtgcgtcggtgcatagctgagggcacatggaacattcaccaagataaaccatatgctggaacataaaatttatggatgtcacccatgaagcagagtccttcagaccctcaatcaaaaacaagtctcattttacattaaattggaggactatctggagtctctgaccaccgtgtgacagaaaagagagcagaattggtgcatgatgggtaacactcatcagtaatcgctgtttgccaagccatctgggagggagaccaaagagctnttaaatnagttcangcaccggggctnatacctgtnatcccagcactttggganggccaggtgggtgaatcacctgangncaaggagttnagaacagcctgggccacattggngaaacccttgtctnttctttaaaattcccaaaaaaaataacttgggtggtggngggggggtncccttnggccgggaaccccctttaaggggcgaaatttcanncccacttggnngggcggttcntagtnggttcccaacctcgggncccaagctttggnggtaaatnaatggggcatagctnttttcctggggngaaaatnttattncccttaccaattncccaccaanataannaancccgggagnatttaaangggaaaanccctgggggggcctnatnnggggnnccnacntccattnntttgggnngggctnnctggccgntttcnannggggaaaccttgngncccncttnntttatnnattgngccacccccgggggaanggnggtngngtttggggnntttcnnttttnnnnatnnatnntnnnnngggnnnnggntgggngagngggttanntttnaaggggggtnnggnttcccnaaatngggntnnccgaaaanattggnaaaggnnnnaagcnnnccnaaaggnnntttgnttttttnntccccccnnannnnnaaaaanccnnntnnngggggaancccgnn

SEQ ID NO: 9137 - DNA, 489 bp, Homo sapiens
  misc_feature 4, 5, 11, 18, 20, 456, 457, 458, 461, 462, 464, 467, 469,470, 471, 472, 473, 474, 475, 477, 479, 480, 481, 482, 484,485, 486, 487, 489: n = A,T,C or G
acgnnattatngacatantntgttggctgattggagctccaccgcggtggcggccgcattcatggcgttggggaggtcctgcttgttggcgaacaccaggaggacagcatcccggagctcgtcctcggccagcatcctcatgagctcctcacgggcctcgttcacacgctctctgtcattgctgtccaccacgaagatcaggccttgtgtgttctggaagtagtggcgccacaggggccggatcttgtcctggccacccacgtcccacacagtgaagctgatgttcttgtacctcggccgctctagaactagtggatcccccgggctgcaggaattcgatatcaagcttatcgataccgtcgacctcgagggggggcccggtacccaccttttgttccctttagtgagggttaattgcgcgcttggcgtaatcatggtcatagctgtttcctggannnaannanatntnnnnnnnantnnnntnnnngn

SEQ ID NO: 9138 - DNA, 906 bp, Homo sapiens
  misc_feature 1, 2, 224, 264, 298, 349, 353, 355, 374, 375, 388, 399, 400,409, 420, 421, 423, 426, 429, 435, 451, 452, 458, 466, 469,470, 474, 485, 488, 494, 497, 498, 499, 501, 519, 520, 525,533, 534, 536, 539, 549, 556, 559, 562, 564, 570: n = A,T,C or G
  misc_feature 574, 575, 581, 583, 587, 589, 590, 592, 595, 598, 602, 606,609, 614, 616, 628, 636, 637, 646, 647, 649, 655, 657, 664,667, 669, 671, 682, 684, 685, 688, 689, 698, 700, 701, 703,704, 705, 707, 708, 712, 714, 715, 724, 725, 726, 727: n = A,T,C or G
  misc_feature 728, 729, 746, 750, 753, 755, 756, 758, 765, 767, 778, 779,780, 782, 783, 784, 786, 787, 788, 789, 791, 793, 796, 800,801, 803, 811, 813, 815, 818, 820, 822, 825, 829, 831, 835,836, 841, 843, 844, 845, 848, 850, 851, 861, 864, 869: n = A,T,C or G
  misc_feature 870, 872, 874, 875, 879, 882, 884, 885, 889, 892, 898, 899,901, 905: n = A,T,C or G
nnccgcgtaatacgactcactatagggcgaattggagctccaccgcggtggcggcccgcccgggcaggtacagatgcagcctggctaggcagagaatcccttgtagaaaggtgggggagaatcataggatattataactgtaaggaacatgcaagattttccagattatacccttgatagaatagataagttccttaaggctcagatcttgcttaaagcccgtncagcctgttagagacaagtagaacacgaagcttggccttntggagtctttattgagtacctcggccccttctanaactagtggatcccccgggcttgcaggaatttcatataaagcttatcgatnccgncnacctcgagggggggccccnnacccaagcttttntccctttagtnngggttaatngcccccttggnntnatnatnggcaanagctgtttccttgtgnnaaattntttttccntcnnaaantccccacaacnttncaaccnggnnnanaaaaggtgtaaaaacctnngggtncctaatgnngnganctttacctcncattttnttnggngnttcacntacnngcctcntntttncnngnaanagnaaancttntcngcctncnttattttaattnatccaccnnccccccggnngnagggcngnttattanttngntntcccatttacntnnttnnctaattaantnnannngnnttgntnnttatcgctnnnnnnaattatttttatttctntttntangnntnatatttntntttccataaannntnnngnnnntntnatntaannantgaatttnananaantntnatntttntntccnntaaantnnnatngnncttttttttntanttttnnantnnttcntcnanntttnaanattttnnantttng

SEQ ID NO: 9139 - DNA, 470 bp, Homo sapiens
  misc_feature 2, 3, 11, 206, 462: n = A,T,C or G
gnnaagcctancactacttagggcgaattggagctccccgcggtggcggccgaggtacttgttgttgctttgtttggagggtgtggtggtctccactcccgccttgacggggctgctatctgccttccaggccactgtcacggctcccgggtagaagtcacttatgagacacaccagtgtggccttgttggcttgaagctcctcanaggagggcgggaaaccaaattgaccgaggggggcagccctttgggctgacctaggacggtcagcttggtccctccgccgaacacccaaatgccactacccatatacagcacacagtaataatcagattcatcatctgcctgggcccccgtgatggtgagggcagctttgttcccaaggatggagccagagaagcgatcagggaccccagaagagccgagtgtttgtgctgaaaatgaagtttgccgtggagcctgncctggggt

SEQ ID NO: 9140 - DNA, 644 bp, Homo sapiens
  misc_feature 4, 6, 8, 12, 13, 17, 35, 38, 39, 47, 49, 61, 83, 90, 108,218, 354, 357, 358, 421, 435, 445, 502, 505, 508, 524, 537,551, 557, 572, 616, 640: n = A,T,C or G
tttntntnaggnntcgncccacgtcgtccgccagnaannatatttgntncatgggtctagnatggggccacctatgacctcgnagggacncccccagtacctgctggnactcgaatagctggatcgaggagatgccctctgaacgcctgtgccggagcacccgccagcgggcagcctgtgcccagctcaacgacttcctccaggagtatggcactcangggtgccaggtgtgagggctgccctcccacctccgctgggaggaacctgaacctgggaaccatgaagctggaagcactgctgtgtccgctttcatgaacacagcctgggaccagggcatattaaaggcttttggcngcnnaaaaaaaaaaaaaaaaaaaaaaaaaaaaaaaaaaaaaaaaaaaaaaaaaaaaaaaaaaaaaanggggcggccgctanactagtctanaaaaaaaacctcccacacctccccctgaacctgaaacataaaatgaatgcaattgtngtngtnaacttgtttattgcancttataatggttncaaataaagcaatngcctcncaaatttcacaaatnaaagcctttttttcactgcattctaattgggggttggccaaacncatcaatggtttcttatcatgtcnggac

SEQ ID NO: 9141 - DNA, 647 bp, Homo sapiens
  misc_feature 2, 3, 9, 10, 11, 15, 573, 588, 629, 635: n = A,T,C or G
gnncggaannntgcnacgctccgcggacgcgtgggttcaagaggtacttgcattttagctccttaattccctggccagtgttagctgtttagtgccccctcacccatcccatttaggcacatcccaatagacagagccaggctgagttacagggggagagtgtcatctctggccccgattaagatggccttgtcacagtgaccgctgagtaggcatggatgagtgggatatttagctgaggaaccctttcccttttccttctttttggggtctcttcttacagtgaacttccaaaatgtcaaatctagggctgtttcccaaattacactattctaggcatcattttgattcccatgtcactccttaactcacttccttgagcactacatgtatgttgtcagccacgagacaggacttcctaaatagtgtgtgcaccagcctaactctgccttacccagaaaccaaccacctaagaggaaaactcagaagatattaatgaaaactaattgaaagtacgcacacttctcatgtaggaacaaaattaaaattttacatttttattttacaaaattnaaaaattacatttgnaggaacaaaatgtaaattttggaatccaaatcttttaaagnctgttnaagacagtgaac

SEQ ID NO: 9142 - DNA, 629 bp, Homo sapiens
  misc_feature 19, 22, 29, 30, 415, 498, 502, 545, 574, 593, 618, 620: n = A,T,C or G
gcaattaaccctcactaanggnaacaaannctgggtaccgggccccccctcgggtcgacggtatcgataagcttgatatcgaattcctgcagcccgggggatccactagttctagagcggccgcccgggcaggtacatttattgccagccttcctcgttgcaagcttccaccctgcagcaaatgcactatgctgactctcgcaccttcagctgtgccctctgacactctgctggccattgcctgagggactggggagttcaggtgaaatgtaatttcctcagtggatgagaatcatcaattgtcatgaaaaggcgatttcaccaaccctgagtcggtattgccaagggttctactccccaagtgggcttcccatcacaagggatctgaggtccaggtgggtgtggtgaggcccancctgtcatgtatgccttccttccccagtctcaaatgtgagagacggactctgctccgtggacatgagcagccccttgaagggnggtntcattctctaacagtaacagcactgccagaaacaccccctgantgccacacgatcatctcactttgggtcangccagcagggcctcacgancatttcttggacttgaattttcagngntattgaaat

SEQ ID NO: 9143 - DNA, 816 bp, Homo sapiens
  misc_feature 1, 3, 6, 13, 642, 666, 718, 753, 760, 782, 797, 801, 805: n = A,T,C or G
ngntcntggaacngggtacgactactatagggcgaattgggccctctagatgcatgctcgagcggccgccagtgtgatggatatctgcagaattcgccctttaaagaattctcagaacgatggagagctcccgcgtgaggctgctgcccctcctgggcgccgccctgctgctgatgctacctctgttgggtacccgtgcccaggaggacgccgagctccagccccgagccctggacatctactctgccgtggatgatgcctcccacgagaaggagctgatcgaagcgctgcaagaagtcttgaagaagctcaagagtaaacgtgttcccatctatgagaagaagtatggccaagtccccatgtgtgacgccggtgagcagtgtgcagtgaggaaaggggcaaggatcgggaagctgtgtgactgtccccgaggaacctcctgcaattccttcctcctgaagtgcttatgaaggggcgtccattctcctccatacatccccatccctctactttccccagaggaccacaccttcctccctggagtttggcttaagcaacagataaagtttttattttcctctgaagggaaagggctcttttcctgctgtttcaaaaataaaagaacacattagatgttactgngtgaagaataatgccttgtatggngttgatacctgtgtgaaggattcttattttatttggctgacaaaacttttgngtacctttgtgtaaagaaaggaaagctttgtttgnaaaatgnattttttgtattggggcatggncaaaatgtagtctanattntaangggggaattcc

SEQ ID NO: 9144 - DNA, 482 bp, Homo sapiens
  misc_feature 2, 3, 6: n = A,T,C or G
gnnagntccctatacgactacttagggcgaattggagctccaccgcggtggcggccgaggtactcagagtgaggattttctgcaacctgcgtttgtccctccagcatctgctctggctccatggcggaccctgcaagtcacagtccccggataccagtccgcgcccaagccgttcgttcttaagagccctgcaccgcgccaccagctcccagcacaaacagctccggccgctctagaactagtggatcccccgggctgcaggaattcgatatcaagcttatcgataccgtcgacctcgagggggggcccggtacccagcttttgttccctttagtgagggttaattgcgcgcttggcgtaatcatggtcatagctgtttcctgtgtgaaattgttatccgctcacaattccacacaacataccgagcccgggagcataaagtgtaaaagcctggggtgcctaatggagtgaagctaactcac

SEQ ID NO: 9145 - DNA, 583 bp, Homo sapiens
  misc_feature 6: n = A,T,C or G
ggagcngtccacgcgtccggccccttcaggcaggaagtgtcggcgccgccactgtccggccacagcctaacgctcttcgctgtcgtttgtggtctcgcgcagggcggccccggttctggtgtttggcgtcggaattaaacaaccaccatgtcgagcaaaaaggcaaagaccaagaccaccaagaagcgccctcagcgtgcaacatccaatgtgtttgccatgtttgaccagtcacagattcaggagttcaaagaggccttcaacatgattgatcagaacagagatggcttcatcgacaaggaagatttgcatgatatgcttgcttctctagggaagaatcccactgatgcataccttgatgccatgatgaatgaggccccagggcccatcaatttcaccatgttcctgaccatgtttggtgagaagttaaatggcacagatcctgaagatgtcatcagaaaccgcctttgcttgctttgatgaagaagcaacaggcaccattcaggaagattacctaagagagctgctgacaaccatgggggatcggtttacagatgagggaagtggatgagcttgtacagag

SEQ ID NO: 9146 - DNA, 798 bp, Homo sapiens
  misc_feature 2, 3, 4, 5, 6, 7, 8, 9, 640, 652, 655, 677, 722, 735, 749,752, 773, 781, 791, 792, 793, 798: n = A,T,C or G
gnnnnnnnncgcgtaatacgactactatagggcgaattggagctccaccgcggtggcggcccgtgcatagactagtcagcttctggggtgactagagcagggctgttgtctccacaagcttcagccgtgcgtggactggtcagcttccggagtgaccagagcagggctgttgtcatctcactggcaccttggttccatcgtaggatcagctgggttgcatggtctaggtcctgttggctggtccacttgtcctgggctgctggtttcagctgactggatggatggatccaaggcacaattcctgcaacatttctaggcttccagtgggtcctggcgtcttagctgtggatctcccaatacctgcaggtaacgaggccacagaagctgggcctctaggagcagaagacacagagcagtgaagactacaccagaagctccggctgccgccagagacaaaggccccgccccccgcgtacctcggccgctctagaactagtggatcccccgggctgcaggaattcgatatcaagcttatcgataccgtcgacctcgagggggggcccggtacccagcttttgttccctttagtgagggttaattgcgcccttggcgtaatcatggtcatagctggttcctgtgngaaattgttatncgnttacaatttcacacaacatacnaacccggggagcataaaatgtaaagccggggggcccttaatgagnggagcctaacttnaaaattaaattggnttngggtttacccccccccctttnccaaattnggaaaaaccnnnccccn

SEQ ID NO: 9147 - DNA, 373 bp, Homo sapiens
  misc_feature 7: n = A,T,C or G
gtatacnactactatagggcgaattggagctccaccgcggtggcggccgtcatccgcctgggactcatggaaatgattgcttttgccaggatcttctgcaaaggccaagtgtctacagccaccttcctagagagctgcggggtggccgacctgatcaccacctgttacggagggcggaaccgcagggtggccgaggccttcgccagaactgggaagaccattgaagagttggagaaggagatgctgaatgggcaaaagctccaaggaccgcagacttctgctgaagtgtacctcggccgctctagaactagtggatcccccgggctgcaggaattcgatatcaagcttatcgataccgtcgacctcgaggggg

SEQ ID NO: 9148 - DNA, 925 bp, Homo sapiens
  misc_feature 25, 270, 273, 310, 325, 568, 599, 635, 674, 709, 737, 759,790, 800, 802, 827, 828, 829, 845, 858, 875, 879, 887, 889,892, 898, 912: n = A,T,C or G
ggcgcgtatcgactactatagggcnaattggagctccccgcggtggcggccgaggtacgcggggattgcccctgtaacctgtcaaagaagagctaagggagctttcggggttggcttcttggaggctgctttctcctttacttggaaggcttcgctagtgatggacccatacatgattcagatgagcagcaaaggcaacctcccctcaattctggacgtgcatgtcaacgttggtgggagaagctctgtgccgggaaaaatgaaaggcanaanggccaggtggtctgtgaggccctcagacatggccaanaaaactttcaacccnatccgaaccattgtggacaacatgaaggtgaaaccaaatccaaacaaaaccatgatttccctgtccattggggaccctactgtgtttggaaacctgcctacagaccctgaagttacccaggcaatgaaagatgccctggactcgggcaaatataatggctatgccccatccatcggcttcctatccagtcgggaggaaattgcttcttattaccactgtcctgaggcacccctagaagctaangacgtcattctgacaagtggctgcagccaanctattgacctttgtttagctgtgttggccaacccanggcaaaacatcctggttccaaaacctgggttcttttctntacaaaactctggctgagtctattgggaaattganggcaaacttttacaatttggtgccaganaaattttgggaaattgacctgnaacaactggaatatcttattggatgaaaaanaaactttgtntnattggcaataatccatcaaaccccnnngggtagtggttaacanacttttttttcanaaaaattttgcagtggnttgncccggagngnggncccatnttacttatgaaatntttgggaaactgt

SEQ ID NO: 9149 - DNA, 469 bp, Homo sapiens
  misc_feature 2, 3, 4, 5, 6, 9, 10, 11, 12, 13, 14, 15, 18, 469: n = A,T,C or G
gnnnnnggnnnnnnngantgaatacgactactatagggcgaattgggccctctagatgcatgctcgagcggccgccagtgtgatggatatctgcagaattcgccctttcgagcggccgcccgggcaggtacaggagtccaattgtggtgaagatggtctggatcatattgctcctcaggggcccattgagtgcctggatcttggctgtgtagtgggtggatgggctcaggtctgccaggctgtaggaggtggtatctggacccacaatgacttccttgactgtgccatccactgattcatagaccagcaggtaaccggtgactgatgcccgggggggtcgccaggtaaggagggcagtttccgactgaacctcagtagcagtcaagtctcttggagaatcgaggtctgtttgtgaacttggcagtgaatggttgagctcttctggggccctttctctgcaaagattctn

SEQ ID NO: 9150 - DNA, 471 bp, Homo sapiens
  misc_feature 11, 104, 112: n = A,T,C or G
tgctttgggcnaatggggccctctagatgcatgctcgagcggccgccagtgtgatggatatctgcagaattcgccctttcgagcggccgcccgggcaggtaccnatgtctantgatgagtttgctaatacaatgccagtcaggccacctacggtgaaaagaaagatgaatcctagggctcagagcactgcagcagatcatttcatattgcttccgtggagtgtggcgagtcaagctaaatactttgacgccggtggggatagcgatgattatggtagccggaggtgaaatatgctcgtgtgtctacgtctattcctactgtaaatatgtggtgtgctcacacgataaaccctaaggaagcccaattgatatcatagctcagaccatacctatgtatccaaatggttctttttttccggagtagtaagttacaatatgggagattattccgaacctggtaggataagaatat

SEQ ID NO: 9151 - DNA, 867 bp, Homo sapiens
  misc_feature 2, 5, 6, 63, 77, 172, 179, 186, 204, 212, 218, 427, 450,507, 591, 596, 645, 657, 699, 713, 726, 730, 734, 748, 770,788, 809, 832, 833, 838, 843, 852: n = A,T,C or G
gntcnntgcccattcgtccggcagtgcaaatatccaagaaaaggaagtttgtcgtttatggcntcttcaaagctganctgaatgagtttcttactcggaagctggctgaagatggctactctggaagttgaggtgcgagttacaccaaccaggacagaaatcattatcttanccaccanaacacanaatgttcttggtgagaanggcccgcngattcnggaactgactgctgtagttcaaaagaggtttggctttccagaagggcaagtgtagagctttatgctgaaaaggtggccactagaggtctgtgtgccattgcccaagcagagtcttttgcgttacaaactcctaagaagggctttgcttgtgccgagggcctgctatggtgtgctgcggttcatcatggagagtggggccaaaggctgcnaggttgtggtgtctgggaaactnccaggacagagggctaaatcccatgaaagtttgtggatggcctgatgatccacaacnggagacccttgttaactactaccgttgacacttgctgtgcgccaccgtgttgctcaaacaggggtgtgcttgggcatcaaaggnggaanatcattcttgccttggaccccaactgggtaagaatggcccctaaaaaancccttgcctgancacctgagccatttgggggaccccaaagatgaagaaacttgncccccccccccatnttaaaacaaaaanggtngggnaagcccaaaacccncttgccatgccccaaaccagtnccccacaaggattaacanggtcttccttggcaactttantcttggaggcctggattgttgcnnttttnaaaancctttaatnaaaatttgtccaaat

SEQ ID NO: 9152 - DNA, 892 bp, Homo sapiens
  misc_feature 215, 226, 532, 550, 560, 591, 601, 618, 627, 643, 646, 647,651, 652, 659, 682, 687, 701, 703, 708, 712, 715, 717, 728,730, 736, 744, 747, 753, 756, 763, 766, 770, 771, 777, 780,786, 790, 798, 799, 803, 806, 810, 812, 813, 814, 815: n = A,T,C or G
  misc_feature 819, 827, 840, 841, 845, 846, 851, 855, 861, 865, 866, 867,872, 875: n = A,T,C or G
ttaattggagctccaccgcggtggcggccgcccgggcaggtaccaggtgaacaaagtttaccagaaagcagttgagacaagaaaataagagctcgggatgagggaaaagaaaaagattgagagaatttgtgcccccaaccatttcctcagactctaagaaagaacacgctctctccaggcaggtctgaagctcaactctcttattgcctcacttnaggtatacctnactttacacaatagaattataactggaaagaagttggggacacatgtatttggtgattacattttaaacacattaggaaaagttgctatttgaactttttattgatttttggggggagtaaagaattattttgtgatgcaaataaatatcctttaatttgatcgacttgccaaatttagatttgtgtgcatcaggctttcttttttttctttttttagagaaggttcaatataaagcttttcttttctttggttctttctttctttattttgagatggagtcttgctcttgtcgcccatgctggantgcagtggcccgatcctnggctcactgnaaccctccacctccttgggtcaagccgattnttttgccctnaaccctcccaagccagnttgggggantaccaggcggtggagnccnncctnnccccggntaattttttgggattttttaagnaaaanaacagggggttttnanccatngttnagncnaggcttgggtntntaaaanttcttganccntagggnganttttggnccncccnnggggtnttnttaaanaaancccgggcnngccnttnaaanannnngggntccccccngggtcgggggggnntttnnttttnaaancttttntgtnnnccccnccncccctgggggggggggg

SEQ ID NO: 9153 - DNA, 598 bp, Homo sapiens
  misc_feature 1: n = A,T,C or G
nagactgcttcaacctgtcatctgagtaccccagccaggcgcacgatgtcgtgtaagcagggtatccttgtgccagcatttgcttctctgtgaaaacacagcgccgtcaacattttgcactttccagggcccttcggaattggaagtgcctgtagctaagctgtttcccctggagagtccagctgtttcccctggagagtccagctgttctcctgatccggccctgcacacacacacccagccacaaattactaggatgtcaaacccaggtgatcaggatactctcacggactgccctgctcccccagggctctccctacagtgtaatcctaaagccaaacttcctttcagcagtggctgaagcaaactctgcagtcagaggtcatacccagcaggcttcaccatgcagacttgaatgttgatttgagggcctagctgctcagcacagggcatttgggaagacaatgtgtacccaaaaggacaggggcactcaaaagtggacaatgttagcaaaaacaatgaagaaaattttcttacaacccacctctttctttttaccaatttgacttctgcagtatttctggaagaataaaagcac

SEQ ID NO: 9154 - DNA, 386 bp, Homo sapiens
  misc_feature 386: n = A,T,C or G
cgcgtaataccgactcactatagggcgaattggagctccaccgcggtggcggccgcccgggcaggtacctgccgaccattgaaaatacctactgccagttgctgggctgcagccacggtgtgctttccctgcacatcaccgacagcaagagtggcgacggcaaccgcgctctgcagcgccacgttatagcccggggccacgccttcgtcctggtctactcagtcaccaagaaggaaaccctggaagagctgaaggccttctatgagctgatctgcaagatcaaaggtaacaacctgcataagttccccatcgtgctggtgggcaataaaagtgatgacacccaccgggaggtggccctgaatgatggtgccacctgtgcgatggan

SEQ ID NO: 9155 - DNA, 594 bp, Homo sapiens
  misc_feature 2, 4, 5, 146, 156, 162, 169, 176, 177, 179, 183, 213, 220,226, 227, 229, 233, 247, 255, 256, 259, 262, 263, 269, 270,273, 279, 281, 284, 292, 293, 294, 295, 296, 297, 300, 303,306, 315, 316, 320, 331, 336, 340, 343, 348, 350, 353: n = A,T,C or G
  misc_feature 357, 359, 361, 362, 363, 369, 370, 371, 373, 380, 384, 385,386, 388, 390, 410, 421, 423, 429, 430, 432, 437, 440, 443,448, 449, 452, 453, 457, 463, 465, 468, 472, 476, 482, 484,485, 488, 496, 497, 504, 508, 512, 514, 517, 520, 522: n = A,T,C or G
  misc_feature 523, 524, 528, 530, 535, 539, 540, 543, 551, 554, 558, 560,575, 578, 582, 586, 591, 592, 594: n = A,T,C or G
gnannttgggaggcccgcgtccgcgtcctcggagcaggcagagcagccgagccagccaagctctactccaggaagtgaaaatgtgctgcctcgagagccgctgattgccacggcagtgaagtttctacagaattcccgggtccgcnagagcccacnttgcanccagganagcattnntnaagnagaaagggctgacagatgaagaagattgantatggtnttccannangtcntggcatctgttgtnccaatgannacnttnngtcttnnggngaatcntntcnattcattnnnnnnctncantcnctatctaanntcantcaattctttnttatntcanttnaaatntnttncttncntnnncatttnnngntttttcnattnnnantngggtatcttaaacttcgganttttttgcctntntttatnngnatttntanccnaattnnctnntctnatttantntantctnttcntttttnanntangatatttnntatattnctcnctantnctnctnannntttntncttanttcnnttntattctcnttnttantntgttttttgcattgnttnccantggnctacnntn

SEQ ID NO: 9156 - DNA, 390 bp, Homo sapiens
  misc_feature 4, 270: n = A,T,C or G
ggcnattggagctccaccgcggtggcggccgcggtctcggtcactcgaataacccgacatggcgtcaatggttgcggttggcggggaacgaagtatatagaaaagcgtgcgacaagtcgctggaaatggcctcgatgacggcgaagccttgcgggggcggcagcggaggaaggacaccgatgacaccagccgaagctgcactactagagaccggtagaaatgaatgaggtccccgcgtacctgcccgggcggccgctctagaactagtgnatcccccgggctgcaggaattcgatatcaagcttatcgataccgtcgacctcgagggggggcccggtacccagctttttgttccctttagtgagggttaattgcgcgcttggcgtaatca

SEQ ID NO: 9157 - DNA, 623 bp, Homo sapiens
  misc_feature 15, 16, 17, 27: n = A,T,C or G
cgggccccccctcgnnntacttctagnaattaattaacgcggggtggcggcgacgacccattcgaacgtctgccctatcaactttcgatggtagtcgccgtgcctaccattgaccacgggtgacggggaatcagggttcgattccggagagggagcctgagaaacggctaccacatccaaggaaggcagcaggcgcgcaaattacccactcccgacccggggaggtagtgacgaaaaaaaaaaaaaaaagcggccgccaccgcggtggagctccaattcgccctatagtgagtcgtattacgcgcgctcactggccgtcgttttacaacgtcgtgactgggaaaaccctggcgttacccaacttaatcgccttgcagcacatccccctttcgccagctggcgtaatagcgaagaggcccgcaccgatcgcccttcccaacagttgcgcagcctgaatggcgaatggaaattgtaagcgttaatattttgttaaaattcgcgttaaatttttgttaaatcagctcattttttaaccaataggccgaaatcggcaaaatcccttataaatcaaaagaatagaccgagatagggttgagtgttgttccagtttggaacaagagtcc

SEQ ID NO: 9158 - DNA, 609 bp, Homo sapiens
  misc_feature 15, 16, 17, 27, 44, 489, 497, 558, 571, 579, 594, 605, 607,609: n = A,T,C or G
cgggccccccctcgnnntacttctagnaattaattaacgcgggnggattgcttggatctgggaggtcgaggctgcagtgaactgtgattgtgccagtgcactccagcctgggcaacagagcaagaccctgtctcaaaaaacaaaacaaaacaaaacaaaaactgatgcttctgaaggctgtgccagagaagtatgtttgtgtgtttatctgaattaaaaccaagacatgttctgacggaagttaagtctgatttggctaattaaattaagaacagactttgccagtttatatgacaggactttttctataaatttaatcagctaaatctatagtcccagggctttcataaaaatatctttgagccaagcatagtggctcaaggctgtaagcccaacactttgggaggctgaggcgggggaatcacttaaacccaggagttcgagaccagcctgggccacataacgagacaccgtctacaaattattttnattagctnggagtgatagtgaatgcctgtgaaggaagctgaggctggaggatcacttgagcccagaggngggccgggttgcnccactgcncttcacttggatganaaatgagaacntntn

SEQ ID NO: 9159 - DNA, 810 bp, Homo sapiens
  misc_feature 675, 693, 735, 736, 770, 782, 785: n = A,T,C or G
gaattggagctccaccgcggtggcggccgaggtacgcggggcaaggacaagaggaagagcaggaagagaagcagagaggagagccgcagtcgcagccgcagccgcagcaagagtgagaggagcagaaagcgaggcagcaagcgagacagcaaggcgggcagcagcaagaagaagaagaaggaagacactgaccgctcccagtccagatctccatcccgctccgtgtcaaaggagcgggaacatgccaagtctgaatccagccagagggaaggtcgaggagagagtgagaatactggcaccaatcaggagacccggtccaggtcgagatccaattccaaatcgaaaccaaaccttccatcagaatcacgctccagatcaaagtcagcttcaaaaacccgatctcggtccaagtctagatccaggtctgcttccagatcgccctcccgatctagatctaggtcccactcaaggtcctaactggctatggccacagctggaactacccgagaagtcttttgtacctgcccgggcggccgctctagaactagtggatcccccgggctgcaggaattcgatatcaaagcttatcgataccgtcgacctcgagggggggcccggtacccagcttttgttccctttagtgagggttaattgcgcgcttggcgtaatcatggncatagcttgttttcctgngtgaaattgttatccggttcacaatttccacacaacataccnncccgggggccttaaagtgtaaaaagcctgggggnggcttaatgagnggngctacctcaattaaattggggttgg

SEQ ID NO: 9160 - DNA, 459 bp, Homo sapiens
actactatagggcgaattggagctccccgcggtggcggccggcgggaggctgacgagagccgggaggcgttagcgaaggaagagaaaaaccgaagacgaagccactacagcgtcgcagcgcggcgcggcgtctgctttataggagagggcgcaggcccccgcgtacctcggccgctctagaactagtggatcccccgggctgcaggaattcgatatcaagcttatcgataccgtcgacctcgagggggggcccggtacccagcttttgttccctttagtgagggttaattgcgcgcttggcgtaatcatggtcatagctgtttcctgtgtgaaattgttatccgctcacaattccacacaacatacgagccgggagcataaaagtgtaaagcctggggtgcctaatgagtgagctaactcacattaattgcgttgccgctcacttgcccgctttccagt

SEQ ID NO: 9161 - DNA, 837 bp, Homo sapiens
  misc_feature 551, 564, 567, 575, 603, 608, 622, 634, 637, 652, 670, 675,691, 692, 722, 735, 744, 755, 761, 767, 774, 783, 788, 804,809, 810, 821, 830, 831, 834, 835: n = A,T,C or G
tccaccgcggtggcggccggcgggaggctgactagagccgggaggcgttagcgaaggaagagaaaaaccgaagacgaagccactacagcgtcgcagcgcggcgcggcgtctgctttataggagagggcgcaggcccccgcgtacctcggccgctctagaactagtggatcccccgggctgcaggaattcgatatcaagcttatcgataccgtcgacctcgagggggggcccggtacccagcttttgttccctttagtgagggttaattgcgcgcttggcgtaatcatggtcatagctgtttcctgtgtgaaattgttatccgctcacaattccacacaacatacgagccgggaagcataaagtgtaaagcctggggtgcctaatgagtgagctaactcacattaattgcgttgcgctcactgcccgctttccagtcgggaaacctgtcgtgccagcttgcattaatgaatcgccaacgccccggggagaggcggttttgcgtattgggcgctcttccgctttctcgctcactgactcgcttgcgctcggtncgttcggcttgcngcngagccggnatcagctcacttcaaaggcggtaatacngtttntccacaaaaatcangggggataaccncanggaaagaaaccattntgagccaaaaaggcccanccaanaaggcccaggaacccnnaaaaagggccccgttgctgggcgttttttncataaggctcccncccccctgncaagcattaanaaaaanttgacnctcaagncaagagggnggggnaaaccccacagggctntaaannataccaggcgnttccccccnncannct

SEQ ID NO: 9162 - DNA, 810 bp, Homo sapiens
  misc_feature 4, 9, 11, 545, 646, 655, 675, 682, 692, 699, 721, 727, 743,747, 774, 781, 785, 790, 803: n = A,T,C or G
tatntggcnantggggccctctagatgcatgctcgagcggccgccagtgtgatggatatctgcagaattcggctttgagcggccgcccgggcaggtacgctttactaatctaaattgggtaacagaactggagaaaaggaagactacacagacttatcataagctgttagtgaacgtgatagaaatgcgtaatttgttaaagtgaattacagctctgatttgtcaaatgaggaggtgagttatcctaggatttgctatgctgttgtggcgttagaagattggatctttagcagcaaaggtaacctcaacaatattttctgcttaagaaagtgccttggttaaggtagaccgtgatatcgtctttgactaagctctctgggctattgattctgtcatattccaaaggcagtattggtttgaagccgaatctcacggtcaatgtcaacatgcaatccacaaagaccctggcgcccttccacggtatgcactaaccaaaactttctcactgtgaaatccttttttttaaaaaccaaaaaaacaaaaanacaaaaaccaaaaaacccttactgtgaatcctttcccaaggaatgggcccaccttccctcggaaaagagcgtggcttgctctgttagcaggtccccctgangagacccgntggtgccaagaacccctgcnttgccanaacacaccangggggtnttcccacattcttacctggganttcagnatttcggccaaaaccntttnaaagccaacttgcttggaccactttcnaaatacncacntcccntgttttaacaacncccctgg

SEQ ID NO: 9163 - DNA, 673 bp, Homo sapiens
  misc_feature 5, 7: n = A,T,C or G
gagcncngcgtaatacgactcactatagggcgaattggagctccaccgcggtggcggccgcccgggcaggtacgcggggctcctcagcttcaggcaccaccactgacctgggacagtgaatcgacaatgccgtcttctgtctcgtggggcatcctcctgctggcaggcctgtgctgcctggtccctgtctccctggctgaggatccccagggagatgctgcccagaagacagatacatcccaccatgatcaggatcacccaaccttcaacaagatcacccccaacctggctgagttcgccttcagcctataccgccagctggcacaccagtccaacagcaccaatatcttcttctccccagtgagcatcgctacagcctttgcaatgctctccctggggaccaaggctgacactcacgatgaaatcctggagggcctgaatttcaacctcacggagattccggaggctcagatccatgaaggcttccaggaactcctccataccctcaaccagccagacagccagctccagctgaccaccggcaatggcctgttcctcagcgagggcctgaagctagtggataagtttttggaggatgttaaaaagttgtacctcggccgctctagaactagtggatcccccgggctgcaggaattcgatatcaagcttatcg

SEQ ID NO: 9164 - DNA, 835 bp, Homo sapiens
  misc_feature 528, 541, 596, 600, 604, 606, 622, 633, 647, 665, 667, 705,715, 745, 747, 748, 769, 774, 776, 778, 783, 798, 801, 810,814: n = A,T,C or G
ggagctccaccgcggtggcggccgaggtacgcggggggtggggcctttgtctctggcggcagccggagcttctggtgtagtcttcactgctctgtgtcttctgctcctagaggcccagcttctgtggcctcgttacctgcaggtattgggagatccacagctaagacgccaggacccactggaagcctagaaatgttgcaggaattgtgccttggatccatccatccagtcagctgaaaccagcagcccaggacaagtgggccagccaacaggacctagaccatgcaacccagctgatcctacgatggaaccaaggtgccagtgagatgacaacagccctgctctggtcactccggaagctgaccagtccacgcacggctgaagcttgaggagacaacagccctgctctagtcaccccagaagctgactagtctatgcacggccgctctagaactagtggatcccccgggctgcaggaattcgatatcaagcttatcgataccgtcgaccttcgagggggggcccggnacccagcttttgnttccctttagtgagggttaattgcgcgcttggcggtaatcatgggcataagctgntttnctgngngaaattggtattccgntcacaattccncacaacataccaanccgggagccattaaagtntnaaaccttgggggtgccttatgaggggagcttaacttcncattaaattnggtttgcgcctcacttggccccgcttttcnanncgggaaaacctgtcggtgccnagctngnanttaantgaaattcggccaanccncccgggganaagncgggttgctttttggggcgct

SEQ ID NO: 9165 - DNA, 685 bp, Homo sapiens
  misc_feature 3, 71, 476, 532, 623, 680, 684: n = A,T,C or G
agntttacgccaatcgactcactatagggcgaattggagctccaccgcggtggcggccgcccgggcaggtncagggtcccaaaatgcgctgactcagcttcaccagcccatctcggatctaaaagacacccacaagaaacatgttgtttagcttttcttaagcatctctgtcttagagtttcttgttctgacctttctatcaggtttttaatcttggaaagtgatggtgtctagtggcattcttagatcagaccctctgggttcgtagcccagctctgccacacacatgctgcttgactgacaaggagaaagaaaagaaaaaagcctcccttgtccccactgtgctcatgaaataaatatataccctaaattacacatactctttcaccatattatcacctcattgccaaaaatgtctcttcggtcatgaatgaggatccagcccaacctccaaccaggaaccagccagcgcttgnccagccctccacaggacaggatggggacatcggtgcttgagggtggccagtggttnatatttgcaatccgaaaacacctgagaagaggcacttgttatggttgttttcttgtctacttttcactgcaatcccagatcccgtggcttnccacccatttttccttctatcactagggacaggtcccttggattaatggggatcatncctnt

SEQ ID NO: 9166 - DNA, 778 bp, Homo sapiens
  misc_feature 2, 4, 11, 14, 15, 25, 27, 41, 47, 53, 63, 66, 70, 77, 84,90, 435, 463, 526, 531, 547, 554, 556, 562, 605, 615, 619,628, 633, 636, 640, 650, 658, 668, 688, 700, 725, 732, 752,753, 754, 755, 756, 757, 758, 759, 760, 761, 762, 763: n = A,T,C or G
  misc_feature 764, 765, 766, 767, 768, 769, 770, 771, 772, 773, 774, 775,776, 777: n = A,T,C or G
gncnatatctnatnnctggagctcntntacatgcatgctcnagcggncggcantgcgatgganatntgcngaattcncccttancgtggncgcggccgacgtaccctcagtctttcaacgttagtcaaacgttacattttctttcactcttacccttttttgagcttcatttcctctctttatgttctcgagtatagcttcgaggtgtagggtattcattcccaagatccacaacaattacctccctagaaaatgtcactccttttaaaggtcttttttggctttcaacaactgaaggagttctagtgacagatgtgtgtattttctgcaaaccatcatcctcttcttgaccagtttctccagcattctcaaggctcttgcttctcatttatttggttctcctcttctgcctccatgtcccttctggtttctaangggtgtggccaacacttccttactctgnctctggacaagaatgccaggcctcatcggcacattcaagttcatgacttgcattaagatccanccttnccccacgagtcttggnatccggncncagcanggattttaagactctcggacgacgtcaaacatggtcctcggantctcccccgngtancctggcccnggggnggnccgntcaaagggcnaattccancacactggcnggccgggtactaagtggatnccgaacctcggnaccccaagcctgggcgtaaatcatngggccantagcctttttttcccggggnnnnnnnnnnnnnnnnnnnnnnnnnng

SEQ ID NO: 9167 - DNA, 1027 bp, Homo sapiens
  misc_feature 9, 10, 13, 16, 19, 21, 25, 33, 34, 42, 46, 47, 49, 56, 57,61, 68, 72, 73, 75, 79, 83, 84, 85, 86, 87, 89, 90, 91,92, 94, 97, 98, 101, 109, 113, 144, 146, 213, 240, 241,245, 257, 276, 293, 316, 322, 329, 346, 406, 423, 424, 431: n = A,T,C or G
  misc_feature 435, 442, 469, 482, 484, 496, 497, 518, 524, 528, 543, 548,549, 561, 576, 579, 582, 583, 585, 596, 598, 601, 627, 634,635, 636, 641, 644, 648, 650, 654, 665, 666, 669, 682, 684,686, 691, 705, 713, 729, 730, 736, 746, 763, 774, 783: n = A,T,C or G
  misc_feature 785, 792, 794, 804, 813, 817, 826, 829, 832, 835, 858, 859,860, 871, 876, 879, 880, 884, 887, 888, 898, 899, 901, 909,913, 920, 921, 922, 923, 929, 932, 933, 936, 948, 950, 956,959, 961, 966, 970, 977, 981, 983, 993, 995, 999, 1001: n = A,T,C or G
  misc_feature 1004, 1006, 1007, 1008, 1011, 1014, 1016, 1025, 1026: n = A,T,C or G
tatatcgtnntanganacnancttnttttcatnntatatcanaatnncnttatatnntatntatggcntttnncnattnttgnnnnngnnnngnggnncgntcatatanggcnattgtgccctctagatgcatgctcgagcggncnccagtgtgatggatatctgcagaattcgcccttagcgtggtcgcggcccgaggtacagatgtccagnagacctactggatatgcaggcctgcanntcangggagagctggnttaataaccgtcaaggcantaatcatttgcatttanatggcgagttgaagccatgacangggctnaaatggnccagcaaagaataaatnaaaccatgagaaacacatacatttaagaataaggagatgtggtcaggcccggtggctcanaccttgtaatcccaacnnttttggnaggnctgaggncgggagggaacacttgtggacaaatantttgagaccagcntngggccaacctanngaaatacccgttttctgcgtnaaaatncagnaaccttagcctgggntgatnnttgggtgcattnccctaataagtcccnaanttnntnggggaggcttnanggnacaatgaattcgctttgaaccccggnaaggtgnnnagttntantttnangccngagaattacanncanccgctacttttangncntgggncaactatgaataanacaccctntgttttaaatataaanntatatntttacggganattttccatggggcctntcgtggggagnggggaaaantnggcgaancncttcttttantcgaaatgngatnaaatacgtnagntanggnacccgcaaaaaaaatttatttgnnnattagaagtgntggtnatnngganttnnaacactgttnngngttctttnattnccccatnnnnagaaanaannatntcctttttcaananattatnttncntttanaaanttccttnatgncnttataccatnanaaancnaantnnnttntcntntgggaaatnnt

SEQ ID NO: 9168 - DNA, 937 bp, Homo sapiens
  misc_feature 561, 597, 600, 632, 635, 641, 669, 680, 684, 685, 689, 690,698, 702, 715, 717, 720, 736, 738, 745, 750, 752, 757, 759,760, 761, 764, 774, 780, 781, 782, 783, 784, 786, 791, 808,809, 810, 814, 815, 819, 823, 825, 828, 831, 838, 841: n = A,T,C or G
  misc_feature 843, 847, 856, 867, 868, 877, 883, 886, 889, 890, 891, 892,897, 899, 903, 904, 905, 910, 914, 915, 916, 924, 925, 926,927, 930, 934, 935, 936: n = A,T,C or G
tttggcgaattggagctccaccgcggtggcggccgcccgggcaggtacgcggggtccacttctctgggacacattgccttctgttttctccagcatgcgcttgctccagctcctgttcagggccagccctgccaccctgctcctggttctctgcctgcagttgggggccaacaaagctcaggacaacacgtgagccatgcccttctcctccccacaaaaaaaattgcagggagggctcctctcccagtctggaaattacatatctctttctgagaatttctttcaacttcccagaactctagtcccaggagctcccatggatctcctgccaggttccacttcttgtcctcttaggaagccccaccaactcctctcacatttttgctgggtgtttctgcattgccagtggaaataaagctccaaatgtaccttcggcccgctctagaactagtgggatccccccgggctgcagggaattcgatattcaaagctttatcgataccgtcgaccctcgaggggggggcccccggtacccaagctttttgttccctttaagttgangggttaaatttgcgcccctttgggcggaaatcattnggncaatagctgttttccctggtgggaaaaattgnttntcccgnttcacaaatttccacaacaaacattacnaaacccgggangcannaaanntgtaaaanaccnggggggtggcctnantgnggtggggccaaccccncnaattaanttggngnttggngnnncanctggcccccnttttcnnnnntnggggnaaaactgggcgttgccnnnattnnattnaatntnaanacnccccccnccngngggnggggggggnggtttgggttnntggggaccncctttnctnatnnnntgaananattnnnaaagntgannntcatggannnnaanggtnnng

SEQ ID NO: 9169 - DNA, 679 bp, Homo sapiens
  misc_feature 2, 4, 5, 11, 13, 14, 27, 34, 93, 95, 96, 112, 118, 120, 131,132, 136, 142, 146, 147, 152, 153, 155, 161, 165, 168, 172,177, 178, 188, 194, 195, 196, 199, 203, 208, 209, 210, 214,215, 221, 224, 225, 226, 228, 229, 230, 233, 237: n = A,T,C or G
  misc_feature 238, 241, 245, 252, 253, 265, 275, 279, 280, 286, 287, 295,297, 303, 304, 305, 306, 310, 311, 314, 315, 322, 323, 326,333, 334, 342, 348, 352, 354, 355, 356, 357, 358, 359, 360,361, 362, 363, 364, 365, 366, 367, 368, 369, 370, 371: n = A,T,C or G
  misc_feature 372, 373, 374, 375, 376, 377, 378, 379, 380, 381, 382, 383,384, 385, 386, 387, 388, 389, 390, 391, 392, 393, 394, 395,396, 397, 398, 399, 400, 401, 402, 403, 404, 405, 406, 407,408, 409, 410, 411, 412, 413, 414, 415, 416, 417, 418: n = A,T,C or G
  misc_feature 419, 420, 421, 422, 423, 424, 425, 426, 427, 428, 429, 430,431, 432, 433, 434, 435, 436, 437, 438, 439, 440, 441, 442,443, 444, 445, 446, 447, 448, 449, 450, 451, 452, 453, 454,455, 456, 457, 458, 459, 460, 461, 462, 463, 464, 465: n = A,T,C or G
  misc_feature 466, 467, 468, 469, 470, 471, 472, 473, 474, 475, 476, 477,478, 479, 480, 481, 482, 483, 484, 485, 486, 487, 488, 489,490, 491, 492, 493, 494, 495, 496, 497, 498, 499, 500, 501,502, 503, 504, 505, 506, 507, 508, 509, 510, 511, 512: n = A,T,C or G
  misc_feature 513, 514, 515, 516, 517, 518, 519, 520, 521, 522, 523, 524,525, 526, 527, 528, 529, 530, 531, 532, 533, 534, 535, 536,537, 538, 539, 540, 541, 542, 543, 544, 545, 546, 547, 548,549, 550, 551, 552, 553, 554, 555, 556, 557, 558, 559-679: n = A,T,C or G
gnanncgcgtncnngtactcactctgntggcctnattggaaactccaccgcggtggcggccgaggtacttttttttttttttttttttttttngnnttgaaaaaaaaaaaantttttngnaaaattttttnntttnggcccntttnnccccnncnaaaaantttnccntttnggggnnaaaaaaaaancccccnnnccntttnaaaannngggnncccccnggnnngnnnaantttnnttnaaanttttttnncccccccccccngggggggggncccnncccccnntttttttncnttttannnngggnnaannccccccnnggnaaaaaannggaaaaantttttncccngnnnnnnnnnnnnnnnnnnnnnnnnnnnnnnnnnnnnnnnnnnnnnnnnnnnnnnnnnnnnnnnnnnnnnnnnnnnnnnnnnnnnnnnnnnnnnnnnnnnnnnnnnnnnnnnnnnnnnnnnnnnnnnnnnnnnnnnnnnnnnnnnnnnnnnnnnnnnnnnnnnnnnnnnnnnnnnnnnnnnnnnnnnnnnnnnnnnnnnnnnnnnnnnnnnnnnnnnnnnnnnnnnnnnnnnnnnnnnnnnnnnnnnnnnnnnnnnnnnnnnnnnnnnnnnnnnnnnnnnnnnnnnnnnnnnnnnnnnnnnnnnnnnnnnnnnnnnnnnnnnnnnnn

SEQ ID NO: 9170 - DNA, 845 bp, Homo sapiens
  misc_feature 1, 2, 3, 6, 7, 8, 656, 769, 782, 805, 809, 833: n = A,T,C or G
nnnagnnnggccgcgtaatacgactcactatagggcgaattggagctccaccgcggtggcggccgcccgggcaggtacaagtgagaaagactagagagaaagattttagtctgtttagcagaagccattttatctgcgtgcacatggatcaatatttctgatcccctataccccaggaagggcaaaatcccaaagaaatgtgttagcaaaattggctgatgctatcatattgctatggacattgatcttgtgttgcaattttttaataagtaaaaattatgatttttacttgatcttagagatcatgaacctataagttatgatgaatcttgcttggaggacacattggagaaagacctattgagggatggtgaactcgcatatgtatctcttgctgctgcgacaggcctcatcactccacttgccctgagctgattgggagaacaggacacagttttctcgcttgccaccgttaggctgtgcacggtcccagttgaggaaggagatagcgattccgttgacgtcaacaaacttgccttccgtgaccatgtcattgatgcccagccaaaagtcattgacacctggcaggctccttttaccatagtcttggagggcgttgatttcgtcggagttcctggggataaccaggattcctnctttggaaatgccagtcttcattggcctcatggaaatgctttcaaaccttcttgaagcaaggtagcatttcttggggaactttaatgccctcgggagacagactgtcttgcanggctttgaatttncttcaaggcatttgacttttgtncaanagcttttcaattttaagtcttcanatctccatcctt

SEQ ID NO: 9171 - DNA, 920 bp, Homo sapiens
  misc_feature 548, 554, 560, 568, 569, 595, 597, 658, 660, 665, 684, 696,703, 719, 722, 752, 763, 779, 780, 791, 803, 826, 827, 829,830, 836, 863, 864, 869, 883, 885, 891, 893, 896, 898, 908,912, 914, 917, 919: n = A,T,C or G
gtaatacgactcactatagggcgaattggagctccaccgcggtggcggccgaggtaccaggtgaacaaagtttaccagaaagcagttgagacaagaaaataagagctcaggatgagggaaaagaaaaagattgagagaatttgtgcccccaaccatttcctcagactctaagaaagaacacgctctctccaggcaggtctgaagctcaactctcttattgcctcacttcaggtatacctcactttacacaatagaattataactggaaagaagttggggacacatgtatttggtgattacattttaaacacattaggaaaagttgctatttgaactttttattgatttttggggggagtaaagaattattttgtgatgcaaataaatatcctttaatttgatcgacttgccaaatttagatttgtgtgcatcaggctttcttttttttctttttttagaggaagttcaatataagcttttcttttctttgtttctttctttctttatttttggagatgggagtcttgctctgtcgcccatgctgggantgcaantggcgncgaatctnngctcaacttggaaaccttcacccttntngggtttaaagccgaattcttctttgccttcaaaacctccccaagccaggttgggggacttncnagggngttggagccccacccatgncccggcctaaanttttttngtatttttttaggaanaanaaccagggggtttcaaccattgtttagccnagggcttgttnttaaaaacttccttgnncctttaaggcnaatctggccccngccttggggtccttcctaaaaannannccttgncccgggccgggccgttttttaaaactnngtggngattccccccggcntntcaggnanttncnattttaaagncttntncgntnc

SEQ ID NO: 9172 - DNA, 486 bp, Homo sapiens
  misc_feature 2, 3, 4, 5, 15, 19, 42, 105, 106: n = A,T,C or G
gnnnnattttgtttnaatnttactactatagggcgaattgtnccctctagatgcatgctcgagcggccgccagtgtgatggatatctgcataattcggcttagcnnccgcccgggcaggtacaattacccaccactggatttgactcagagaggacccccagagggtgtctccatcttccctatttattttcagcccttgagggcttcattgtagatcaaagccaaggcccccaggaaggtgacatactcctggaagttcacctcctggtccttgttccggtccaagtcttccatcagccttgcaatttcagcatcctgcagcttcgagccaatggtgagctccttctggatcagctccttcagctccttcttgctcagggtgtgcttgtcaccctccctgccggagtacttgtggaagatggccacgaggaggccaaatgggcctgatccagggggcatgccatggcttgaggggctgggcttgg

SEQ ID NO: 9173 - DNA, 884 bp, Homo sapiens
  misc_feature 2, 3, 415, 628, 668, 710, 717, 732, 736, 738, 745, 748, 758,763, 776, 790, 793, 797, 798, 800, 801, 804, 809, 820, 827,829, 831, 832, 839, 840, 842, 848, 852, 862, 876, 882: n = A,T,C or G
gnnggccgcgtaatcgactcactatagggcgaattggagctccaccgcggtggcggcccgaggtacgcggggaagatgtagctgtgtagtctccttccatagctgctctaagggggctggcaacatggctcagcaggcttgccccagagccatggcaaagaatggacttgtaatttgcatcctggtgatcaccttactcctggaccagaccaccagccacacatccagattaaaagccaggaagcacagcaaacgtcgagtgagagacaaggatggagatctgaagactcaaattgaaaagctctggacagaagtcaatgccttgaaggaaattcaagccctgcagacagtctgtctccgaggcactaaagttcacaagaaatgctaccttgcttcagaaggtttgaagcatttncatgaggccaatgaagactgcatttccaaaggaggaatcctggttatccccaggaactccgacgaaatcaacgccctccaagactatggtaaaaggagcctgccaggtgtcaatgacttttggctgggcatcaatgacatggtcacggaaggcaaagtttgtttgacgtcaacggaatcgctatcttctttctcaactgggaccgtgcccagnctaaccggtggcaagcgagaaaactgtgttctggttcttnccaatcagcttaaggcaaggtggagtgatgaaggccttttcncaccaancaagagaaacccttntgcncnggttcanccntcctttaaanagggntttttttccaagnggtgccccccagcnggnattnntnntanacctnttagggggtcntgggctntntnnaaaacgnngnaaaatntttntttttttttntttttttaaaaaantgtcanct

SEQ ID NO: 9174 - DNA, 696 bp, Homo sapiens
  misc_feature 542, 604, 606, 627, 632, 652, 654, 677, 694, 696: n = A,T,C or G
ggagctccaccgcggtggcggccgcccgggcaggtacgcgggattgcccctgtaacctgtcaaagaagagctaagggagctttcggggttggcttcttggaggctgctttctcctttacttggaaggcttcgctagtgatggacccatacatgattcagatgagcagcaaaggcaacctcccctcaattctggacgtgcatgtcaacgttggtgggagaagctctgtgccgggaaaaatgaaaggcagaaaggccaggtggtctgtgaggccctcagacatggccaagaaaactttcaaccccatccgagccattgtggacaacatgaaggtgaaaccaaatccaaacaaaaccatgatttccctgtccattggggaccctactgtgtttggaaacctgcctacagaccctgaagttcccaggcaatgaaagatgccctggactcgggcaaatataatggctatgccccatccatcggcttcctatccagtcgggaggagattgcttcttattaccactgtcctgaggccccctagaagctnaggacgttcattctgaccaagtggcttgcagccaaactattgacctttgtttagctgtgttngncaacccagggcaaaaacattncttgnttccaagacctgggtttctntntttacaaagaactttggcttgantcttttgggaaatttgngn

SEQ ID NO: 9175 - DNA, 623 bp, Homo sapiens
  misc_feature 2, 11, 24, 26, 48, 153, 421, 543: n = A,T,C or G
gnactcactanagggcgaattggnanctccaccgcggtggcggccgangtacatatatatgtatgcatgtaaatgagctcttattagctgtgttcattaaaggttttctccatcctgtgatctgcttttagattttggaacacatttcattgngcacattccatttgtattattaatatgacaacatttattactattattattatcatcatcaattcaatcacatctactatatccctgataatgaccatgatccttttaataatcacaaaactctcttcccttcatcacggggtaaataacctaccacaatgctgtaagtctccatcagcaccccaggctgcccctgctcacttaccagatctgctactttagccagatcaatcatcatgttaatgtcacacccacattcaataatggngagtctgcgctttttacctgacacgatcgtcacagggcctctgatctcggtgaacttctgccaggtgaagttccgaatgaggcattatatcaaagtgctctttccaactttggaggccccgncaccactaccgctattggtggcggctctagtggagttccatcaaccactggaatatgatgcttttgtgtcttcaaatcca

SEQ ID NO: 9176 - DNA, 862 bp, Homo sapiens
  misc_feature 1, 2, 4, 467, 502, 506, 509, 514, 518, 524, 531, 535, 538,545, 550, 554, 571, 572, 577, 578, 597, 606, 607, 612, 619,630, 632, 633, 634, 643, 649, 650, 651, 653, 661, 669, 671,675, 677, 680, 686, 690, 693, 694, 695, 696, 712, 718: n = A,T,C or G
  misc_feature 724, 726, 730, 735, 737, 740, 758, 761, 766, 779, 787, 788,794, 796, 798, 799, 801, 813, 825, 828, 839, 861: n = A,T,C or G
nncnactcactatagggcgaattggagctccaccgcggtggcggccgaggtacgcggggaagatgtagctgtgtagtctccttccatagctgctctaagggggctggcaacatggctcagcaggcttgccccagagccatggcaaagaatggacttgtaatttgcatcctggtgatcaccttactcctggaccagaccaccagccacacatccagattaaaagccaggaagcacagcaaacgtcgagtgagagacaaggatggagatctgaagactcaaattgaaaagctctggacagaagtcaatgccttgaaggaaattcaagccctgcagacagtctgtctccgaggcactaaagttcacaagaaatgctaccttgcttcagaaggtttgaagcatttccatgaggccaatgaagactgcatttccaaaggaggaatcctggctatccccaggaaactccgacnaaaatcaacgccctccaagactatggtaaaaggancctnccnggtgnaaangacttnggggggngccnaantcacgtngcccnaggnggcatttttgtttgacnncaacnnaatcttttttcttcttccncagggggcnnccccnccctttnttggggggggngnnnaaaaaaaantggggnnntnttttcccnccccaatntnattngnaanaggggntgtnttnnnngccccccccccccccnccccanaaaaanantttnttcgngngtnccccccccccaaaaaggnggnttttncccaaaggggggngccccccnncccggnancnntntttacctttttngggggccctggnccnctttaaaaccnagttaaaaatatttattttttnt

SEQ ID NO: 9177 - DNA, 579 bp, Homo sapiens
  misc_feature 2, 16, 479, 543, 576: n = A,T,C or G
gngcattagggagtcnccccgcgtccggccccttctttcttgccccagtctccagttctccagtgttcacaggtgagcctaccaacagccactgctcatgatggaggccatcaagaaaaagatgcagatgctgaagttagacaaggagaatgctctggatcgggcagagcaagctgaagctgagcagacgcaggcagaagaaagaagtaaacagctggaggatgagctggcagccatgcagaagaagctgaaagggacagaggatgagctggacaagtattctgaagctttgaaggatgcccaggagaagctggaactggcagagaagaaggctgctgatgctgaggcttgaggtggcctccttgaaccgtaggatccagctggttgaagaagagctggaccgtgctcaggagcgcctggccactgccctgcaaaagctggaagaagctgaaaaagctgctgtggagaagtgagaagangtttgaaaggttattggaaaccgggccttaaaagatgaagaaaaagatgggactccaggaaatncaactcaaagaagctaagcacattgcagaagangct

SEQ ID NO: 9178 - DNA, 625 bp, Homo sapiens
  misc_feature 2, 3, 4, 5, 6, 7, 8, 9, 18, 19, 20, 21, 24, 625: n = A,T,C or G
gnnnnnnnntgaggtttnnnnacntatatacggcgcttgggccctctagatgcatgctcgagcggccgccagtgtgatggatatctgcagaatttcgagcggccgcccgggcaggtgagactgtgaagaaggaagaacgttgcttgggcaaaaggagcatattctcaggagacggggcccctgcctgccacaccaagcattaggccaccaggaagacccccatctgcaagcaagcctagccttccagggagaaagaggcccctgcagctccttcatcatgaactggcacatgatcatctctgggcttattgtggtagtgcttaaagttgttggaatgaccttatttctactttatttctgccccaaagactgggaattttatcaagcaagatgttttttcttatccacttctgaatcatcttggaatgaaagcagggacttttgcaaaggaaaaggatccacattggcaattgtcaacacgccagagaaactgaagtttcttcaggacataactgatgctgagaagtattttattggcttaatttaccatcgtgaagagaaaaggtggcgttggatcaacactctgtgttcaatggcaatgttaccaatcagaatcagaatttcn

SEQ ID NO: 9179 - DNA, 949 bp, Homo sapiens
  misc_feature 17, 18, 21, 31, 211, 218, 223, 227, 230, 234, 236, 237, 240,325, 396, 414, 454, 602, 642, 668, 702, 728, 729, 731, 750,757, 778, 783, 786, 792, 812, 813, 815, 833, 850, 868, 886,889, 897, 902, 915, 919, 921, 927, 940, 948: n = A,T,C or G
tatacactcctataggnnctncccgcggtgnccgccgaggtacctggccatcttgggcagtgtgacgtttctggctggcaatcggatgctggcccagcaggcagtcaagagaacagcgcattagttccagaagaaagatggaaattctgaaaactgaatgtcaagaaaaggagtcaagaacaattcacagtatgaagaagaaaaaccgaanaaaaaanaaacnaaanganaaananngtncctgcccgggcggccgctctagaactagtggatcccccgggctgcaggaattcgatatcaagcttatcgataccgtcgacctcgngggggggcccggtacccagcttttgttccctttagtgagggttaattgcgcccttggcgtaaatcatgggncataagctggtttcctgngggaaattgttatcccgttcacaattccacacaacatacnagccgggagcataaagtgtaaagcctgggggtgcctaatgagtgaactaactcacattaattgcgttgcgctcactgcccgcttttccaagtcggggaaacctgtcgggccaccttgcattaatgaatcggccaaccccccgggagangccggtttgcctatttgggccctctttccctttccttggntcaattgactccttgccctcggtccnttcggcttgcggcaaccggtatcaacttaacttnaaagggcggtaattaccggttttccnnanaattaagggggataacccncggaaanaacatttgaaccaaaaggccncccanaanggcccngaacccttaaaaaggccccnntngcttggccttttttccanaggctccccccccttgncagctttacaaaaatcgncccttaattaaaaggggncanaccccccngggcntttaaaaataccngccntncccccngaaacttcctttngcccttcnt

SEQ ID NO: 9180 - DNA, 408 bp, Homo sapiens
gattgaatacgactcactatagggcgaattgggccctctagatgcatgctcgagcggccgccagtgtgatggatatctgcagaattcggcttagcgtggtcgcggccgaggtacaatagaagtcagtttggagccatagaagtaggcttagttgagttggagatgcccatcttgaatttctgagagggcaagatatacttatttccattttatgcagtctgcatctacctaaaacctctgactgatgtgggaatggcgaaacactatcaggcttgaatgcgtgtgaaaaacaccaaattggcccagatccctaacagagcaatcctcgaggggatggtggctattgctggagaggcattagctattcacagggtacctgcccgggcggccgctcgaaattccagcaca

SEQ ID NO: 9181 - DNA, 618 bp, Homo sapiens
  misc_feature 8, 12, 570: n = A,T,C or G
ggagttcnaacngagtcgaccccgcgtccgctctgaactctgggcaggactaatttagataaggtagtcaggaaaggcatttcttacaaggtggtatttgcatgaatgtagacatatggttgcattttattatatgtaaattacacttcaataaagttgatgaaaaaaatcttacctcatcgtctatgcacttcggattgttgtatttcattctatttaaattacacttgcgtttaaaaaatttaacacttctctaaaacatatctgttgatttgtacttttactaatatgcttatggatgatttatatacacacacacacacacatatcttttaagaaggttattttaaggttaatcaattgaggctttgtctcaattgattttttttgagacagtctcgttctgtcgcccaggctggagtgcagtggcgtgatctcgactcactgcaagctccacctcccaggttcacgccattctcctgcctcagcctccctagtagctgtgactacaggcaggatccacgtgcccagccggtaaatccttttaatagaggagtttcaatatttctnctctgccatagtattaagaaagaaaagaaatcattattgacatctttt

SEQ ID NO: 9182 - DNA, 876 bp, Homo sapiens
  misc_feature 518, 604, 673, 719, 764, 770, 773, 777, 800, 808, 809, 813,817, 820, 832, 848, 849, 860, 861: n = A,T,C or G
cccgcgtccgttcagatcataaatttgagtggaccagaatggagtttcagacctgggctttatatgtggcaaatcgctatgattactctgtggagtttactggtgtcggggaaccaccagctggagctgagaatgttggatactgtacccagataggaatcttccggaaaaatggaggaaaggcaacagaatcatgtctttcagagcagcatgatcagcatgtttataaagctgtttttaccacctcatacccaagcttacagcaggaaaggttctttaaacttgtgttggttaatgaggtgtcccaacaagtggaaagcttaagagtgagccacctgccaaggcggaaagaacaggctggggaacggggtgataagcccaaagacattggtggctcaaaggcccctgtcccatgctttggaccagtcttcacaagaggttgagaaggccaagatagagaactctcccacacccttctgtgttggagataaatttttcgtacctctgcagaaacttcntgcgtattcccaagttgaaccgcttatgtgcttatgaagaagatgatgaagaacagtcattgctgactcaatttcctctgaaccanttgatgggttctgcagtgggtgggcttgccctgcgtaaatttttttgattaaaaagtttgagtttttgnaccatgttattttctggaaatttaagggctcaacgatagttgggcncccttaaaaattaagttttttttggggaacccaaatcaagtaatngttttnaangttnctggaaaagtttttgttccaagnctttggannaaancttnttngaaaattgcccnactgccatggaccctnnaaaaaaatttnnggtttaaaaaccgcg

SEQ ID NO: 9183 - DNA, 404 bp, Homo sapiens
  misc_feature 12, 24, 38, 74, 229: n = A,T,C or G
attttagggacncgcccacgcgtnttgagcgcttgacngctgcctcgtactcctccatttatccgccatgtttngtgccagccgagctgcagcagcccgtctcgtgggcgccgcagcctcccggggccctacggccgcccgccaccaggatagctggaatggccttagtcatgaggcttttagacttgtttcaaggcgggattatgcatcagaagcaatcaagggagcntttgttggtattgatttgggtactaccaactcctgcgtggcagttatggaaggtaaacaagcaaaggtgctggagaatgccgaaggtgccagaaccaccccttcagttgtggcctttacagcagatggtgagcgacttgttggaatgccggccaagcgacaggctgtcaccaacc

SEQ ID NO: 9184 - DNA, 526 bp, Homo sapiens
  misc_feature 1, 4, 5, 12, 13, 14, 15, 16, 17: n = A,T,C or G
nttnncctttgnnnnnnacgactcactatagggcgaattgggccctctagatgcatgctcgagcggccgccagtgtgatggatatctgcagaattcggcttagcggccgcccgggcaggtacaaaattccttttagagatcaaatggccatcccagatagatatcatgtttcacaggcattacttttagtcaccctcaagtttcagccatgggaccaaaatttagtgttctgtgccatgtggtcacagggtcattggtttcacatcatggcttaagaaaatactggcattttgtttcttacgaagtaagtcctaccttgtgcatacaagcaaaaagaaaaaggaagaaaacaggggagggaaaggcgcaagaagctttttttgtttgtttgttttgaagacaacagattgaaggcaaaagaacacagagctttcacaagctcaaagaaaaatatttgctggctgatcgctgatttgtatgcactataaaacaattccataaataaaaccaatatatcatttcttaa

SEQ ID NO: 9185 - DNA, 658 bp, Homo sapiens
  misc_feature 4, 19, 32, 619, 621, 624: n = A,T,C or G
atangcctatagggtcgantggggccctctanagcatgctcgacggccgccagtgtgatggatatctgcagaattcggcttagcgtggtcgcggccgaggtacttattcttcagggttactgagtcggcacctatgacagctaagagagctttcttaaagactgcctcagtgtcttcttggcttttggcaccttcactccactctgcccaggaaatccacaatggcagacaaacctggggtttcaggtgcacaaaggcttcttcaaaaagcatggctatgtcagggctctttgactcgatcagcacctgcagcttcagctgccacattgtcccagagtctctaaacaattcagttccagctactgccacttccagagcttccctcaggaagttataacacagcaacgaaacactcaactgcttgtattggcattctgacagaagcttcagttcatgtgccttcctgaatacagtcatggttctttccaacctcttccctctaaggaacccactatttgacttcttagtaaatctttccaagcaaaaggtgatgtaacacttccacatggcctctgttggcagagtcttcactgcctcttcatacacagcacagcacctntnctncttccggccgacctccactgctttggcttgtttc

SEQ ID NO: 9186 - DNA, 345 bp, Homo sapiens
  misc_feature 4, 8, 49, 56, 72, 118, 129, 177, 202, 232, 325, 345: n = A,T,C or G
cccnggcngggcgggcagcgcaggtgggtgctacagggacgctgcttgnccctgtnataggaagagcttatnacctttcatgatcacgccctcataatcattttgccttatctgcttnctagtcctgtntgcccttttgctaacactcacaacaaaactaactaatactaacatctnagacgctcaggaaatagaaaccgtntgaactatcctgcccgccatcatcctagtncctcatcgccctcccatccctacgcatcctttacataacagacgaggtcaacgatccctcccttaccatcaaatcaattggccaccaatggtnctgaacctacgagtacaccn

SEQ ID NO: 9187 - DNA, 860 bp, Homo sapiens
  misc_feature 4, 5, 6, 11, 17, 20, 21, 32, 33, 37, 443, 444, 445, 446,447, 448, 449, 450, 451, 452, 453, 454, 455, 456, 457, 458,459, 460, 461, 462, 463, 464, 465, 466, 467, 468, 469, 470,471, 472, 473, 474, 475, 476, 477, 478, 479, 480, 481: n = A,T,C or G
  misc_feature 482, 483, 484, 485, 486, 487, 488, 489, 490, 491, 492, 493,494, 495, 496, 497, 498, 499, 500, 501, 502, 503, 504, 505,506, 507, 508, 509, 510, 511, 512, 513, 514, 515, 516, 517,518, 519, 520, 521, 522, 523, 524, 525, 526, 527, 528: n = A,T,C or G
  misc_feature 529, 530, 531, 532, 533, 534, 535, 536, 537, 538, 539, 540,541, 542, 543, 544, 545, 546, 547, 548, 549, 550, 551, 552,553, 554, 555, 556, 557, 558, 559, 560, 561, 562, 563, 564,565, 566, 567, 568, 569, 570, 571, 572, 573, 574, 576: n = A,T,C or G
  misc_feature 578, 579, 582, 583, 584, 585, 586, 587, 588, 589, 590, 591,592, 593, 594, 595, 596, 597, 598, 599, 600, 601, 602, 603,604, 605, 606, 607, 608, 609, 610, 611, 612, 613, 614, 615,616, 617, 618, 619, 620, 621, 622, 623, 624, 625, 626: n = A,T,C or G
  misc_feature 627, 628, 629, 630, 631, 632, 633, 634, 635, 636, 637, 638,639, 640, 641, 642, 643, 644, 645, 646, 647, 648, 649, 650,651, 652, 653, 654, 655, 656, 657, 658, 659, 660, 661, 662,663, 664, 665, 666, 667, 668, 669, 670, 671, 672, 673: n = A,T,C or G
  misc_feature 674, 675, 676, 677, 678, 679, 680, 681, 682, 683, 684, 685,686, 687, 688, 689, 690, 691, 692, 693, 694, 695, 696, 697,698, 699, 700, 701, 702, 703, 704, 705, 706, 707, 708, 709,710, 711, 712, 713, 714, 715, 716, 717, 718, 719, 720-860: n = A,T,C or G
agtnnncgacncgcgtnatnngacttactatnnggcnaattggagctccaccgcggtggcggccgcggtctcggtcactcgaataacccgacatggcgtcaatggttgcggttggcggggaacgaagtatatagaaaagcgtgcgacaagtcgctggaaatggcctcgatgacggcgaagccttgcgggggcggcagcggaggaaggacaccgatgacaccagccgaagctgcactactagagaccggtagaaatgaatgaggtcccgcgtacctgcccgggcggccgctctagaactagtggatcccccgggctgcaggaattcgatatcaagcttatcgataccgtcgacctcgagggggggcccggtacccagcttttgttccctttagtgagggttaattgcgcgcttggcgtaatcatggtcatagctgtttccttgnnnnnnnnnnnnnnnnnnnnnnnnnnnnnnnnnnnnnnnnnnnnnnnnnnnnnnnnnnnnnnnnnnnnnnnnnnnnnnnnnnnnnnnnnnnnnnnnnnnnnnnnnnnnnnnnnnnnnnnnnnnnnnnnnnnntncnnggnnnnnnnnnnnnnnnnnnnnnnnnnnnnnnnnnnnnnnnnnnnnnnnnnnnnnnnnnnnnnnnnnnnnnnnnnnnnnnnnnnnnnnnnnnnnnnnnnnnnnnnnnnnnnnnnnnnnnnnnnnnnnnnnnnnnnnnnnnnnnnnnnnnnnnnnnnnnnnnnnnnnnnnnnnnnnnnnnnnnnnnnnnnnnnnnnnnnnnnnnnnnnnnnnnnnnnnnnnnnnnnnnnnnnnnnnnnnnnnnnnnnnnnnnnnnnnnnnnnnnnnnnnnnnnnnnnnnnnn

SEQ ID NO: 9188 - DNA, 871 bp, Homo sapiens
  misc_feature 518, 619, 640, 671, 683, 684, 692, 693, 700, 719, 731, 737,740, 742, 766, 767, 774, 783, 784, 798, 805, 822, 827, 840,850, 852, 853, 855, 856, 859, 868, 869, 870: n = A,T,C or G
gtaatacgactcactatagggcgaattggagctccaccgcggtggcggccgcccgggcaggtacgcggggggcctctgtaaggcacatggaggtgatgatgtttcttagagagaagatcactgaagaaacttctgctttaatgactttacaaagctggcaatattacaatccttgacctcagtgaaagcagtcatcttcagcgttttccagccctatagccaccccaagtgtggttatgcctcctcgattgctccgtacctcggccgctctagaactagtggatcccccgggctgcaggaattcgatatcaagcttatcgataccgtcgacctcgagggggggcccggtacccagcttttgttccctttagtgagggttaattgcgcgcttggcgtaatcatggtcatagctgtttcctgtgtgaaattgttatcccgctcacaattccacacaacatacgagccgggagcataaagtgtaaagcctggggtgcctaatgagtgagctaactccattnattgcgttgcgctcactgcccgctttccaagtcgggaaacctgtcgtgccagctgcatttaatgaatcggccaaccccccggggagaggcggtttggcgtnttggggcgctctttccgcttncttcgctcaactgaactcccttggggcttcnggtccgttccgnntgcgggcnnagcggtnttcaagctcacttcaaaanggcgggaaatancggttnttncncaaaaaatcaaggggattaccccnnggaaaanaacattttnngcaaaaaggcccancaaaaanggcccgggaacccgtanaaaanggcccgtggttgnggtttttttnannannggngcccccccnnng

SEQ ID NO: 9189 - DNA, 766 bp, Homo sapiens
  misc_feature 2, 3, 7, 12, 721: n = A,T,C or G
gnnaggntttanaagtacatatgataccaaaatggaatagcagtcagtcttccagatttacaaacgtatacctttacttctctgttagaggtgttcaaatacggagtcattaaatctagtcttaagagttccactggcttgcttaaaggtatacagggcaatgaggataggtccaaaaatacacgtataggtacctgaaactggttaataaaaggtgctatatttaatccaagagtacgttctgttccttgaacagcattctcctctaggagtgtctgtgattccacaagcaacccaaacatcagcacatactgaggaaagatcttgcctccagattgtagtaaacacctggatattgcagctttttccattatttcctgctgaatgagcccagatggctcaatgacatccaatataattatgctccataacttgtctgattttggcctttgtaacatagcagattcatcctccacatgtctcagccaaaactcaagtgtttctttaggaaagtgattggcttcagatatgaggtccagagcaatacgatgctggtctttctccacagaactgtatggtttaacctgcccaagtgtgccagcaataacaggcagaacagagaagccttcggacacatctaacacgtagaaaggttcaaggatgttctgtcagtattactctgtccagttccagagctcatctcattctgacagtgagtatncatggtctgatcagtttcttctggagtcagtgaagacaaaacttg

SEQ ID NO: 9190 - DNA, 386 bp, Homo sapiens
  misc_feature 5: n = A,T,C or G
tgatncgccagcgcgcaattaaccctcactaaagggaacaaaagctgggtaccgggccccccctcgaggtcgacggtatcgataagcttgatatcgaattcctgcagcccgggggatccactagttctagagcggccgcccgggcaggtacgcggggggcctctgtaaggcacatggaggtgatggtgtttcttagagagaagatcactgaagaaacttctgctttaatgactttacaaagctggcaatattacaatccttgacctcagtgaaagcagtcatcttcagcgttttccagccctatagccaccccaagtgtggttatgcctcctcgattgctccgtacctcggccgccaccgcggtggagctccaattcgccctatag

SEQ ID NO: 9191 - DNA, 806 bp, Homo sapiens
  misc_feature 2, 3, 4, 15, 25, 129, 527, 669, 760, 781: n = A,T,C or G
gnnnatgtttaattntgtgtccacnccgcgtccgactgtgtccggcgatgggcacgggcatttcttcgtttatagctgtctgtttgcattctgattgggaacactgggatcattttcatcatgccgacngtggtggtaatggatgtatccctttccatgacccgacctgtgtctattgaggggtccgaggaataccagcgtaagcacctagcagcccatggtttaacgatgctgtttgagcacatggccacaaattacaagcttgaatttacagcacttgtggttttttcatcactttgggagttgatggtccccttcacgagagattataataccctacaggaagcactaagtaatatggatgattatgacaaaacctgcttggagtctgcattagttggtgtttgcaatatcgttcagcaagaatggggtggtgcaattccttgccaggttgtcctggtgacagacggctgtcttggcattggtagagggtcactgcgacattccctagccactcaaaatcaacnaagtgagagcaacaggtttccactaccttttcctttcccatctaagttatatatcatgtgcatggcgaatttggaggagctccagagcacccgattccttggaatgccttgaaccgtctcatagatttaaacaatggtgaanggcagattttactattgatggccccctgtgcttgaaagaaatgtacagtctatgtttggaaaactgatagaatttggcatatacccctttncatgctgttctcaagtgtggncacctaactgctgatggtacaagtt

SEQ ID NO: 9192 - DNA, 368 bp, Homo sapiens
  misc_feature 206: n = A,T,C or G
cgcgtaatacgactcactatagggcgaattggagctccaccgcggtggcggccgaggtacgcggggcagacactgaccttcagcgcctcggctccagcgccatggcgccctccaggaagttcttcgttgggggaaactggaagatgaacgggcggaagcagagtctgggggagctcatcggcactctgaacgcggccaaggtgccnggccgctctagaactagtggatcccccgggctgcaggaattcgatatcaagcttatcgataccgtcgacctcgagggggggcccggtacccagcttttgttccctttagtgagggttaattgcgcgcttggcgtaatcatggtcatagctgtttcctgtgtg

SEQ ID NO: 9193 - DNA, 1188 bp, Homo sapiens
  misc_feature 1, 10, 12, 13, 17, 24, 26, 27, 28, 32, 33, 34, 35, 37, 39,50, 52, 55, 56, 57, 62, 71, 75, 77, 81, 85, 86, 87, 89,90, 91, 92, 93, 98, 103, 106, 107, 109, 113, 120, 447, 456,487, 524, 557, 572, 575, 578, 586, 588, 652, 658, 659, 672: n = A,T,C or G
  misc_feature 676, 679, 682, 687, 692, 696, 703, 741, 745, 753, 754, 778,782, 783, 798, 801, 804, 814, 824, 825, 827, 829, 831, 833,841, 851, 852, 855, 856, 872, 884, 886, 890, 911, 921, 927,930, 933, 945, 946, 950, 953, 956, 963, 971, 982, 986: n = A,T,C or G
  misc_feature 993, 999, 1001, 1017, 1018, 1022, 1026, 1027, 1030, 1033,1037, 1050, 1053, 1059, 1060, 1061, 1065, 1068, 1069, 1073,1081, 1085, 1090, 1093, 1095, 1101, 1103, 1107, 1118, 1123,1124, 1127, 1132, 1134, 1135, 1143, 1145, 1150, 1153: n = A,T,C or G
  misc_feature 1155, 1159, 1164, 1175, 1176, 1180: n = A,T,C or G
ntctctcttntnncatnttttatntnnntttnnnncntntctttcattgngnttnnnatgtnaatttcatntatntnttantttnnntnnnnnttttngagtnggnncntgtntaacgantcactatagggcgaattggagctccaccgcggtggcggccgaggtacaaacccagtttgttttcaaaaaatcacagtagcaatgcaactcatcactctagaaaagcaagcttaggctacctgaaagattttcccttggaagtttagcgtatgtttgactaacaagaattccctacatcagagactctaggtgctatataatccaaaaacttttcagcctgttgctcattctgtcccatgctggcaataataccttgtcagcccattacccttattttgaattgctccatctcctggtaggggacttgtatcttgtctgccatatcanaacaccaanacccctggaagagggttctgattttgaattntatttttttcttacatgccctaccccttttttttggnaagtttttccaggccgcaattttggataaatgnaaaatgaccaagggnggntantatttttngnatcaaatttttcattttccccacccattggccatttaccaaacccttttaaacttttaaaaatnggggtnnaacccccttaaanggcnttntcnaaaangaaanccangaacctngtcattgaataaaacctggtaaaaattttagaaaaaanatangaaacccnnccattcttaattttttgggttttnaacnnttgcctttaacttcnttnaancccttttttnttgaatgatnntntntnanatgggggnccttaacaannttnntctttttttttattantaattttttcgntnatanctttaatttttttttatttangcccatctcnatttanttntgngttttaaaagtnnttanttnatnggggcanacccaaantcctttgtggnaaangcttgtnaattcncntggaaattttaacaannaaanatgnnttnctntttnggaaaaaaaattnggngctacnnnttcnggnngccnattttttnttantttcnttncnctaatngnggtntttccttggcnctggnnttnaaacnannaattgggncncctcnggngncgcntttcnaaaaacataannttgncgatcccg

SEQ ID NO: 9194 - DNA, 662 bp, Homo sapiens
  misc_feature 1, 2, 3, 4, 5, 8, 13, 20, 28, 29, 31, 43, 60, 544, 615, 652,662: n = A,T,C or G
nnnnnggngtcgncccacgncgtccggnnanctggctcagggncgtccgctaggctcggnacgacctgctgagcctcccaaaccgcttccataaggctttgcctttccaacttcagctacagtgttagctaagtttggaaagaaggaaaaaagaaaatccctgggccccttttcttttgttctttgccaaagtcgtcgttgtagtctttttgcccaaggctgttgtgtttttagaggtgctatctccagttccttgcactcctgttaacaagcacctcagcgagagcagcagcagcgatagcagccgcagaagagccagcggggtcgcctagtgtcatgaccagggcgggagatcacaaccgccagagaggatgctgtggatccttggccgactacctgacctctgcaaaattccttctctaccttggtcattctctctctacttggggagatcggatgtggcactttgcggtgtctgtgtttctggtagagctctatggaaacagcctccttttgacagcagtctacgggctggtggtggcanggtctgttctggtcctgggagccatcatcggtgactgggtggacaagaatgctagacttaaagtggcccanacctcgctggtgggacaaaatgtttcagtcatcctgngtggaatcan

SEQ ID NO: 9195 - DNA, 585 bp, Homo sapiens
  misc_feature 464, 549, 569: n = A,T,C or G
tagggcgaattggagctccaccgcggtggcggccgaggtaccaggtgaacaaagtttaccagaaagcagttgagacaagaaaataagagctcaggatgagggaaaagaaaaagattgagagaatttgtgcccccaaccatttcctcagactctaagaaagaacacgctctctccaggcaggtctgaagctcaactctcttattgcctcacttcaggtatacctcactttacacaatagaattataactggaaagaagttggggacacatgtatttggtgattacattttaaacacattaggaaaagttgctatttgaactttttattgatttttggggggagtaaagaattatttttgtgatgcaaataaatatcctttaattgatcgacttgccaaatttagatttgtgtgcatcaggctttctttttttctttttttagagaagttcaatataagcttttcntttctttgggttctttctttcttttatttttgagatgggaggtcttgctctggtccgccccatgcctggaagtgccagtgggcgncgatctttggctcaactggnaaacttccaccctttc

SEQ ID NO: 9196 - DNA, 473 bp, Homo sapiens
  misc_feature 2, 3, 4, 5, 6, 9, 10: n = A,T,C or G
gnnnnnggnngattgaatcactactatagggcgaattgggccctctagatgcatgctcgagcggccgccagtgtgatggatatctgcagaattcggcttagcgtggtccggccgaggtacagatggaggggctggcccatgcagggcctcggggtgagattcactaggactagctgcagggggacctggctacactctgtggcacaacagggcttcacaaaatggacactacacgtgacgtgggctgaaaggtggagcagagactgggtgggagtgtcagttgcacgttgtggggtaagggggagagggagcagggcaagtgtattatgtacctgcccgggcggccgctcgaaagccgaattccagcacactggcggccgttactagtggatccgagctcggtaccaagcttggcgtaatcatggtcatagctgtttcctgtgtgaaattgttatccgctcacaattccacac

SEQ ID NO: 9197 - DNA, 663 bp, Homo sapiens
  misc_feature 6, 7, 9, 23, 31, 39, 366, 372, 373, 374, 375, 376, 377, 378,379, 380, 381, 382, 383, 384, 385, 386, 387, 388, 389, 390,391, 392, 393, 394, 395, 396, 397, 398, 399, 400, 401, 402,403, 404, 405, 406, 407, 408, 409, 410, 411, 412: n = A,T,C or G
  misc_feature 413, 414, 415, 416, 417, 418, 419, 420, 421, 422, 423, 424,425, 426, 427, 428, 429, 430, 431, 432, 433, 434, 435, 436,437, 438, 439, 440, 441, 442, 443, 444, 445, 446, 447, 448,449, 450, 451, 452, 453, 454, 455, 456, 457, 458, 459: n = A,T,C or G
  misc_feature 460, 461, 462, 463, 464, 465, 466, 467, 468, 469, 470, 471,472, 473, 474, 475, 476, 477, 478, 479, 480, 481, 482, 483,484, 485, 486, 487, 488, 489, 490, 491, 492, 493, 494, 495,496, 497, 498, 499, 500, 501, 502, 503, 504, 505, 506: n = A,T,C or G
  misc_feature 507, 508, 509, 510, 511, 512, 513, 514, 515, 516, 517, 518,519, 520, 521, 522, 523, 524, 525, 526, 527, 528, 529, 530,531, 532, 533, 534, 535, 536, 537, 538, 539, 540, 541, 542,543, 544, 545, 546, 547, 548, 549, 550, 551, 552, 553: n = A,T,C or G
  misc_feature 554, 555, 556, 557, 558, 559, 560, 561, 562, 563, 564, 565,566, 567, 568, 569, 570, 571, 572, 573, 574, 575, 576, 577,578, 579, 580, 581, 582, 583, 584, 585, 586, 587, 588, 589,590, 591, 592, 593, 594, 595, 596, 597, 598, 599, 600: n = A,T,C or G
  misc_feature 601, 602, 603, 604, 605, 606, 607, 608, 609, 610, 611, 612,613, 614, 615, 616, 617, 618, 619, 620, 621, 622, 623, 624,625, 626, 627, 628, 629, 630, 631, 632, 633, 634, 635, 636,637, 638, 639, 640, 641, 642, 643, 644, 645, 646, 647-663: n = A,T,C or G
gcgatnntngtacttcactctgntgtgcctnattggaanctccaccgcggtggcggccgaggtacgcggggcagacactgaccttcagcgcctcggctccagcgccatggcgccctccaggaagttcttcgttgggggaaactggaagatgaacgggcggaagcagagtctgggggagctcatcggcactctgaacgcggccaaggtgccggccgctctagaactagtggatcccccgggctgcaggaattcgatatcaagcttatcgataccgtcgacctcgagggggggcccggtacccagcttttgttccctttagtgagggttaattgcgcgcttggcgtaatcatggtcatagctgttttnccttgnnnnnnnnnnnnnnnnnnnnnnnnnnnnnnnnnnnnnnnnnnnnnnnnnnnnnnnnnnnnnnnnnnnnnnnnnnnnnnnnnnnnnnnnnnnnnnnnnnnnnnnnnnnnnnnnnnnnnnnnnnnnnnnnnnnnnnnnnnnnnnnnnnnnnnnnnnnnnnnnnnnnnnnnnnnnnnnnnnnnnnnnnnnnnnnnnnnnnnnnnnnnnnnnnnnnnnnnnnnnnnnnnnnnnnnnnnnnnnnnnnnnnnnnnnnnnnnnnnnnnnnnnnnnnnnnnnnnnnnnnnnnnnnnnnnn

SEQ ID NO: 9198 - DNA, 618 bp, Homo sapiens
  misc_feature 5, 6, 7, 9, 23, 29, 30, 31, 36, 38, 408, 409, 410, 411, 412,413, 414, 415, 416, 417, 418, 419, 420, 421, 422, 423, 424,425, 426, 427, 428, 429, 430, 431, 432, 433, 434, 435, 436,437, 438, 439, 440, 441, 442, 443, 444, 445, 446: n = A,T,C or G
  misc_feature 447, 448, 449, 450, 451, 452, 453, 454, 455, 456, 457, 458,459, 460, 461, 462, 463, 464, 465, 466, 467, 468, 469, 470,471, 472, 473, 474, 475, 476, 477, 478, 479, 480, 481, 482,483, 484, 485, 486, 487, 488, 489, 490, 491, 492, 493: n = A,T,C or G
  misc_feature 494, 495, 496, 497, 498, 499, 500, 501, 502, 503, 504, 505,506, 507, 508, 509, 510, 511, 512, 513, 514, 515, 516, 517,518, 519, 520, 521, 522, 523, 524, 525, 526, 527, 528, 529,530, 531, 532, 533, 534, 535, 536, 537, 538, 539, 540: n = A,T,C or G
  misc_feature 541, 542, 543, 544, 545, 546, 547, 548, 549, 550, 551, 552,553, 554, 555, 556, 557, 558, 559, 560, 561, 562, 563, 564,565, 566, 567, 568, 569, 570, 571, 572, 573, 574, 575, 576,577, 578, 579, 580, 581, 582, 583, 584, 585, 586, 587: n = A,T,C or G
  misc_feature 588, 589, 590, 591, 592, 593, 594, 595, 596, 597, 598, 599,600, 601, 602, 603, 604, 605, 606, 607, 608, 609, 610, 611,612, 613, 614, 615, 616, 617, 618: n = A,T,C or G
gcgtnnntngtacttcactctgngggccnnnttggnanctccaccgcggtggcggccgttattggtggtgaagacccgtagcaacagtgggcatgtcttctcgcggtcgatcggtttctctggctccttcttaatttcctcctgggtaacgcgcgactccaccgccatcttcctcctacggcctgcgagacgctcgccctgacctccgacccctgcagcgagcatgagcactccccgcgtacctcggccgctctagaactagtggatcccccgggctgcaggaattcgatatcaagcttatcgataccgtcgacctcgagggggggcccggtacccagcttttgttccctttagtgagggttaattgcgcgcttggcgtaatcatggtcatagctgttttccctggannnnnnnnnnnnnnnnnnnnnnnnnnnnnnnnnnnnnnnnnnnnnnnnnnnnnnnnnnnnnnnnnnnnnnnnnnnnnnnnnnnnnnnnnnnnnnnnnnnnnnnnnnnnnnnnnnnnnnnnnnnnnnnnnnnnnnnnnnnnnnnnnnnnnnnnnnnnnnnnnnnnnnnnnnnnnnnnnnnnnnnnnnnnnnnnnnnnnnnnnnnnnnnnnnn

SEQ ID NO: 9199 - DNA, 533 bp, Homo sapiens
  misc_feature 2, 3, 6, 28: n = A,T,C or G
gnngancccttgtcaccccgcgtccgcnccggagcggctgcggagccgggcgctctccgccttcaagttgcggggcttgctgctccgtggtgaagctattaagtacctcacagaagctcttcagtctatcagtgaattagagcttgaagataaactggaaaagataattaatgcagttgagaagcaacccttgtcatcaaacatgattgaacgatctgtggtggaagcagcagtccaggaatgcagtcagtctgttgatgaaactatagagcacgttttcaatatcataggagcatttgatattccacgctttgtgtacaattcagaaagaaaaaaatttcttcctctgttaatgaccaaccaccctgcaccaaatttatttggaacaccaagagataaagcagagatgtttcgtgagcgatataccattttgcaccagaggacccacaggcatgaattatttactcctccggtgataggttcttcaccctgatgaaagcggaagcaaattccagcttaaaacaatagaaacc

SEQ ID NO: 9200 - DNA, 868 bp, Homo sapiens
  misc_feature 2, 6, 12, 13, 136, 195, 197, 203, 204, 223, 238, 241, 243,246, 251, 286, 287, 292, 293, 303, 315, 317, 321, 331, 337,343, 351, 356, 384, 415, 428, 440, 448, 466, 474, 475, 477,482, 484, 496, 507, 510, 535, 547, 564, 578, 610, 621: n = A,T,C or G
  misc_feature 622, 639, 640, 672, 706, 717, 722, 730, 735, 753, 765, 781,783, 808, 810, 820, 855, 861, 862, 867, 868: n = A,T,C or G
ancgcntgtacnncgtatacgactcactatagggcgaattgggtaccgggccccccctcgaggtcgacggtatcgataagcttgatatcgaattcctgcagcccgggggatccactagttctagagcggccgaggnttttttttttttttttttttttttttttttttttttttttttttttttttttttggccncncctacnnttattggactttaaagcanactggttttggaccnttnanaanttttnaaacatttcccaaaagggtttaggaagatgccatnnttttnngaaggcccanaacctaccccananttanagccccaagnaaactncccaanagccttgnggganctaaaggaaatggccgacctgcccgggnggccgccaccgggggggagctccaacttttnttccctttagggngggttaaatgcncccttggnggaaaaaatgggcaaagntttttctnngngaaantnttttttcctttnaaatttcaaanaanataccagccggaaaaaaaaaagggnaaacccgggggngcccaaagggggggccnacccacaattaatngggtgggcctcaactgcccgtttcaagggggnaaacctttggnngccaatttttataaaannaatcggccaccccccgggggaggggggttttnggatttggggcttttcctttcctggttaaataantccttggcttnggggnttgggttnggggngggggtttaaatttaatnaaaggggggaanacggtttttccaaaantnggggttacccccggaaaaaattttncnaaaagccccnaaaggcccgaacccaaaaagggccccttttttgcntttttnnaaagnn

SEQ ID NO: 9201 - DNA, 793 bp, Homo sapiens
  misc_feature 7, 11, 21, 590, 602, 617, 686, 703, 725, 738, 793: n = A,T,C or G
gtgtgtncctntgggtcgccncgctccgtgttgctcttggtggacgggcccagaggaattcagagttaaaccttgagtgcctgcgtccgtgagaattcagcatggaatgtctctactatttcctgggatttctgctcctggctgcaagattgccacttgatgccgccaaacgatttcatgatgtgctgggcaatgaaagaccttctgcttacatgagggagcacaatcaattaaatggctggtcttctgatgaaaatgactggaatgaaaaactctacccagtgtggaagcggggagacatgaggtggaaaaactcctggaagggaggccgtgtgcaggcggtcctgaccagtgactcaccagccctcgtgggctcaaatataacatttgcggtgaacctgatattccctagatgccaaaaggaagatgccaatggcaacatagtctatgagaagaactgcaaaaatgaggctggtttatctgctgatccctatgtttacaactggacagcatggtcagaggacagtgaccgggaaaatggcacccggccaaagccatcataaccgtctttcctggtgggaaaccttttncttaccaccccngatggagaaaatggnatttcatctacctcttcccacacttggtcaagtattttccagaaattgggaccatgttcaagtgagagnttcttgtgaaccccagnccatgggaccccttgggccctnactcatgggaagngactgtctaccagaagacatggccggcatattttccattgcacagggggaagaan

SEQ ID NO: 9202 - DNA, 836 bp, Homo sapiens
  misc_feature 397, 522, 566, 594, 618, 635, 637, 638, 657, 661, 663, 665,671, 686, 691, 697, 706, 707, 713, 732, 735, 740, 743, 760,768, 772, 776, 777, 785, 793, 795, 802, 804, 810, 813, 823,827, 836: n = A,T,C or G
ggagctccaccgcggtggcggccgaggtacgcgggggccgcgcccatagccggacggggatctgagctggcaggatgaatgtgggggtggcacacagcgaagtaaaccccaacacccgagtgatgaatagccgaggcatctggctggcctacatcatcttggtaggattgctgcatatggttctactcagcatccccttcttcagcattcctgttgtctggaccctgaccaacgtcatccataacctggctacgtatgtcttccttcatacggtgaaagggacaccctttgagactcctgaccaaggaaaggctcggctactgacacactgggagcaaatggactatgggctccagtttacctcttcccgcaagttcctcagcatctctcctattgngctctatctcctggccagcttctataccaagtatgatgctgcgcactttctcatcaacacagcctcattgctaaagtgtacctgcccgggcgggcgctctagaactagtggatccccccggctgnaaggaattcgatatcaagcttattcgataccgtcgaccctcganggggggcccggtacccaagcttttggtnccttttaagtgaggggttaattgngccccttggcggtaatnannggggcaaaagctgggtttncctngngnggaaanttggttttccgcttnaaaantttccncaacaaaannaccaancccggggggccataaaagnggnaaagnccnggggggggcccctaatngggggggngccnaacnncccatttnaattgggntnggggccncncttggnccnttttttcaanaagnggaaaaccn

SEQ ID NO: 9203 - DNA, 540 bp, Homo sapiens
  misc_feature 2, 3, 4, 427, 460, 468, 474: n = A,T,C or G
gnnnaatcccagttggaccgagctcggatccctagtaacggccgccagtgtgctggaattcggcttcgagcggccgcccgggcaggtacggcttcggaggctaggccgccgctccagctttgcacgtttcgatcccaaaggccctttttagggccgaccacttgctcatctgaggagttggacacttgactgcgtaaagtgcaacagtaacgatgttggaaggcttatgattttactgtgtatgtatttgggagaagaaattctgtcagctcccaaaggataaaccagcagttgctttattggtcttcagatgtggctgcaaacacttgagactgaactaagcttaaaacacggtacctcggccgcgaccacgctaagccgaattctgcagatatccatcacactggcggccgctcgagcatgcatntagagggcccaattcgccctataagtgaggtcntattttanaaattnactgggcccgtcgttttacaaccgttcgtgactgggggaaaaacccctggcgttacccaactttat

SEQ ID NO: 9204 - DNA, 627 bp, Homo sapiens
  misc_feature 27, 34, 48, 63, 561: n = A,T,C or G
tccccgcggtggcggccgagtactggnaccatgnatgttatcactggnatgctgcctcctgancctcattcacccagcgcttgaccacgtcaaagctgcacttcagcaggtgcaaggaagacacgagggcagagctggagacactgggcaccttgtccacaatggcttgtttcatgtagcgctcaatagcctgcagcatggtgctatcagtgatctggcagagggctcgcacggccgctctagaactagtggatcccccgggctgcaggaattcgatatcaagcttatcgataccgtcgacctcgagggggggcccggtacccagcttttgttccctttagtgagggttaattgcgcgcttggcgtaatcatggtcatagctgtttcctgtgtgaaattgttatccgctcacaattccacacaacatacgagccgggagcataaagtgtaaagcctggggtgcctaatgagtgagctaactcacattaattgcgttgcgctcactgcccgctttccagtcgggaaacctgtcgtgccagctgcattaatgaatcggccaantcgcggggagaggcggtttgcgtattgggcgctcttccgcttcctcgctcactgactcgctgcgct

SEQ ID NO: 9205 - DNA, 875 bp, Homo sapiens
  misc_feature 474, 521, 550, 586, 653, 687, 688, 699, 727, 731, 741, 746,761, 773, 775, 793, 796, 801, 806, 807, 814, 826, 839, 842,849, 860, 861, 868, 872: n = A,T,C or G
ggcgaattggagctccaccgcggtggcggccgcccgggcaggtacgcggggagctgtgggctcagaagcagagttctggggtgtctccaccatggcctggacccctctctggctcactctcctcactctttgcataggttctgtggtttcttctgagctgactcaggaccctgctgtgtctgtggccttgggacagacaatcaggatcacatgccaaggagacaccctcagaagatattctccagtctggtacctcggccgctctagaactagtggatcccccgggctgcaggaattcgatatcaagcttatcgataccgtcgacctcgagggggggcccggtacccagcttttgttccctttagtgagggttaattgcgcgcttggcgtaatcatggtcatagctgtttcctgtgtgaaattgttatccgctcacaattccacacaacatacgagccgggagcataaagtgtnaagcctggggtgcctaatgagtgagctaactcacattaattgcgttngcgctcactggcccgcttttcagtcgggnaaacctgtcgtgcccagctgcattaatgaaatcggnccaaccccccgggaagaaggcgggtttgcgttatttgggcgccttttccgcttttcttcggcttcanttgactttcgcttgcgcctcggggccgtttcggnnttgcgggcganccggggattcaaacctcaactttcaaanggcngggaataccnggttnttcccaaaaattcanggggattaaccncncgggaaaaaacaatttgngcnaaaanggccnnccaaaanggcccggaaccntaaaaaagggccnggnttggctnggggtttttcnntaaggcncccncct

SEQ ID NO: 9206 - DNA, 364 bp, Homo sapiens
  misc_feature 2, 4, 26, 28, 33, 35, 77: n = A,T,C or G
cntnctggtactcacttgttgtgccngnttggnanctccaccgcggtggcggccgaggtacgcgggcaactacaagnaccacgcctcccgtgctggactccgacggctccttcttcctctatagcaagctcaccgtggacaagagcaggtggcagcaggggaacgtcttctcatgctccgtgatgcatgaggctctgcacaaccactacacgcagaagagcctctccctgtccccgggtaaatgagtgcgacggccgctctagaactagtggatcccccgggctgcaggaattcgatatcaagcttatcgataccgtcgacctcgagggggggcccggtacccagcttttgttccctttagtga

SEQ ID NO: 9207 - DNA, 547 bp, Homo sapiens
  misc_feature 305, 368, 369, 373, 491, 515, 518, 529, 532, 544, 547: n = A,T,C or G
gctgggtcgccccgcgtccgggaacagtgtgggagaggaacgcggcggcggcggcgccgggcccgggggtggtgacacgcaggtctgaggttgcatcataaatacaaaggactgaagttataaaagagaaaagagaagtttgctgctaaaatgaatctgagcaatatggaatattttgtgccacacacaaaaaggtactgaagatttaccccccaaaaaaaattgtcaatgagaaataaagctaactgatatcaaaaagcagagcctgctctactggccatcatgcgtaaaggggtgctgaaggnccaaagattggccgatctatttctcaaaagatgatcctgaggaacttttttttggttttggcnngaantggcctgggaagttttggaagcagtttattttgctacaaatgctcacaccagttgagggtggtggcaattaagaagatgtcctatagtgggaagcagacccatgagaaatgcaagatntttaagggaagtttaaattttacncanatttggagccntcnaaatcttttggnccn

SEQ ID NO: 9208 - DNA, 403 bp, Homo sapiens
  misc_feature 4, 262, 291, 330, 380, 393: n = A,T,C or G
agcnccgcgtaatacgactcactatagggcgaattggagctccaccgcggtggcggccgaggtacttgttgttgctttgtttggagggtgtggtggtctccactcccgccttgacggggctgctatctgccttccaggccactgtcacggctcccgggtagaagtcacttatgagacacaccagtgtggccttgttggcttgaagctcctcagaggagggcgggaacagagtgaccgagggggcagccttgggctgacctangacggtcagcttggtcccttccgccgaanaggggattagtattgctgtctgttgagtaacagtagtantcagcttcatcctccacctgggccccactgatagtcaaggtggccattgncccggaactgganccagaaaatc

SEQ ID NO: 9209 - DNA, 867 bp, Homo sapiens
  misc_feature 693, 715, 725, 785, 828, 838, 841, 852, 855: n = A,T,C or G
gcgtcgactcactatagggcgaattggagctccccgcggtgggcggcccgcccggcaggtacacttgaaaccaaatttctaaaacttgtttttcttaaaaaatagttgttgtaacattaaaccataacctaatcagtgtgttcactatgcttccacactagccagtcttctcacacttcttctggtttcaagtctaagcctgacagacagaagggcttggagattttttttctttacaattcagtcttcagcaacttgagagctttcttcatgttgtcaagcaacagagctgtatctgcaggttcgtaagcatagagacggtttgaatatcttccagtgatatcggctctaactgtcagagatgggtcaacaaacataatcctggggacatactggccatcaggagaaaggtgtttgtcagttgtttcataaaccagattgaggaggacaaactgctctgccaatttctggatttctttattttcagcaaacactttctttaaagcttgactgtgtgggcactcatccaagtgatgaataatcatcaagggtttgttgcttgtcttggatttatatagagcttcttcatatgtctgagtccagatgagttggtcaccccaacctctggagagggtctggggcagtttgggtcgagagtcctttggggtcctttttggctccaggtttgactgnggtatctctggccagagtgtangagagggccncaaggagcaagaatgctgaccctggaatttctccatggcaaccttggatttcctcacccnctgccttgggtgagtcggcggcttaggatgccggcccagcttntgagtcccgngtncctgggcggtntanaactaggggact

SEQ ID NO: 9210 - DNA, 929 bp, Homo sapiens
  misc_feature 436, 438, 442, 458, 463, 482, 494, 504, 516, 517, 522, 541,542, 566, 567, 572, 574, 579, 587, 589, 592, 597, 598, 599,600, 605, 606, 613, 618, 628, 636, 638, 656, 660, 662, 663,669, 673, 675, 681, 684, 687, 688, 693, 698, 702, 706: n = A,T,C or G
  misc_feature 709, 716, 723, 726, 736, 737, 739, 745, 750, 753, 759, 761,771, 773, 776, 778, 781, 784, 791, 792, 796, 805, 807, 808,809, 814, 819, 826, 831, 837, 853, 864, 865, 872, 875, 887,894, 901, 903, 904, 916, 917, 918, 919: n = A,T,C or G
gcgtaatacgactcactatagggcgaattggagctccaccgcggtggcggccgaggtacctgggagtggccttctgtgcctgccactgtgcttcccacattgcttagtcacacacataactgggaggtgctgtgttcccagtttttgtgagtgcattgagcccctagtggttctaccccttagcaataactgtccctggaacaggtgtcatcactgtagaaatgcaggttacagcccttgcagaacacagagattgggcccatgaattacacctgagctgccctccttttgttaattgatgagattgatcagatcaggaaggtggtgatgcaaaaccggatggccttagacatagtcacagctgctcaaggtggcacctgtgcccttgtagggacagagtgttgtacctgcccgggcggccgcccgggcaggtacncngttnacagaattagaaagtncgccngggtgctttggtcaaggangcgctttagtcnggcataattntcgagggatgtnnaccantgtaaaattgaattttgcnnttacctattaaaagaaaaatttcnnggggnantaatnattaattnanganacatnnnntcaannttagaanttttnattgcctacntgatttgngngagcccaatgcccttttncggntnngccttnaatntntaaaancanttnntgttntaaanggcngggnaanttcccgnatttttnaanaaaaaataanngngttttnacctnctnaaaagngnaccatttttnanctnanatngcntctccanntttnggcccctancnnntttanataancctccgntcctnttttanaatttattattatccnccccggccctnntagaaantcnttttaataaaantttatcntttaacntnnaaaagtttggannnnagcgcccccg

SEQ ID NO: 9211 - DNA, 932 bp, Homo sapiens
  misc_feature 202, 344, 356, 510, 527, 534, 536, 538, 549, 551, 569, 600,608, 611, 620, 629, 631, 669, 673, 681, 684, 688, 690, 697,700, 710, 715, 719, 725, 729, 736, 738, 740, 746, 750, 753,757, 762, 767, 777, 804, 805, 818, 823, 826, 830, 832: n = A,T,C or G
  misc_feature 842, 854, 870, 872, 875, 889, 903, 907, 909, 921, 925, 926,931: n = A,T,C or G
tgacgctatccactactatagggcgaattggagctccccgcggtggcggcccgaaggagaaatagaacagcgcaggcaaaagaagaaaggcgcgggctgggtgggaagaggattcggactcgtcacactgcagagcagcagagcgagaaaggatgagaagaggcagagaaggcgacggcagaagaaaaaaggaaaaactggncgctctagaactagtggatcccccgggctgcaggaattcgatatcaagcttatcgataccgtcgacctcgagggggggcccggtacccagcttttgttccctttagtgagggttaatttgcgcgcttggccgtaatcatggncatagctgtttnctgtgtgaaattgttatcccgctcacaattcacacaacatacgagccgggagcataaaagtgtaaagcctggggtgcctaatgagtgagctaactcacattaattgcgttgcgctcactggccgctttccagtcgggaaaccttgtcgtgccanctgtattaatgaaatcnggcaacncncngggaagaggcngntttgcttattgggcgctnttccggcttcctagctcacttgaattcgctncgcttcgntcntttcggttncgggcgagngnttattagctctacttcaaaaggccgggaaatacgggtnttcnccaagaantangggnantacttcnggnaaataaactnttgtnccanaaaggncagnaaaaagngnanggaacncctnaanaaangcccngttgnattggccgtnttttacattaggttcctcccctctggnnaattctttcaaanaattnatntttnantcaatagggngtgaaacctccncaggattttttaatantnctntcttttctccctgnaaacattcctttantctntntcttgttcacgncttnnccttnt

SEQ ID NO: 9212 - DNA, 792 bp, Homo sapiens
  misc_feature 2, 3, 6, 8, 9, 10, 11, 12, 14, 20, 637, 699, 705, 711, 715,716, 732, 734, 761, 781, 790, 791: n = A,T,C or G
gnncgntnnnnngnactcgnttccacgcgcccgcagccctatgcaggtatgcaagcctacgcttatccccaggcatctgccgtcacctcccagctgcagcccgttcggcctttgtacccagcaccgctctctcagcctccccatttccaaggatcaggtgatatggcttcatttctcatgactgaagcccggcaacataacactgaaattcgaatggcagtcagcaaagtggctgataaaatggatcatctcatgactaaggttgaagagttacagaaacatagtgctggcaattccatgcttattcctagcatgtcagttacaatggaaacaagcatgattatgagcaacatccagcgaatcattcaggaaaatgaaagattgaagcaagagatccttgaaaagagcaatcggatagaagaacagaatgacaagattagtgaactaattgaacgaaatcagaggtatgttgagcagagtaacctgatgatggagaagaggaacaactcactttagacagccacagaaaacacacaggcaagagtattgcatgctgaacaaagagaaggcccaggtgacagaggagttagcagcggccactgcacaggtcttttatctgcaggctgaaaatgactgntcaccaaaaaaaggaaacagagctgcagatgcagcttgcagaaagcctgaaggagacagatnttttanggggcngctnncaaaggcagcaaggtntnaaagcttcaagaacctttggccagccngtccaattcaaagtgaaagngaaccgaannt

SEQ ID NO: 9213 - DNA, 742 bp, Homo sapiens
  misc_feature 5, 108: n = A,T,C or G
gatangtgaccctcttaatacgactcactatagggcgaattggagctccaccgcggtggcggccgaggtacgcgggggtaactgaaaatccacaagacagaatagccngatctcagaggagcctggctaagcaaaaccctgcagaacggctgcctaatttacagcaaccatgaggccacttaaggatgcagcaagaaggagccatctgcaatccaggaagaaattccttgccaggaaccaaattggttgtcaccttcatctaggacttctagcctcgagaacttacaaatggtgatgatcatcaggtcaaggatagtctggagcaattgagatgtcactttacatgggagttatccattgatgacgatgaaatgcctgatttagaaaacagagtcttggatcagattgaattcctagacaccaaatacagtgtgggaatacacaacctactagcctatgtgaaacacctgaaaggccagaatgaggaagccctgaagagcttaaaagaagctgaaaacttaatgcaggaagaacatgacaaccaagcaaatgtgaggagtctggtgacctggggcaactttgcctggatgtattaccacatgggcagactggcagaagcccagacttacctggacaaggtggagaacatttgcaagaagctttcaaatcccttccgctatagaatggagtgtccagaaatagactgtgaggaaggatgggccttgctgaagtgtggaggaaa

SEQ ID NO: 9214 - DNA, 1177 bp, Homo sapiens
  misc_feature 1, 3, 4, 6, 16, 18, 22, 24, 26, 27, 28, 32, 33, 39, 41, 42,46, 47, 48, 49, 50, 55, 58, 62, 65, 69, 73, 74, 80, 81,85, 90, 91, 93, 98, 101, 104, 106, 107, 113, 129, 141, 142,156, 168, 328, 480, 503, 505, 509, 513, 561, 611, 618: n = A,T,C or G
  misc_feature 634, 663, 673, 702, 718, 735, 763, 780, 782, 784, 786, 793,799, 832, 836, 838, 851, 864, 871, 876, 903, 906, 921, 922,924, 926, 928, 930, 933, 936, 938, 940, 941, 951, 953, 958,959, 960, 961, 971, 976, 981, 986, 989, 992, 998, 999: n = A,T,C or G
  misc_feature 1008, 1011, 1015, 1018, 1019, 1020, 1021, 1023, 1024, 1026,1028, 1037, 1047, 1049, 1053, 1061, 1064, 1067, 1070, 1071,1077, 1083, 1085, 1086, 1090, 1091, 1094, 1096, 1099, 1107,1109, 1112, 1115, 1116, 1120, 1128, 1130, 1135, 1136: n = A,T,C or G
  misc_feature 1137, 1138, 1139, 1145, 1146, 1148, 1154, 1157, 1159, 1160,1166, 1168, 1174: n = A,T,C or G
nanntntctagtaaananctantntnnntttnntcattntnnatcnnnnnttacnagnaagnatntacnatcnntctacnnagtnttatnncnagcanagnatngnngcgtgntacgatttactattgnatttatttcganntggagctccaccgnggtggcggccgnccgggcaggtaccatgtgaaagaagtttttctatcatggatgtatcttcattatacacagcgtagtgcagagcagtcctcccaaagacatccgtaatatttggatcggcgccattttgcagcagaagagttgcacaagcctcctgcctcaattgtacctnggccgctctagaactagtggatcccccgggctgcaggaattcgatatcaagcttatcggataccgtcgacctcgagggggggcccggtacccaagcttttgttccctttagtgaggggttaattgccgccgctttggccgttaatcatggtncataagctgttttccctggtgtngnaaanttgnttatcccgctcaacaatttcccacaacaaacattaccgagcccggggnaggccaattaaaaagtgttaaaaagcccttggggggttgcccctaaaatngaaggtngaaagcctaaaacctncaccaatttaaattttggcggtttgggcngcctttcaanttggcccccggcttttttcccaaggattngggggaaaaaaccctngttccgttggccccaanccctggcaaatttaaaattggaaattcnggcccaaaacacccccngngngnaaagaangccggntttttggccgtttattttggggccgcctttttnttcngncttttccttttgngttaaatttgaanctccgcnttgcnccttccgggtatcgttttccggctttntcnggccaaaacccggtnntncnancnttntancntnnaaaaaggccngntaaannnnaccgggtttnttccnccaanaaatnaanggnggggannaccccccanganaaanaannnntnntngnacccaaaanggccctaacnanaaangggccctnaanccnttnnaaaaanggcccncnntttnnttngnctntatttacnanaanggnntccncccccccntnggacnnnnnttttannanaaaaanttngnncctttnanttcaanggg

SEQ ID NO: 9215 - DNA, 449 bp, Homo sapiens
  misc_feature 2, 3, 4, 8, 9, 399, 418: n = A,T,C or G
gnnnaggnnattgatcgctactatagggcgaattgggccctctagatgcatgctcgagcggccgccagtgtgatggatatctgcagaattcgccctttcgagcggccgcccgggcaggtacgcgggacggcaggcgtccgcgtcgctagctagtcgttctgaagcggcggccagagaagagtcaagggcacgagcatcggccatgcctttcttggacatccagaaaaggttcggccttaacatagatcgatggttgacaatccagagtggtgaacagccctacaagatggctggtcgatgccatgcttttgaaaaagaatggatagaatgtgcacatggaatcggttatactcgggcagagaaagagtgcaagataggaatatgaccgattttcgtagnagtgtttgctttcggcagnaaaaccgatgaagacgtggcagggtaccctc

SEQ ID NO: 9216 - DNA, 905 bp, Homo sapiens
  misc_feature 502, 529, 566, 570, 603, 605, 626, 640, 675, 677, 698, 700,715, 718, 744, 762, 767, 778, 790, 806, 807, 823, 881, 889,891, 896, 902: n = A,T,C or G
gtaatacgactcactatagggcgaattggagctccaccgcggtggcggccgcccgggcaggtacgcggggaagtatggccaagtccccatgtgtgacgccggtgagcagtgtgcagtgaggaaaggggcaaggatcgggaagctgtgtgactgtccccgaggaacctcctgcaattcctgcctcctgaagtgcttatgaaggggcgtccattctcctccatacatccccatccctctactttccccagaggaccacaccttcctccctggagtttggcttaagcaacagataaagtttttattttcctctgaagggaaagggctcttttcctgctgtttcaaaaataaaagaacacattagatgttactgtgtgaagaataatgccttgtatggtgttgataccgtgtgtgaagtattcttattttatttgtctgacaaactcttgtgtacctcggccgctctagaactagtggatcccccgggctgcaggaattcgatatnaagcttatcgataccgtcgacctcganggggggccccggtcccaagcttttggttccctttaantgangggttaattgcgcgccttggccgtaaatcaatngnccataagcttgttttccctgnggtgaaaattgttnttccgcttcacaaattttccacaacaacaattccnancccggggagccattaaaagtntnaaaagccctgggggntgncctaattgaaggtgaacctaactcanaatttaatttggcgtttncgctnacttggcccgntttttcaaatcngggaaaaaccttttcnngcccaacttgcatttnaattaaattcgggccaaacccccccggggaaaaaggccgtttttgcgtttttggggcncttttttncnctttnctttanttt

SEQ ID NO: 9217 - DNA, 592 bp, Homo sapiens
  misc_feature 10, 11, 12, 38, 50, 584, 587, 589: n = A,T,C or G
cccccctcgnnntacttctagaattaattaacgcgggnactgcgataggnaatcatgtctggtcgcggcaaaggcggaaaaggcttggggaagggtggtgctaagcgccatcgtaaggtgctccgggataacatccagggcattacaaaaccggctattcgccgtttggctcggcgcggtggcgtcaagcgcatttccggtcttatctatgaggagactcgaggtgtgcttaaggttttcttagagaacgttattcgagacgccgtcacctatacggagcacgccaagcgcaaaactgtcacagccatggatgtagtatatgccctgaaacgtcaggggcgcactctgtatggcttcggcggctgaatctaagaatacgcggtctcctgagaacttcaaaaaacaaaaaaaaaaaaaaaaaagcggccgccaccgcggtggagctccaattcgccctatagtgagtcgtattacgcgcgctcactggccgtcgttttacaacgtcgtgactgggaaaaccctggcgttacccaacttaatcgccttgcagcacatccccctttcgccagctggcgtaatagccnaanangcc

SEQ ID NO: 9218 - DNA, 539 bp, Homo sapiens
  misc_feature 2, 3, 4, 5, 6, 20, 38, 453, 539: n = A,T,C or G
gnnnnnttaaaacgttaacnactactatagggcgaatngggccctctagatgcatgctcgagcggccgccagtgtgatggatatctgcagaattcgcccttagcgtggtcgcggccgaggtacgcgggagcagggaaccgctcagatacccttccacaccgtggaaactttgttcttaccctcttgacgaaaaatcttgctgctgctcactctttgggtccacaccacctttaagagctacaacgatcaccacgacagtctgcggcttcattcttgaagtcagcgacaccacaaacccaccagaagggagaaactccagacacatctgaaggaacaaactccagacacaacatctttaacagctgtaacacacactgtgaaggtccacggcttcattcttgaagccagcgagaccacgaaccctctggaaggaaccaactctggacacagcangacgtgagacttctacctgctcactcagaatcatttccgcaccaaccatggccacgtttgtggagctcagtacctgcccgggcggn

SEQ ID NO: 9219 - DNA, 610 bp, Homo sapiens
  misc_feature 24, 25, 35: n = A,T,C or G
tatagggcgaattgggccctctgnngcatgctcgngcggccgccagtgtgatggatatctgcagaattcgcccttagcgtggtcgcggccgaggtacattctctaaagtcacctgtcaataacacactaggcctgcctcctgcctgctataaatatcctcaacaggttataaacagcagcaggctacccgtgttcattgcaagtaaattactcatcatttgtaggttaaaagcataggcccgacttcttaaataaacatagggaatttgctgcagcagcaggccagaaaccactgtttcaaatctgcaagattttcctatcaggtgggaagacagagataagaaatatggtaaggcctgaaaaattgcaaaagtagaagcaagtcaggtttgctgatctaagagctaagtttgatcccaaatgcactgaagaagttagaggagcttaaagaagtctcaggaagcattttttaaaatgtgaaaacatcaggctcactatagcttccaaagaacaacataaacgagcatcagcagtcatacaatgacagtatcagaaatggcactcaagtgcatccccccagtacctgcccgggcggccgctcgaaagggcg

SEQ ID NO: 9220 - DNA, 538 bp, Homo sapiens
  misc_feature 2, 3, 4, 5, 8, 10, 14, 401, 439: n = A,T,C or G
gnnnnttngnaacnctactatagggcgaattgggccctctagatgcatgctcgagcggccgccagtgtgatggatatctgcagaattcgcccttagcgtggtcgcggccgaggtactgagctccacaaacgtggccatggttggtgcggaaatgattctgagtgagcaggtagaagtctcacgtcctgctgtgtccagagttggttccttccagagggttcgtggtctcgctggcttcaagaatgaagccgtggaccttcacagtgtgtgttacagctgttaaagatgttgtgtctggagtttgttccttcagatgtgtctggagtttctcccttctggtgggtttgtggtgtcgctgacttcaagaatgaagccgcagactgtcgtggtgatcgttgtanctcttaaaggtggtgtggacccaaagagtgagcagcancaagatttttcgtcaagagggtaagaacaaagtttccacggtgtggaagggtatctgagcggttccctgctccccgcgtacctgcccgggcggccgctt

SEQ ID NO: 9221 - DNA, 539 bp, Homo sapiens
  misc_feature 2, 3, 4, 5, 6, 7, 8, 9, 10, 12, 13, 29, 37: n = A,T,C or G
gnnnnnnnnnannaatacaactactatanggcgaatngggccctctagatgcatgctcgagcggccgccagtgtgatggatatctgcagaattcgcccttcgagcggccgcccgggcaggtactgagctccacaaacgtggccatggttggtgcggaaatgattctgagtgagcaggtagaagtctcacgtcctgctgtgtccagagttggttccttccagagggttcgtggtctcgctggcttcaagaatgaagccgtggaccttcacagtgtgtgttacagctgttaaagatgttgtgtctggagtttgttccttcagatgtgtctggagtttctcccttctggtgggtttgtggtgtcgctgacttcaagaatgaagcccgcagactgtcgtggtgatcgttgtagctcttaaaggtggtgtggacccaaagagtgagcagcagcaagatttttcgtcaagagggtaagaacaaagtttccacggtgtggaagggtatctgagcggttccctgctccccgcgtacctcggccgcga

SEQ ID NO: 9222 - DNA, 403 bp, Homo sapiens
  misc_feature 10: n = A,T,C or G
actactatanggcgaattgggccctctagatgcatgctcgagcggccgccagtgtgatggatatctgcagaattcgcccttagcgtggtcgcggccgaggtactactgtgtgttgactcttgtaaatcctcccagtgaagagtcatcaaacctgggagtggtcttggggccctgacataccacttcatggagctggtgatggaaatttgctgatgttgttggccacccgaatgagcatgcgagcccctttcatgtgatctccatttttaacatgaatctttactagtatatagctgtgcagaatcatgaggttggtggccatctcggagggaattttgatcttctgggatttcagttctgcatacatactgaagagaacatcgtgtgcattccggtagttgcc

SEQ ID NO: 9223 - DNA, 863 bp, Homo sapiens
  misc_feature 3, 521, 658, 673, 715, 754, 783, 784, 785, 786, 787, 788,789, 790, 791, 792, 793, 794, 795, 796, 797, 798, 799, 800,801, 802, 808, 809, 814, 816, 817, 820, 821, 854, 856, 862: n = A,T,C or G
agnatcactacttagggcgaattgggccctctagatgcatgctcgagcggccgccagtgtgatggatatctgcagaattcgcccttagcgtggtcgcggccgaggtacaaggcatgatgagtccttttgcttttaggcttttgacttctggttttagactttctttagcttctgttgttagacaacattgtgcaagcttggtttttataagtttgcatggattaaactgaacttaatgaaattgtccctccccccaaattctcagcacaatttttaggcccacaaggagtcaagcacctcaaggagatcttcagtttgaacttggtgtagacacagggatactgatgaatcaatattcaaattagctgttacctacttaagaaagagaggagaccttggggatttcgaggaagggttcgtaagggagattttagctgagaaataccatttgcacagtcaatcacttctgaccaagttatcagaaaaaggaggaaagaatgtctccccactaaatgttctanggtggtgagaaatctaaggtgggtatctaaatcaacaatatttagatattccaatatctaaatattgttggaaatctctcctgaagtgttcattgactctaaaagagacagcttgtgtatcaatggcaggggttaanggtcattttttattnccatattaatcctttaatatttaaacaaatttccttctgagnttaaggataaaaatgggatgggttctgcctgggcctggncctatggggacatcaaaggcaatgtgccnnnnnnnnnnnnnnnnnnnnaaatcnnccctncnnttnnttggggggaccccccctaattaattcctccccntncccccnt

SEQ ID NO: 9224 - DNA, 830 bp, Homo sapiens
  misc_feature 1, 2, 107, 580, 688, 696, 755, 793, 816, 829: n = A,T,C or G
nnactcactatagggcgaattgggccctctagatgcatgctcgagcggccgccagtgtgatggatatctgcagaattcgccctttcgagcggccgcccgggcaggtncagttaacaagaggataactttttttattatctctgcccttctccctcaggaagcagagaattatcagattggtgagagaaaggaaataaaggtctgaacatgtgtctcaagtcacctcttttgggagcactctgttctcagtttattttaattctgtttctcaatttaatgagtttactagagcagggtccactattaccctgtggagatccttaatggtacatggatatgtttaattctgggaataaagtagttaaactggctagtgattatgccacattgttagagtcatctttgtcaataagaaagttgttcatatttatgacatctgtatccatttcttcagaagtgtgactattattcatatatccccaatacacacaaaatatatagttttaactaaatttttaatctgttacatatttttctaggttactagctagagacatcctggttgtttccaatttgttgnaaactggaaatttgatgctaaacaagtagtgttatgacaagccttcttattcataacttgacatgcttttgccagtatattttagatgaaaatttttgagattatggnggaagtcnaatcatatgaacactttaaatttgctcccgttttaccatattcctgtgcaaaagtggcncaatttacaatgccatattggtttaacgggttcatggnacctcggccgcgccccccctaanggcgaattccacnt

SEQ ID NO: 9225 - DNA, 501 bp, Homo sapiens
  misc_feature 137, 152, 439, 453, 461, 470, 497, 501: n = A,T,C or G
gccctatcatactttggccgaattggagctccccgcggtggcggccgaggtacaaaagttaagctccatttaccactcacttgacagtgtcctttaaatctgaacttgctcttgctcatgcggagcttggctaaganaaaccagatcattantgcaagctgtaggtgggtgggtgagtgtgtcccctcccacactgctctctggtgggtttgggcagtccctggctctagtctctgctgcagattctcaggaccaaaatgtgggtgatttgtctgggtccaggcaggagacagaaatcacacaagctcttttattagagataatataaagaatgattaaccaggtgacagtaaagggcaggaagggaatacaaaggtatccatggaggtagcaccacaggaagcaggcatcacacttgaggcttgggaacaaggggaanatgctggactcatngaaaggtngttgcttgnaaaaagggacatgggggctgaatcttnaaan

SEQ ID NO: 9226 - DNA, 902 bp, Homo sapiens
  misc_feature 598, 714, 745, 808, 821, 859, 864, 874, 876, 899: n = A,T,C or G
agcttgtatcgactcactatagggcgaattgggccctctagatgcatgctcgagcggccgccagtgtgatggatatctgcagaattcgccctttcgagcggccgcccgggcaggtacgcatttcattgtagttcctaggttagggtcaaggtcatgaggtggaccaagcagctagctccaaactgcctccctgttgccgtggttccaatccctgctcaccttgcacaggttgcagggttcccatgacaccctctgccttctctagacacacctgcatcctacccactcaggcaaagaaagtcctctgctccaaattcatgatacgggaggcagcatggtggatagaaaatgcatgggctttgggttcagacagatttggcttccaaattctggttctagcttttgggaaactgatccagctattcaaactttctgagcctcaattatctgcaaaattgggataataacactgatgactttttaaaagtaataatgagagattgctttacatccattgaactgtcaaaaatcaagaaagaacaaaaataacaggttgctgatagaaatatgaattgctatagcctattgggaaagcaanttggcaacatctattaaaaacacatactgctgaaagcagaactcacatttctggaatctttcccataccaataaaagcattagcatattaaggatatgtgtgcaaaagatgtctanttgcaacataatctattgccggcaaatagantgggaaaaaaaagtgctttgtttatcatagggagaaaggggtgaataaaatattggtaccttnggccgggaacacncttaaggcgaattcagcaccctggcggccgtactaagnggatnccaactcggnancaaacttggctaatcatgggcanaag

SEQ ID NO: 9227 - DNA, 843 bp, Homo sapiens
  misc_feature 720, 787, 799, 818, 830: n = A,T,C or G
atgatcgactactatagggcgaattgggccctctagatgcatgctcgagcggccgccagtgtgatggatatctgcagaattcgcccttagcgtggtcgcggccgaggtactgtgaatgcaaagattctgaaactaaataaaaagaaagatagtaaaagactaatgtgccataaaggctaagggaaaataaaaacccatatattaattttcccggccatcttaattttcagacccttccaagtaagtccaacgaaagccatgaccacatggatgatatggatgatgaagatgatgacgaccatgtggacagccaggactccattgactcgaacgactctgatgatgtagatgacactgatgattctcaccagtctgatgagtctcaccattctgatgaatctgatgaactggtcactgattttcccacggacctgccagcaaccgaagttttcactccagttgtccccacagtagacacatatgatggccgaggtgatagtgtggtttatggactgaggtcaaaatctaagaagtttcgcagacctgacatccagtacctgcccgggcggccgctcgaaagggcgaattccagcacactggcggccgttactagtggatccgagctcggtaccaagcttggcgtaatcatggtcatagctgtttcctgtgtgaaattggtatccgctcacaattccacacaacatacgagccggaagcatnaagtgtaaagcctggggtgcctaatgagtggagctactcacattaattgcgttgcgctcctggccgntttcagtcgggnaacctgtcggccacttgcntaatgaatcggnccacgcccggggg

SEQ ID NO: 9228 - DNA, 871 bp, Homo sapiens
  misc_feature 4, 801, 831, 852: n = A,T,C or G
gagngatacgactactatagggcgaattgggccctctagatgcatgctcgagcggccgccagtgtgatggatatctgcagaattcgcccttagcgtggtcgcggccgaggtacatcagtgatcacactgttatttcccaaacgacccttcagctggatacgacatttcctgattgcagctgtgcttattgcgcttaataatgttctggtcatccttgtgccaactataaaatacatcttcggattcataggggcttcttctgccactatgctgatttttattcttccagcagttttttatcttaaacttgtcaagaaagaaacttttaggtcaccccaaaaggtcggggctttaattttccttgtggttggaatattcttcatgattggaagcatggcactcattataattgactggatttatgatcctccaaattccaagcatcactaacacaaggaaaaatactttctttttctattggaaatggttacaagttatactccaaaagatatttgaattatcttgattggaatgttattcataggaaataacaggaagattccaaagacgtttaccagtaatatcaccaggcacctgcagaagaggaaaatcactgtttttgtcaaggatggttgtgtatgtgtttaaaataaaacctgtggtgcacattctacccaggttttgctagaacagtgtgagaatgatgaaggtgtatttttgctgctttaccagccagaatagggtaactgctgtaacaatcatcaatagtacctgcccgggcggccgtcgaaaggcgaaatncagcccactggccggccgtactagtggatncgacccggaccaacctggcgnaacatggccaaactggtcc

SEQ ID NO: 9229 - DNA, 486 bp, Homo sapiens
  misc_feature 11, 19, 21, 23, 25, 31, 33, 54, 382, 484: n = A,T,C or G
ccgcgataacnacttactnangncngattgnanctccccgcggtggcggccgangtactgagctccacaaacgtggccatggttggtgcggaaatgattctgagtgagcaggtagaagtctcacgtcctgctgtgtccagagttggttccttccagagggttcgtggtctcgctggcttcaagaatgaagccgtggaccttcacagtgtgtgttacagctgttaaagatgttgtgtctggagtttgttccttcagatgtgtctggagtttctcccttctggtgggtttgtggtgtcgctgacttcaagaatgaagccgcagactgtcgtggtgatcgttgtagctcttaaaggtggtgtggaccccaaagagtgagcagcancaagatttttcgtcaagagggtaagaacaaagtttccacggtgtggaagggtatctgagcggttccctgctccccgcgtacctgcccgggcggccgctctanaa

SEQ ID NO: 9230 - DNA, 952 bp, Homo sapiens
  misc_feature 337, 364, 374, 377, 379, 380, 386, 390, 391, 395, 397, 399,401, 403, 411, 415, 443, 445, 450, 457, 466, 469, 477, 479,484, 487, 488, 501, 510, 520, 521, 523, 528, 547, 553, 555,558, 564, 581, 586, 593, 599, 602, 612, 616, 619, 622: n = A,T,C or G
  misc_feature 624, 639, 644, 653, 657, 659, 663, 672, 676, 680, 684, 687,690, 692, 696, 705, 716, 717, 723, 724, 726, 729, 732, 735,737, 740, 745, 761, 763, 774, 775, 776, 777, 779, 782, 786,791, 794, 797, 800, 801, 806, 809, 812, 814, 816, 827: n = A,T,C or G
  misc_feature 831, 834, 835, 838, 844, 852, 854, 872, 877, 878, 879, 882,884, 887, 888, 897, 899, 900, 904, 908, 910, 915, 920, 923,924, 925, 926, 929, 934, 940, 942: n = A,T,C or G
tatagggcgaattggagctccacccgcggtggcggccgcccgggcaggtactgagctccacaaacgtggccatggttggtgcggaaatgattctgagtgagcaggtagaagtctcacgtcctgctgtgtccagagttggttccttccagagggttcgtggtctcgctggcttcaagaatgaagccgtggaccttcacagtgtgtgttacagctgttaaagatgttgtgtctggagtttgttccttcagatgtgtctggagtttctcccttctggtgggtttgtggtgtcgctgacttcaagaatgaagccccagactgtcgtggtgatccgttgtanctcttaaaggtggtgtggacccaaagnagtgagccancancnngaattnttcnncaanangntnangaacaaantttncacggtgtgggaagggtatctgaacggntncctgntccccangtacccttnggncgcttttnanaaacntanngggattccccccngtgcttccnggaaatttcnnanttatnaaaagctttaattcgaatnacccgncnggncccttntaatggggggggccccnggttnccccaancttttngtntcccttttangganganggngnttaaaatggcatccnctttnggccctaanttcnangggntcaataatntttntttnctcngtngananaaanatatttttncctctctcacnntttccnncnccnaanatnanctnactcnggggattctaaaaatngntaaaaacctcnnnngntgncccnatagnganatnatnnttatnccncantntnatttggctttngtcnttnnctngatccnttttttcntncccccccaaattttttangattnnntantnttnnaaaaataantnncccncccnanaattngatgnatnnnnttntattnttaatncntgtttatttt

SEQ ID NO: 9231 - DNA, 431 bp, Homo sapiens
  misc_feature 431: n = A,T,C or G
ggcgaattgggccctctagatgcatgctcgagcggccgccagtgtgatggatatctgcagaattcgccctttcgagcggccgcccgggcaggtacaaaagccaagatgcccattgtgggcctgggcacttggaggtctcttctcggcaaagtgaaagaagcggtgaaggtggccattgatgcagaatatcgccacattgactgtgcctatttctatgagaatcaacatgaggtgggagaagccatccaagagaagatccaagagaaggctgtgatgcgggaggacctgttcatcgtcagcaaggtgttggcccactttctttgagagaccccttgtgaggaaagcctttgagaagaccctcaaggacctgaagctgagctatctggacgtctatcttatttcactggccacaggggattcaaagactgggn

SEQ ID NO: 9232 - DNA, 640 bp, Homo sapiens
ttgaatacgactcactatagggcgaattgggccctctagatgcatgctcgagcggccgccagtgtgatggatatctgcagaattcgcccttagcgtggtcgcggccgaggtacgcggggagcagggaaccgctcagatacccttccacaccgtggaaactttgttcttatcctcttgacgaaaaatcttgctgctgctcactctttgggtccacaccacctttaagagctacaacgatcaccacgacagtctgcggcttcattcttgaagtcagcgacaccacaaacccaccagaagggagaaactccagacacatctgaaggaacaaactccagacacaacatctttaacagctgtaacacacactgtgaaggtccacggcttcattcttgaagccagcgagaccacgaaccctctggaaggaaccaactctggacacagcaggacgtgagacttctacctgctcactcagaatcatttccgcaccaaccatggccacgtttgtggagctcagtacctgcccgggcggccgctcgaaagggcgaattccagcacactggcggccgttactagtggatccgagctcggtaccaagcttggcgtaatcatggtcatagctggttccttgtgtgaaattggt

SEQ ID NO: 9233 - DNA, 895 bp, Homo sapiens
  misc_feature 4, 13, 15, 24, 33, 35, 517, 530, 539, 555, 571, 581, 590,591, 599, 603, 613, 622, 623, 625, 630, 634, 635, 637, 639,640, 641, 644, 659, 668, 669, 681, 705, 729, 730, 744, 746,749, 757, 758, 786, 789, 793, 795, 797, 798, 808, 810: n = A,T,C or G
  misc_feature 820, 822, 827, 828, 835, 855, 859, 860, 877, 881, 882, 883,884, 885, 888, 890: n = A,T,C or G
atangatactatngngtcactatngggcgaatngngccctctagatgcatgctcgagcggcccgccagtgtgatggatatctgcagaattcgcccttagcgtggtcgcggccgaggtactgagctccacaaacgtggccatggttggtgcggaaatgattctgagtgagcaggtagaagtctcacgtcctgctgtgtccagagttggttccttccagagggttcgtggtctcgctggcttcaagaatgaagccgtggaccttcacagtgtgtgttacagctgttaaagatgttgtgtctggagtttgttccttcagatgtgtctggagtttctcccttctggtgggtttgtggtgtcgctgacttcaagaatgaagccgcatactgtcgtggtgatcgttgtagttcttaaaggtggtgtggacccaaagagtgagcagcagcaagatttttcgtcaagagggtaaagaacaaagtttccacggtgtggaaagggtatctgagcggttccctgcctncccgcgtacctgnccgggcggncgctccaaagggcganttccatcacactggcngccgttactngggggattnnaactcggnaacnagcttggcgntaatcattnntnataanttgnnancnnnganaaattggtatcccgntcacaattnncacaacatactnaccggaaacattaaagtggaaagnctggggggcctaatgagtgaactnnctcacattaattgntntgncctcactnncgcctttcaatgggggaaaccctggggntcncgcntncnntatgaaaagncnaaccccgggnanagccnnacatttnggccgcttttccaatttctnatcnntgattgctagctgggcnttcnnnnnttngngcggt

SEQ ID NO: 9234 - DNA, 894 bp, Homo sapiens
  misc_feature 525, 527, 563, 663, 697, 713, 746, 755, 780, 781, 812, 816,823, 838, 840, 841, 849, 851, 854, 861, 865, 869, 871, 872,880, 885, 886: n = A,T,C or G
actcactatagggcgaattggagctccaccgcggtggcggccgaggtacttactggtgtggaaaatagcctgcaggtaggaccattgcagtgatgggcagatgcgtctttcacacggaatcaggcacagtggccttctgtgacatgtgtttataaaaaatggttaagtatataataaattgaacatctttgagattggagaattatgtgagatttccacattatgtttactgggttcaatactgtccttgcttgttttattgcaggcaagcaaggcaaatggcctaaaatgctgtggcttatattttgataagaaatcaaaaaaccattggttaaaagatgcaactcagaagtctggaagtattctgaaagcatccatttaccgtccagttgacaggtttgagtctcctgcttgtataggtgacttgtgcccatgggtacctgcccgggcggcccgctctagaactagtggatcccccgggctgcaggaattcgatatcaaagcttatcgataccgtcgacctcnangggggggccccggtacccagcttttgttccctttanttgagggttaatttgcgcgcttggcgtaatcatggtcatagcttgttttcctgtgtggaaattggtatcccgctcaccaattccacacaaacaatacganccggggagccataaagttgtaaagccctgggggntgccttatgaggtgancctaactccacaattaatttgcgttgcgcctcnctggccccntttccaattcggggaaaacttgtcnngccaacctggaattaaatgaatccggcccancccnccggggnagaaggcggttttgngnnattggggngnctntttccgntttncttngnntaaaatgnaattnnttggcccc

SEQ ID NO: 9235 - DNA, 818 bp, Homo sapiens
  misc_feature 596, 608, 622, 638, 745, 761, 775, 791, 796, 809: n = A,T,C or G
tagggcgaattgggccctctagatgcatgctcgagcggccgccagtgtgatggatatctgcagaattcgccctttcgagcggccgcccgggcaggtacgcggggagcagggaaccgctcagatacctttccacaccgtggaaactttgttcttaccctcttgacgaaaaatcttgctgctgctcactctttgggtccacaccacctttaagagctacaacgatcaccacgacagtctgcggcttcattcttgaagtcagcgacaccacaaacccaccagaagggagaaactccagacacatctgaaggaacaaactccagacacaacatctttaacagctgtaacacacactgtgaaggtccacggcttcattcttgaagccagcgagaccacgaaccctctggaaggaaccaactctggacacagcaggacgtgagacttctacctgctcactcagaatcatttccgcaccaaccatggccacgtttgtggagctcagtacctcggccgcgaccacgctaagggcgaattccagcacactggcggccgttactagtggatccgagctcggtaccaagcttggcggtaatcatggncatagctgtttnctgggggaaattgntattcgctcacaattncacacaacatacgagcccggaagcataaagggtaaagcctggggtgctaatgagtgagctaactcacattaattgcgttgggctcactggccggttttcaagcgggnaacctggcgggccacntgcttaattgaatngccaacccccgggggnaaggnggtttggggtttnggggccttt

SEQ ID NO: 9236 - DNA, 392 bp, Homo sapiens
  misc_feature 334: n = A,T,C or G
agcgcgcgtaatacgactcactatagggcgaattggagctccaccgcggtggcggccgggggcagctggaggtgcctcagaaggtgcattctgcttcctgcaggggcttgaaacaccaaggcactccagggatcctggagtcaaagcagcagccccggttgttgcactccttgggggtgacatgggggtagccgcagtccaccctgtccttggctggcacggcacactggtttgcagacaggcccacgtacctgcccgggcggccgctctagaactagtggatcccccgggctgcaggaattcgatatcaagcttatcgataccgtcgacctcnagggggggcccggtacccagcttttgttccctttagtgagggttaattgcgcgcttgg

SEQ ID NO: 9237 - DNA, 635 bp, Homo sapiens
gaattggagctccaccgcggtggcggccggccatgctctcctcctctgccagtctcctccaccactctctaacctgagagcctgtggaacctgcccgtctcccctcctccatcagacacacctgcctaggaaacaggaaaggacctcggaagtcttctaaggagagtcatggcgtattaccaggagccttcagtggagacctccatcatcaagttcaaagaccaggactttaccaccttgcgggatcactgcctgagcatgggccggacgtttaaggatgagacattccctgcagcagattcttccataggccagaagctgctccaggaaaaacgcctctccaatgtgatatggaagcggccacaggatctaccagggggtcctcctcacttcatcctggatgatataagcagatttgacatccaacaaggaggcgcagctgactgctggttcctggcagcactgggatccttgactcagaacccacagtacctcggccgctctagaactagtggatcccccgggctgcaggaattcgatatcaagcttatcgataccgtcgacctcgagggggggcccggtcccaacttttgttccctttaatgagggttaattggcgcgcttggcgtaatcat

SEQ ID NO: 9238 - DNA, 862 bp, Homo sapiens
  misc_feature 2, 635, 689, 737, 738, 776, 789, 799, 813, 847, 855, 861: n = A,T,C or G
tntaggtatacgactactatagggcgaattgggccctctagatgcatgctcgagcggccgccagtgtgatggatatctgcagaattcgcccttagcgtggtcgcggccgaggtacgcggggagcagggaaccgctcagatacccttccacaccgtggaaactttgttcttaccctcttgacgaaaaatcttgctgctgctcactctttgggtccacaccacctttaagagctacaacgatcaccacgacagtctgcggcttcattcttgaagtcagcgacaccacaaacccaccagaagggagaaactccagacacatctgaaggaacaaactccagacacaacatctttaacagctgtaacacacactgtgaaggtccacggcttcattcttgaagccagcgagaccacgaaccctctggaaggaaccaactctggacacagcaggacgtgagacttctacctgctcactcagaatcatttccgcaccaaccatggccacgtttgtggagctcagtacctgcccgggcggccgctcgaagggcgaattccagcacactggcggccgttactagtggatccgagctcggtccaagcttggcgtaatcatggtcatagctgtttcctgtgtgaaantggtatccgcttcacaatttcacacaacatacgagccggaagcataaaagtgtnaagcccggggtgccttatgagtgactaactcacattaaattgcgttgnnctcactggccccttttccagttcgggaaacctgtccgngccagctgcattnatgaatcggncaacgcgcgggggngaggcgggttggcgttttgggcgctcttccgttncttggttnactgant

SEQ ID NO: 9239 - DNA, 515 bp, Homo sapiens
  misc_feature 2, 3, 4, 5, 6, 7, 10, 11, 17, 33, 469, 470, 471, 472, 473,474, 475, 476, 477, 478, 479, 480, 481, 482, 483, 484, 485,486, 487, 488, 489, 490, 491, 492, 493, 494, 495, 496, 497,498, 499, 500, 501, 502, 503, 504, 505, 506, 507, 508: n = A,T,C or G
  misc_feature 509, 510, 511, 512, 513, 514: n = A,T,C or G
gnnnnnnaanngtatanctatactgaaccgatnactactactgagggcgaattggagctccaccgcggtggcggccgcccgggcaggtaccacaccttccggccagctgtcctcctgctgatgttcctcagtgtctacaaggcctttgttatggagaccttcgtccacctctgctcgctgggcagttgggcagctctactggcccgagcagtggtaacggggctgctggccctcagcactttggccctgtatgtcgccgttgtcaatgtgcactcctaggcttggtgtctcaggcattgatgtacctcggccgctctagaactagtggatcccccgggctgcaggaattcgatatcaagcttatcgataccgtcgacctcgagggggggcccggtacccagcttttgttccctttagtgagggttaattgcgcgcttggcgtaatcatggtcatagctgtttcctggannnnnnnnnnnnnnnnnnnnnnnnnnnnnnnnnnnnnnnnnnnnnnc

SEQ ID NO: 9240 - DNA, 840 bp, Homo sapiens
  misc_feature 673, 703: n = A,T,C or G
cactatagggcgaattggagctccaccgcggtggcggccgaggtacaaaagccaagatgcccattgtgggcctgggcacttggaggtctcttctcggcaaagtgaaagaagcggtgaaggtggccattgatgcagaatatcgccacattgactgtgcctatttctatgagaatcaacatgaggtgggagaagccatccaagagaagatccaagagaaggctgtgatgcgggaggacctgttcatcgtcagcaaggtgtggcccactttctttgagagaccccttgtgaggaaagcctttgagaagaccctcaaggacctgaagctgagctatctggacgtctatcttattcactggccacagggattcaagactggggatgactttttccccaaagatgataaaggtaatatgatcagtggaaaaggaacgttcttggatgcctgggaggccatggaggagctggtggacgaggggctggtgaaagcccttggggtctcaaatttcaaccacttccagatcgagaggctcttgaacaaacctggactgaaatataaaccagtgactaaccaggttgagtgtcacccataccttacgccaggagaaactgatccagtactgccactccaagggcatcacccgttacggcctacagccccctgggctctccgganagaccttgggccaaacctgaggaccccttnccttgcttggaggatccccaaagattaaaggagaattgcttgcaaaagccacaaaaaaaaaccccagcccaaggttctgatccggttttccttatcccagaaggaatgttgacaggtgatcccccagttcttatgat

SEQ ID NO: 9241 - DNA, 825 bp, Homo sapiens
  misc_feature 2, 3, 4, 5, 6, 7, 10, 12, 13, 14, 19, 25, 28, 29, 602, 614,687, 699, 703, 711, 738, 739, 742, 743, 745, 746, 747, 748,749, 750, 751, 752, 753, 754, 755, 758, 759, 760, 761, 762,763, 764, 765, 766, 767, 768, 769, 770, 771, 772, 773: n = A,T,C or G
  misc_feature 774, 775, 776, 777, 778, 779, 780, 781, 782, 783, 784, 785,786, 787, 788, 789, 790, 791, 792, 793, 794, 795, 796, 797,798, 799, 800, 801, 802, 803, 804, 805, 806, 807, 808, 809,810, 811, 812, 813, 814, 815, 816, 817, 818, 819, 820: n = A,T,C or G
  misc_feature 821, 822, 823, 824: n = A,T,C or G
gnnnnnnttnannnccttngtatanctnnttcctgtagggcgaattggagctccaccgcggtggcggccgcccgggcaggtacctgaaaaacagctggtaggatggaggaactgagcttttaaataggcaaatgtggctaggagctaccatactggacagcacagtgtattagtttggtgcaaaagtaattgtggttttggccatttttaagtggattggtaagcctggctatttaaagtgtggtccacagagcaggagaatcactgcacctgagagctggtggaaatgtagatctctgacgttagcataggcttcctaaatcagaaactgcattctaacaagatctcctggtgcttctcatgcacagtaaagtttagaaagttaggagatgcatacaagtggttctcatcctgacagcacttcagacacaactgagaaacattaaaagaagctgagcctaggtcacaccctccacccagagattcttaggttaatggtttaaaggcttggcctgaacatgaagagttttaaaagcactctgggggattctaataaaaattcgagaaccatcccagcataagtcagtcctcggccgctctanaactagtggatnccccggctgcaggaattcgatatcaagcttatcgatccgtcgacctcgaggggggcccggtcccactttgttncctttaatgganggtnattgcccncttggcgtaatcatggtcatacttggnnttnngnnnnnnnnnnnagnnnnnnnnnnnnnnnnnnnnnnnnnnnnnnnnnnnnnnnnnnnnnnnnnnnnnnnnnnnnnnnnnnng

SEQ ID NO: 9242 - DNA, 933 bp, Homo sapiens
  misc_feature 8, 10, 11, 64, 245, 246, 248, 249, 255, 256, 257, 260, 263,272, 275, 276, 282, 283, 285, 286, 287, 290, 291, 294, 297,299, 300, 301, 305, 306, 310, 311, 312, 313, 315, 322, 326,336, 339, 340, 341, 347, 348, 353, 354, 355, 359, 362: n = A,T,C or G
  misc_feature 365, 366, 367, 375, 382, 384, 395, 397, 404, 409, 411, 416,417, 418, 419, 420, 421, 422, 423, 424, 425, 426, 427, 428,429, 430, 431, 432, 433, 434, 435, 436, 437, 438, 439, 440,441, 442, 443, 444, 445, 446, 447, 448, 449, 450, 451: n = A,T,C or G
  misc_feature 452, 453, 454, 455, 456, 457, 458, 459, 460, 461, 462, 463,464, 465, 466, 467, 468, 469, 470, 471, 472, 473, 474, 475,476, 477, 478, 479, 480, 481, 482, 483, 484, 485, 486, 487,488, 489, 490, 491, 492, 493, 494, 495, 496, 497, 498: n = A,T,C or G
  misc_feature 499, 500, 501, 502, 503, 504, 505, 506, 507, 508, 509, 510,511, 512, 513, 514, 515, 516, 517, 518, 519, 520, 521, 522,523, 524, 525, 526, 527, 528, 529, 530, 531, 532, 533, 534,535, 536, 537, 538, 539, 540, 541, 542, 543, 544, 545: n = A,T,C or G
  misc_feature 546, 547, 548, 549, 550, 551, 552, 553, 554, 555, 556, 557,558, 559, 560, 561, 562, 563, 564, 565, 566, 567, 568, 569,570, 571, 572, 573, 574, 575, 576, 577, 578, 579, 580, 581,582, 583, 584, 585, 586, 587, 588, 589, 590, 591, 592: n = A,T,C or G
  misc_feature 593, 594, 595, 596, 597, 598, 599, 600, 601, 602, 603, 604,605, 606, 607, 608, 609, 610, 611, 612, 613, 614, 615, 616,617, 618, 619, 620, 621, 622, 623, 624, 625, 626, 627, 628,629, 630, 631, 632, 633, 634, 635, 636, 637, 638, 639-933: n = A,T,C or G
agccgtanannacgcattatcgactactatagggcgaattggagctccaccgcggtgggcggcncgggggatgcgaggctcggagcacccttgcccggctgtgattgctgccaggcactgttcatctcagcttttctgtccctttgctcccggcaagcgcttctgctgaaagttcatatctggagcctgatgtcttaacgaataaaggtcccatgctccacccaaaaaaaaaaaaaaaaaaaaanntnncccccnnnccnttnaaaaaaaanggnncccccnngnnnggnnaanttnannnaaanntttnnnnanccccccncccngggggggggnccnnncccccnnttttnnncccnttnaannngggtaaanggccccntngggaaaaaaangnaaaaaanttttncngaaannnnnnnnnnnnnnnnnnnnnnnnnnnnnnnnnnnnnnnnnnnnnnnnnnnnnnnnnnnnnnnnnnnnnnnnnnnnnnnnnnnnnnnnnnnnnnnnnnnnnnnnnnnnnnnnnnnnnnnnnnnnnnnnnnnnnnnnnnnnnnnnnnnnnnnnnnnnnnnnnnnnnnnnnnnnnnnnnnnnnnnnnnnnnnnnnnnnnnnnnnnnnnnnnnnnnnnnnnnnnnnnnnnnnnnnnnnnnnnnnnnnnnnnnnnnnnnnnnnnnnnnnnnnnnnnnnnnnnnnnnnnnnnnnnnnnnnnnnnnnnnnnnnnnnnnnnnnnnnnnnnnnnnnnnnnnnnnnnnnnnnnnnnnnnnnnnnnnnnnnnnnnnnnnnnnnnnnnnnnnnnnnnnnnnnnnnnnnnnnnnnnnnnnnnnnnnnnnnnnnnnnnnnnnnnnnnnnnnnnnnnnnnnnnnnnnnnnnnnnnnnnnnnnnnnnnnnnnnnnnnnnnnnnnnnnnnnnnnnnnnnnnnnnnnnnnnnnnn

SEQ ID NO: 9243 - DNA, 554 bp, Homo sapiens
  misc_feature 3, 499, 533, 542: n = A,T,C or G
gangttgagctcccgcggtggcggccgaggtacctgactgtggctcagatctgcgtcgcagcagcgagagaagaaatcactccatatccgatgagaggaagggtggcacagagatggtgtctacaattagagacatttctgactccaccttagcctaagcaaactttatgtactgagtaacatttgaaggttgtcttttaatggtggggggtgttttttcctttttaaactacagtgcttgcacaagagagggagggactcagaaaaggttagggcaggtgagggagacagtagatggcctgggatgacttgagtccatcatactattgcttggcaggtgtcctcccccatgtttgattcaaattccatgagtgacctacctttccccaggaatgggactgagagggtagtctccagcaactcagtctgcacagggctccccgttcaggctgcctttggtggttgtgctttttgtaaagtttctttctctgcactttcnacttaccttctgaatcagaaagcaagcccagcangtgaatgangggatgttttcc

SEQ ID NO: 9244 - DNA, 601 bp, Homo sapiens
  misc_feature 6, 22, 23, 24, 25, 34, 190: n = A,T,C or G
tgggtnccgggccccccctcgnnnntacttctanattaattaacgcgggggcggcgacgacccattcgaacgtctgccctatcaactttcgatggtagtcgccgtgcctaccatggtgaccacgggtgacggggaatcagggttcgattccggagagggagcctgagaaacggctaccacatcccaaggnaaggcagcaggcgcgcaaattacccactcccgacccggggaggtagtgacgaaaaaaaaaaaaaaagcggccgccaccgcggtggagctccaattcgccctatagtgagtcgtattacgcgcgctcactggccgtcgttttacaacgtcgtgactgggaaaaccctggcgttacccaacttaatcgccttgcagcacatccccctttcgccagctggcgtaatagcgaagaggcccgcaccgatcgcccttcccaacagttgcgcagcctgaatggcgaatggaaattgtaagcgttaatattttgttaaaattcgcgttaaatttttgttaaatcagctcattttttaaccaataggccgaaatcggcaaaatcccttataaatcaaaagaatagaccgagatagggttc

SEQ ID NO: 9245 - DNA, 812 bp, Homo sapiens
tatagggcgaattggagctccaccgcggtggcggccggccatgctctcctcctctgccagtctcctccaccactctctaacctgagagcctgtggaacctgcccgtctcccctcctccatcagacacacctgcctaggaaacaggaaaggacctcggaagtcttctaaggagagtcatggcgtattaccaggagccttcagtggagacctccatcatcaagttcaaagaccaggactttaccaccttgcgggatcactgcctgagcatgggccggacgtttaaggatgagacattccctgcagcagattcttccataggccagaagctgctccaggaaaaacgcctctccaatgtgatatggaagcggccacaggatctaccagggggtcctcctcacttcatcctggatgatataagcagatttgacatccaacaaggaggcgcagctgactgctggttcctggcagcactgggatccttgactcagaacccacagtacctcggccgctctagaactagtggatcccccgggctgcaggaattcgatatcaagcttatcgataccgtcgacctcgagggggggcccggtacccagcttttgttccctttagtgagggttaattgcgcgcttggcgtaatcatggtcatagctgtttcctgtgtgaaattgttatccgctccaattccccacaacataccaaccgggagccataaagtgtaaagcctggggtgcctaatgagtgagctaactcccattaattgcgttgcgctacttgccgctttccaagtcgggaaaaccttgtcggccacc

SEQ ID NO: 9246 - DNA, 480 bp, Homo sapiens
  misc_feature 1, 11, 12, 13, 18, 360: n = A,T,C or G
ngacttactgnnnggctnattggagctccccgcggtggcggccgcccgggcaggtacgcggggagcagggaaccgctcagatacccttccacaccgtggaaactttgttcttaccctcttgacgaaaaatcttgctgctgctcactctttgggtccacaccacctttaagagctacaacgatcaccacgacagtctgcggcttcattcttgaagtcagcgacaccacaaacccaccagaagggagaaactccagacacatctgaaggaacaaactccagacacaacatctttaacagctgtaacacacactgtgaaggtccacggcttcattcttgaagccagcgagaccacgaaccctntggaaggaaccaactctggacacagcaggacgtgagacttctacctgctcactcagaatcatttcccgcaccaaccatggccacgtttgtggagctcagtacctcggccgctctagaact

SEQ ID NO: 9247 - DNA, 826 bp, Homo sapiens
  misc_feature 531, 570, 597, 613, 623, 632, 658, 667, 679, 686, 716, 721,724, 766, 767, 770, 782, 785, 787, 789, 791, 792, 796, 797,823: n = A,T,C or G
gggcgaattgggccctctagatgcatgctcgagcggccgccagtgtgatggatatctgcagaattcgcccttagcgtggtcgcggccgaggtactgagctccacaaacgtggccatggttggtgcggaaatgattctgagtgagcaggtagaagtctcacgtcctgctgtgtccagagttggttccttccagagggttcgtggtctcgctggcttcaagaatgaagccgtggaccttcacagtgtgtgttacagctgttaaagatgttgtgtctggagtttgttccttcagatgtgtctggagtttctcccttctggtgggtttgtggtgtcgctgacttcaagaatgaagccgcagactgtcgtggtgatcgttgtagctcttaaaggtggtgtggacccaaagagtgagcagcagcaagatttttcgtcaagagggtaagaacaaagtttccacggtgtggaagggtattctgagcggttccctgctccccgcgtacctgcccgggcggccgctcgaaagggcgaattncagcacactggcggcccgttactagtggatcccgagctnggtaccaagcttggcgtaaatcatggncatagctgttccctgnggtgaaattnttattccgnttcacaaatttccacacaacattacnaacccggangcaataaaagtnttaaagncctgggggtgccctaattgaagttgacctnacctnacntttaatttggcgttggcgcttaacttggccccctttttccanntcngggaaaaccttntcngngncnncctnncatttaaatgaaatcgggccaacccnccc

SEQ ID NO: 9248 - DNA, 575 bp, Homo sapiens
  misc_feature 3, 6, 217, 233, 243, 261, 290, 292, 304, 312, 313, 318, 328,337, 338, 346, 347, 349, 354, 367, 380, 383, 394, 407, 411,415, 420, 435, 436, 445, 451, 454, 455, 457, 460, 461, 462,466, 470, 472, 483, 491, 493, 503, 521, 528, 541: n = A,T,C or G
  misc_feature 545, 547, 548, 549, 557, 575: n = A,T,C or G
tanagncgccgcgccagcatctgtcttgctgaagctttttcctagaggttgagcggtttgcacaatgtcggaaatggctgagttgtccgagctgtatgaagagagcagtgacctgcagatggatgtgatgcctggcgagggtgaccttccgcagatggaggtaggcagcgggagccgggagctatccctgcgttcctcccgcagcggggcccaacangctcgaggaaggaaangccccaatgnagggaggaggaggcccanccaaatggcgggccccaaagggaaaacgnancttttttttaantggccccnncttcntggggagcanccccccccnnttgggctnncncattnttttgagagcgantgacccagggcanttnttttttattgncttgggaggaccncctncttnttttncgaaagagggagcannttagtggtnccccgnttnnanaannnttancctntntttgaagaaancccacaangntttttttttnagaaacaaaaaaaccaancccttgnttggcgggttttnaaantnnnttttttanaaaacccccgtttgatan

SEQ ID NO: 9249 - DNA, 369 bp, Homo sapiens
  misc_feature 1, 6, 8, 10, 20, 21, 29, 30, 119, 139, 140, 141, 143, 147,148, 149, 150, 161, 162, 163, 174, 175, 176, 177, 186, 188,194, 195, 196, 197, 198, 199, 200, 201, 202, 214, 225, 233,234, 235, 236, 237, 246, 247, 248, 249, 250, 255, 256: n = A,T,C or G
  misc_feature 273, 274, 292, 296, 297, 301, 302, 303, 304, 306, 307, 308,309, 310, 311, 312, 313, 314, 315, 316, 317, 318, 321, 323,331, 332, 333, 334, 336, 338, 340, 341, 344, 345, 346, 347,359, 367, 369: n = A,T,C or G
ncgcgnanancgtactcacnngagggccnnaaggaaactccaccgcggtggcggccgagtacttttttttttttttttttttttttttttttttttttttttttttttttttttttttncccccccccccccccccccnnngngggnnnnaaaaaaaaaannnccccccccccnnnnaaaaaaaananaaaaannnnnnnnncccccccccccnggggggggggncccccccnnnnnttttttttnnnnnaaaannaaaaaaaaccccccccnnaaaaaaaaaaaaaaaaantttnncccnnnnannnnnnnnnnnnnaananaaaaaaannnnananannaannnnaaaaaaaaaaanaaaaaaanan

SEQ ID NO: 9250 - DNA, 867 bp, Homo sapiens
  misc_feature 3, 4, 11, 13, 457, 465, 466, 467, 468, 469, 470, 471, 472,473, 475, 476, 483, 530, 568, 595, 635, 646, 653, 673, 730,733, 789, 822, 840, 849, 865: n = A,T,C or G
agnntcgaatngnatacgactactatagggcgaattgggccctctagatgcatgctcgagcggcccgccagtgtgatggatatctgcagaattcgccctttcgagcggccgcccgggcaggtactatagagctcagaaggacacagcccgtcctcccctgcctgcctgattccatggctgttgtgctgattccaatgctttcacgttggttcctggcgtgggaactgctctcctttgcagccccatttcccaagctctgttcaagttaaacttatgtaagctttccgtggcatgcggggcgcgcacccacgtccccgctgcgtaagactctgtatttggatgccaatccacaggcctgaagaaactgcttgttgtgtatcaagtaatcattagtggcaatgatgacattctgaaaagctgcaatacttatacaataaattttacaattctttggaanaaaaaaannnnnnnnnannaaaagtnccttctcaaaagtcttcggtttggtctcaacaattttctagaccctncttgaaagatggtgctctggagagccaaagatacaganaatgtcccagttacactatcaaagganaaccgttctgaaagaaaaagttgggttttaagcctataanaattacttcanaactggngctcactgggatggcttcantttccttaatctcctaaacacttgcagctcaggttggctatgtgctttaaaaatggnggnttttatacctgggcaaacaaaacaaagtatgctaaatgtccctggaaatggaggangaaatgtaacccaaaaactagattttaactggnaccttggccggaacaccnctaagggcnaattccacacctgggngg

SEQ ID NO: 9251 - DNA, 651 bp, Homo sapiens
  misc_feature 595: n = A,T,C or G
gattgtatacgactcctatagggcgaattgggccctctagatgcatgctcgagcggccgccagtgtgatggatatctgcagaattcgcccttcgagcggccgcccgggcaggtacagctgtctgcattgaaaattcatgcatggagaaagggagtaagcaagggagaaacggtgcgattcacatattccgcgagatcatcaagccagcagagaaatccctccatgaaaagttaaaacaagataagcgctttagcaccttcctcagcctacttgaagctgcagacttgaaagagctcctgacacaacctggagactggacattatttgtgccaaccaatgatgcttttaagggaatgactagtgaagaaaaagaaattctgatacgggacaaaaatgctcttcaaaacatcattctttatcacctgacaccaggagttttcattggaaaaggatttgaacctggtgttactaacattttaaagaccacacaaggaagcaaaatctttctgaaagaagtaaatgatacacttctggtgaatgaattgaaatcaaaagaatctgacatcatgacaacaaatggtgtaattcatgttgnagataaactcctctatccagcagacacaccctgttggaaatgatcaactgctggaa

SEQ ID NO: 9252 - DNA, 922 bp, Homo sapiens
  misc_feature 1, 2, 9, 492, 505, 506, 547, 560, 612, 643, 651, 659, 679,686, 738, 750, 751, 753, 760, 761, 763, 765, 774, 775, 781,783, 785, 789, 792, 824, 825, 832, 837, 856, 858, 859, 873,874, 876, 885, 899, 919: n = A,T,C or G
nnatcgcgnctccgttatacgactcactatagggcgaattggagctccccgcggtggcggcccgaggtgggaggattgcttgagtccaggaatttgagaccagcctggacaacacagtgagacctcatctctatcaaaaaataaaaattagctagatgtggtggcatgagcctgtgttcccagctgcttaggaggctgaagcaggaggattgattgagcctgcgaggccaaggctgcagcaggctgtgattgcaccactgcacttcagcttgggcaacagagcaagaccctgtctccgaaacaaataaaaaatactgtaataaaagtacctgcccgggcggccgctctagaactagtggatcccccgggctgcaggaattcgatatcaagcttatcgataccgtcgacctcgagggggggcccggtcccaacttttgttccctttagtgagggttaattgccgcttggcgtaatcatggtcatagcttgttnctgtgtgaaaatnntattccgttacaatttcacaccaacaatacgaacccggganccataaaatggtnaaagcctgggggtggcctaatgaagtgaacctacctcacaattaatttgcgnttgcgcctcacttgcccgcttttccaagtcngggaaaancctgtccnggccagcttgatttaattgnaatcggnccaacccccccggggaaaaggccggttttgcttttttgggcgcctttttccntttccttggttnntnaacttcnntngncctcggtcnnttcggntncngggnaanccggttttaacttaacttcaaaagccggtaannccggttnttccncaaaattaaggggttaacncnnggaaaaaaactttnnancaaaaaggncccccaaaaggccngggaacccttaaaaaggccnctt

SEQ ID NO: 9253 - DNA, 624 bp, Homo sapiens
  misc_feature 1, 2, 4, 5, 11, 25, 26: n = A,T,C or G
nncnnctcctntagggcgaattggnnctccaccgcggtggcggccgaggtacttgattgttctgaaattccttatgcatgattagagaaagagtaaatgacgtattttaggattgtgtttaacaaaagtgagatgctaattcttgaaaattaggcctctctatggggactgcacgtaatcacattaccctagatcttgagttagcgagagaatattctgtcaggtgattcactgaccttgcctataacttgaaaccaatagcaaatccagatgtagtttcactggcctttgaagtccagggcaaaaagacaaagcgtgactccctgtctccccattgcatcctgattgtctccctgtccagggacagaataaatatcctcaagacattgactcttttcacagtgaagaagctgaggttggagctttggcctcatctcctataggttcatgctgcatctctgatctctacaggcagggagaaggtctttcctgctccccttcctcctggcacatgacaaaatcctagtgccttaaggtctgcgggaggagagagtttatatagtgttttccagttcaagttccttatcatataatcatactccccccacctgcatctcctttgtt

SEQ ID NO: 9254 - DNA, 793 bp, Homo sapiens
  misc_feature 3, 4, 5, 6, 7, 8, 9, 12, 21, 22, 128, 460, 478, 668, 674,686, 691, 694, 706, 729, 735, 756, 766, 768, 782, 792, 793: n = A,T,C or G
agnnnnnnnttnggagtcgtnnctggcgaatggggccctctagatgcatgctcgagcggccgccagtgtgatggatatctgcagaattcgccctttcgagcggccgcccgggcaggtactgaaaaatntcatgtcctgggaaacccctcagtcctgggcaaactgagaccggtggttatcatacaaagagaaaaccaaataagactaaaattatgtccaaacactttcattgtggctaggaacacaagttgaacaccctaataaggaacacaaataataaaagcttgcattattgagtgcttatatggggtaagtattatactattatctccattttaaagataagcaaactgagacatagtaagggtaaataagttagttagtgaaggcaccagaatttaaacccagaaagtttggttttagagcatacactacaatcagcactgtatggaaagatatntaagagcagagacaggcngagatgggagcactggggaagacatcatggaggggctagatggctacatcttggctttaaaaagtgagcaaaagtaaaagttagaaaggagatgaaagtatcatttataaatggggaaaatcacacaagcagtgggtctggtaggatcacaccaagcagtggactggagtgaaaaatgggctgaaccttntttttncaaagcagaaangggtnagntttaagggaaanggtggagcccttttccttaatangggggnccttgggcgggaacaccctanggcaattccncnccttggcggcgttntagggatccnn

SEQ ID NO: 9255 - DNA, 609 bp, Homo sapiens
  misc_feature 9, 17, 30, 590: n = A,T,C or G
tgcttaccnggtcgacnttgggccctctanagcatgctcgacggccgccagtgtgatggatatctgcagaattcggcttagcgtggtcgcggccgaggtacacatatcctgagctatccacagtccccgaactctgcaacattgctttcaggtgatagagacaagatggtccatgcaaatgagctgacacaagtcatgtcgtgtgcaatcaagataggatcccagacatcttcagaatggtttacagtcacaagaaataaagttccaatgaagtggttggcatttggaagcacactgttttaaatatatctccctgaaggtatgtttatatattagtgcactggtcaatatctgacactatctgtcattttattgcaaaaggatatcagggcaattaataggagggatcttagcactactttagacaatctttaaagcctgggtaagattcattagctacccaagtggcatttctgacttcaaattgtagtatcatgcaagatttatactgtattaatggagcctggagtaactctacatttaattatttccattatggggtaaacagcacttgaattaatacaatttanccgactgatgcagtttggt

SEQ ID NO: 9256 - DNA, 638 bp, Homo sapiens
  misc_feature 2, 4, 16, 525, 528, 557, 566, 576, 607, 614: n = A,T,C or G
gntngcagctgtgacncgtgggttaaaaacccgcgagtgtagttgtgaccttcgcggtaggtgccggttggggccggctgtgattgttatcttggtgctgcagaggacagcagaagaggagattgggtcagaaaactgccctgccgcaccagagcacagcgcactagtgggacaggggtcctgactcagacttaactggctgtgtctcgtggtttttcactgtcctggaaaaggcctgaagtggcactgaaatgaggcatagatgaggtaacgtcgagggagcggtttgcaggttgcaaaggggccctactgatgctgcttaatagtaaacagtgcttactctaggacgggagttgtttccagctttacgtgtaaatctcgcgatattgtggcctgggcactatttccattaaggaggaaactgcacaggataagtcatttacctgctgttgcacagctctggctctaggattcaggctggcttcagagtcggtgctcttaaccgccatactatgttgcttctgntgnccgttggtgactgtggcccatgtagcttncgcagtttnctcatctgtnacagtaaataactcaaaacctgcatgatggnccactanggtttcactttcgagcttgccaga

SEQ ID NO: 9257 - DNA, 649 bp, Homo sapiens
  misc_feature 13, 20, 99, 598, 637, 645, 646: n = A,T,C or G
tatttacttgcanattggcnacgactcctatagggcgattgggccctctagatgcatgctcgagcggccgccagtgtgatggatatctgcagaattcgnccttagcgtggtcgcggccgaggtacagagaaaccacaggttgccctttccacagctggatagacttatccaaaacggcaggatggttctgtattaatctttttggaaagcatgtctgtattaagattgcaaaacatacagatagctaccacaaattaggtcaaatgactgatcaagttgtaacatctgtgaggtcaaattccagttataataaagtgcctagatacacatttatacaacagaccataagagctgaattctttacaaatgtctttatgggcatgtaaaattgactctgcatttctgcatgtgtgcattcacataagagagaccagtctgcactgagtcatatatactccaacttgaaaaagtaagtgtaacaactggttaatcatgcaagtctgtttgtaatataacaatgactggtaaaacatgaattctcgcacagtagtaataggtgcactcattaaaaacactacggaaaaacactgtatttggngcagtatctgattttcaagggttagtaacttgaccattnaaaaatannttt

SEQ ID NO: 9258 - DNA, 675 bp, Homo sapiens
  misc_feature 24, 344, 408, 424, 448, 459, 461, 474, 481, 493, 500, 505,509, 517, 532, 535, 550, 551, 561, 567, 572, 583, 603, 613,626, 632, 647, 666: n = A,T,C or G
tatagggcgaattgggccctctanagcatgctcgacggccgccagtgtgatggatatctgcagaattcggcttacacttctgacgtcagtattggcagcggttccgggtcaccttgttgatgatgcagttcttgtcccggtgacacgtgtacaccatgttcttctggatgctgcggcggaagaagcccttgcagaagccgaattccagcacactggcggccgttactagtggatccgagctcggtaccaagcttggcgtaatcatggtcatagctgtttcctgtgtgaaattgttatccgctcacaattccacacaacatacgagcccggaagcataaagtgtnaagcctgggggtgcctaatgagtgagctaactcacattaaattgcgttgcgctcactggccccntttccagtccggaaanctgtcgtgccacctgcatttatgnatcggccaacncnccgggagaaggcnggtttgngtattgggcgcntttcccnttctngctnactgaaantcttggctcgggcgnttngggtgggggagccgnntaacttactntaaggnggaantcggttttccnaaaatcgggggtaccccggnaaaaaattgngccaaaggccccnaaaggnccgaaccctaaaggncggtgttggggtttttctnaggcccccc

SEQ ID NO: 9259 - DNA, 521 bp, Homo sapiens
  misc_feature 2, 3, 4, 5, 6, 9, 17, 20, 27: n = A,T,C or G
gnnnnnganccgcgttntangacttantatttggctgattggagctccccgcggtggcggccgcccgggcaggtacgtcccaccccctgctgggtcagtagcttctgggccagtggttgggggcagaaagaaggtcagaggccctgaacagataaagcaggaggtagagagtgaggaggaaaaacccgacaggatggatattgacagtgaagacacagattcaaacacatctttgcaaacaagggctagagaaaagaggaagcctcagctggagaaggacacaaagccgaaagagcccaggtatactcccgtgagcatctacgaggaaaagctgctgctcaagaggctggaagcttgtcccggtgctgttgccatgactccggaagctcggagactgaaacgcaaactgattgtcagacaagcgaaaagggataggggattaccactttttgacttggatcaagttgttaatgctgctcttttgttagttgacgggatttatggagccaaagaaggaggaa

SEQ ID NO: 9260 - DNA, 522 bp, Homo sapiens
  misc_feature 2, 3, 4, 5, 6, 7, 11, 15, 24, 29, 446, 522: n = A,T,C or G
gnnnnnntacnactnactattggntatanggcgaattgggccctctagatgcatgctcgagcggccgccagtgtgatggatatctgcagaattcgcccttagcgtggtcgcggccgaggtacgcgggggagacacattcagaggtgagcccagagcgggtaaagtggactggggagaacttcggaggatgttcatgtccaggagcagccccacgccctgtatggtcggtgtctagagcctcacagcaactaagaccaacccagctctcagaagaaggaatgtcaaaatgtcatgttcaattttacattcagtgcctggaatcttttcttcacaattgaaatgaaatgtgctgaaggaggtgaatccatgcattaatcttcagctcacaaaggaaatctacataagaagcaaggaacacgcaagagatctacagctctgatctccangatagtgaaatgaggtggtgaatgataagggtataatttagccagctcagtgaataaataatcattgcaaatgaan

SEQ ID NO: 9261 - DNA, 530 bp, Homo sapiens
  misc_feature 2, 3, 4, 10, 11, 12, 13, 40, 46, 52, 54, 57: n = A,T,C or G
gnnnaagtgnnnngtatacgactactatagggcgaggtgngccgtntagatncnagncatgctcgagcggccgccagtgtgatggatatctgcagaattcgcccttagcgtggtcgcggccgaggtactccattctccagcattttctacatctggcaagctcgaaagtgaaaccctagtgggccatcatgcaggttttgagttatttactgttacagatgaggaaactgcgaagctacatggccacagtcaacaacgacaacagaaggcaacatagtatggcggttaagagcaccgactctgaagccagcctgaatcctagagccagagctgtgcaacagcaggtaaatgacttatcctgtgcagtttcctccttaatggaaatagtgcccaggccacaatatcgcgagatttacacgtaaagctggaaacaactcccgtcctagagtaagcactgtttactattaagcagcatcagtagggcccctttgcaacctgcaaaccgtccctcgacgttacctcatctatgc

SEQ ID NO: 9262 - DNA, 801 bp, Homo sapiens
  misc_feature 4, 500, 501, 504, 510, 511, 515, 520, 522, 523, 527, 553,558, 565, 566, 572, 589, 592, 596, 599, 601, 602, 603, 604,605, 606, 607, 608, 613, 614, 615, 616, 617, 618, 619, 620,621, 622, 623, 624, 625, 626, 627, 628, 629, 630, 631: n = A,T,C or G
  misc_feature 632, 633, 634, 635, 636, 637, 638, 639, 640, 641, 642, 643,644, 645, 646, 647, 648, 649, 650, 651, 652, 653, 654, 655,656, 657, 658, 659, 660, 661, 662, 663, 664, 665, 666, 667,668, 669, 670, 671, 672, 673, 674, 675, 676, 677, 678: n = A,T,C or G
  misc_feature 679, 680, 681, 682, 683, 684, 685, 686, 687, 688, 689, 690,691, 692, 693, 694, 695, 696, 697, 698, 699, 700, 701, 702,703, 704, 705, 706, 707, 708, 709, 710, 711, 712, 713, 714,715, 716, 717, 718, 719, 720, 721, 722, 723, 724, 725: n = A,T,C or G
  misc_feature 726, 727, 728, 729, 730, 731, 732, 733, 734, 735, 736, 737,738, 739, 740, 741, 742, 743, 744, 745, 746, 747, 748, 749,750, 751, 752, 753, 754, 755, 756, 757, 758, 759, 760, 761,762, 763, 764, 765, 766, 767, 768, 769, 770, 771, 772: n = A,T,C or G
  misc_feature 773, 774, 775, 776, 777, 778, 779, 780, 781, 782, 783, 784,785, 786, 787, 788, 789, 790, 791, 792, 793, 794, 795, 796,797, 798, 799, 800, 801: n = A,T,C or G
actnctattgggcgaattgggccctctagatgcatgctcgagcggccgccagtgtgatggatatctgcagaattcgccctttcgagcggccgcccgggcaggtacgcgggatgaacaagctcaggaaaaatctaagaaggccttaatttctcacctctagctgactttcaggctacataaacaggaattgaatgataaggtagaaatgtgaactccctgactgagtgttgaaggtatgccctacacatccacaaaacccttgagcaaagactaaactaaataagcagagacttaagtggccacacataaaaaagaatacagactgcagaatgtgttcccccaaaaaatcactaagcaaagagcaggagtaacaataaacagcaacaataaatcctgcagaaaaggagattctgatttttagagttgacacataatattatttaagacactcagttttcaacaaaaaattatgaggcatgcaaaaaaaaaaaaaaaaaaanntcnttgggnngaanccccntnngggngaattcccccacctggggggcgtttntttgngattccnncttggncccaaagttgggggaanaangggnaanannnnnnnnggggnnnnnnnnnnnnnnnnnnnnnnnnnnnnnnnnnnnnnnnnnnnnnnnnnnnnnnnnnnnnnnnnnnnnnnnnnnnnnnnnnnnnnnnnnnnnnnnnnnnnnnnnnnnnnnnnnnnnnnnnnnnnnnnnnnnnnnnnnnnnnnnnnnnnnnnnnnnnnnnnnnnnnnnnnnnnnnnnnnnnnnnnnnnnn

SEQ ID NO: 9263 - DNA, 517 bp, Homo sapiens
  misc_feature 2, 3, 4, 5, 6, 7, 8, 9, 10, 11, 358, 383: n = A,T,C or G
gnnnnnnnnnnacaactactatatgggcgaattgggccctctagatgcatgctcgagcggcccgccagtgtgatggatatctgcagaattcgccctttcgcgcggccgcccgggcaggtaccagctgctctacgtggcggttcccagtggccctccctcaacaaccatcttggcttcttcaaacaaagtgaaaagtggggacgacatcagtgtgctctacactgtcctgggggagcccgatgtggaggtggagttcacctggatcttcccagggcagaaggatgaaaggcctgtgacgatccaagacacttggaggttgatccacagaggactgggacacaccacgagaatctcccanagtgtcattacagtggaagacttcnagacgattgatgcaggatattacatttgcactgctcagaatcttcaaggacagaccacagtagctaccactggtgagttttcctgacttggaaaaggaaatgtaatgaacttatggaaagcccatttgtgtacc

SEQ ID NO: 9264 - DNA, 779 bp, Homo sapiens
  misc_feature 2, 3, 4, 5, 6, 7, 8, 9, 10, 13, 19, 20, 26, 441, 456, 521,524, 599, 606, 678, 680, 688, 708, 721, 722, 746, 755, 764,765, 772: n = A,T,C or G
gnnnnnnnnntgntgtctnngctccnccccctccgagccagcgcaggggcttctgctgagggggcaggcggagcttgaggaaaccgcagataagtttttttctctttgaaagatagagattaatacaactacttaaaaaatatagtcaataggttactaagatattgcttagcgttaagtttttaacgtaattttaatagcttaagattttaagagaaaatatgaagacttagaagagtagcatgaggaaggaaaagataaaaggtttctaaaacatgacggaggttgagatgaagcttcttcatggagtaaaaaatgtatttaaaagaaaattgagagaaaggactacagagccccgaattaataccaatagaagggcaatgcttttagattaaaatgaaagtgacttaaacagcttaaagtttaatttaaaagttgtangtgattaaaataatntgaaggcgatcttttaaaaagagattaaacccgaaggtgattaaaagaccttgaaatccatgacncanggagaattgcgtcatttaaagcctagttacccatttacttaacgcagacgaaaatggaaggataattgggagtgnaggatgnacaatttgggaaaattgaatttgaagtggaaactggagccgaatcccggaggcgaagaaaagattgagaagntngggaattnaaataaacctccttttgaanaaaagttaattannctggaagtggagcaaaaaaaaaanggggccttnctttcttannaaaactnccccctc

SEQ ID NO: 9265 - DNA, 612 bp, Homo sapiens
cccgcgtccgtgacgtactctggttaggttaggacttgccctcgtggtggaaacttttcttaaaaagttataaccaacttttctattaaaagtgggaattgggagagaaggtaggggttgggaatcagagagaatggctttggtctcttgcttgtgggactagcctggcttgggactaaatgccctgctctgaacacgaagcttagtataaactgatggatatccctaccttgaaagaagaaaaggttcttactgcttggtccttgatttatcacacaaagcagaatagtatttttatatttaaatgtaaagacaaaaaactatatgtatggttttgtggattatgtgtgttttgctaaaggaaaaaaccatccaggtcacggggcaccaaatttgagacaaatagtcggattagaaataaagcatctcattttgagtagagagcaagggaagtggttcttagatggtgatctgggattaggccctcaagacccttttgggtttctgccctgcccaccctctggagaaggtgggcactggattagttaacagacgacgcgttactagcagtcacttgatctccgtggctttggtttaaaagacacacttgtc

SEQ ID NO: 9266 - DNA, 842 bp, Homo sapiens
  misc_feature 5, 518, 520, 521, 527, 530, 570, 647, 692, 800, 836, 838: n = A,T,C or G
tatgncggcgcgcgtaatacgactactatagggcgaattggagctccccgcggtggcggccgcccgggcaggtacgcgggacacatctcactcatccttctactcgtgacgcttcccagctctggctttttgaaagcaaagatgagcaacactcaagctgagaggtccataataggcatgatcgacatgtttcacaaatacaccagacgtgatgacaagattgacaagccaagcctgctgacgatgatgaaggagaacttccccaacttccttagtgcctgtgacaaaaagggcacaaattacctcgccgatgtctttgagaaaaaggacaagaatgaggataagaagattgatttttctgagtttctgtccttgctgggagacatagccacagactaccacaagcagagccatggagcagcgccctgttccgggggcagccagtgacccagccccaccaatgggcctccagagacccaggaacaataaaatgtcttctcccaccagaaaaaaaaaanannaaaaangtncctcggccgctctagaactagtggatcccccgggctgcangaattcgatatcaaagcttatcgataccgtcgacctcgagggggggcccgggacccaacttttgttcctttagtganggtaattgcgcgcttggcgtaatcatggcatagctggtttcctgnggggaaattggtatccgctcacaattcccacaacatacgagccgggagccataaatgtaaaagcctggggtgcctaatgagtgagcttactccattaaatggcgttgngcttactgcccggttttccagtcggggaaacctgtngngcct

SEQ ID NO: 9267 - DNA, 626 bp, Homo sapiens
  misc_feature 2, 3, 8, 10, 594, 626: n = A,T,C or G
gnncgttntnatcacttagggcgaattggagctccccgcggtggcggccgaggtaccaaatgaagtgtgaagacaaggccatccaccactttatagagggtgtaaaaataaaccagaaatcaagggagaaagaaaagatgaaagacaaactgcaaaaaattgccaaaatgcgactttctaaaaatggagcagattctgaggctttgcatgtcttggcattccttcaggagctgaatgaaaaaatgcaacaagcagatgaagactctgagaggggtttggagtctggaagcctcatcccttcagcatcaagctggaatggggaatgaagaatagagatgtggtgcccactaggctactgctgaaagggagctgaaattcctccaccaagttggtattcaaaatatgtaatgactggtatggcaaaagattggactaagacactggccataccactggacagggttatgttaacacctgaattgctgggtcttgagagagcccaagggagttctgggagagggaccagattggggggtaggtccacgggcttggtgatagaattatttctcgattgacttcttgagtgcaatttgnactgtaacattgcttagtcactttagtggagn

SEQ ID NO: 9268 - DNA, 750 bp, Homo sapiens
  misc_feature 1, 4, 6, 12, 24, 32, 54, 87, 338, 562, 628, 664, 736, 743,748, 750: n = A,T,C or G
ncancnactatntggcgaatgggnccctctanatgcatgctcgagcggccgccngtgtgatggatatctgcagaattcgccctttcnagcggccgcccgggcaggtaccatctaggtcagtttaagaagagtcagctcagagaaagcaagcataagggaaaatgtcacgtaaactagatcagggaacaaaatcctctccttgtggaaatatcccatgcagtttgttgatacaacttagtatcttattgcctaaaaaaaatttcttatcattgtttcaaaaaagcaaaatcatggaaaatttttgttgtccaggcaaataaaaggtcattttaatttanctgcaatttcagtgttcctcactaggtggcatttaaatgtcgcctgatgtcattaagcaccatccaaaaagtctgcttcataatctattttcaagacttggtgattctgaaagttttggtttttgtgactttgtttctcaggaaaaaaaatattcctacttaaattttaagtctataattcaatttaaatatgtgtgtgtctcatccaggataggataggttgncttctattttccattttacctatttactttttttgtaagaaaagggaaaaatgaattctaaagatnttccccatgggttttgattggggtctaacctatgangaccttcatttaatccgcttaaccttaaaaccaaattttttactttacatgagggcctttactaatcctcanggcacangggcncn

SEQ ID NO: 9269 - DNA, 855 bp, Homo sapiens
  misc_feature 4, 141, 263, 290, 377, 686, 688, 689, 700, 705, 706, 707,708, 709, 710, 711, 712, 713, 717, 718, 719, 720, 721, 724,725, 726, 730, 732, 741, 744, 763, 772, 775, 783, 785, 788,805, 807, 808, 809, 810, 825, 826, 842: n = A,T,C or G
gagngcgcgtaatacgactcactatagggcgaattggagctccaccgcggtggcggcccgaggtacgcggggaggcattgaggcagccagcgcaggggcttctgctgagggggcaggcggagcttgaggaaaccgcagatnagtttttttctctttgaaagatagggattaatacaactacttaaaaaatatagtcaataggttactaagatattgcttaccgttaagtttttaacgtaattttaatagcttaagattttaanagaaaatatgaagacttataagagtancatgaggaaggaaaagataaaaggtttctaaaacatgacggaggttgagatgaagcttcttcatggagtaaaaaatgtatttaaaanaaaattgagagaaaggactacagagccccgaattaataccaatagaagggcaatgcttttagattaaaatgaaggtgacttaaacagcttaaagtttagtttaaaagttgtaggtgattaaaataatttgaaggcgatcttttaaaaagagattaaacccaaggtgattaaaagaccttgaaatccatgacgcagggagaattgcgtcatttaaagcctaattaacgcatttactaaaccgcaacgaaaatggaaagaataattgggagtgggaggatgaaacaatttggaaaagatagaatttgaaantnnaaacctggaanacccnnnnnnnnnaaannnnnggnnntttncngggggggcnttnaaaaaaaaaaaaacttttnttttaaccnggnaaaccccntnttnttaaaaaaaaaaaaaantnnnnggggggggggggggnncccccccccccccccnttggggggggggg

SEQ ID NO: 9270 - DNA, 524 bp, Homo sapiens
  misc_feature 2, 3, 4, 5, 8: n = A,T,C or G
gnnnnatngaatacgactactatagggcgaattgggccctctagatgcatgctcgagcggccgccagtgtgatggatatctgcagaattcgcccttagcgtggtcgcggccgaggtactttactcacccttcctctgacagaaaaggatgaagtcaagggcctggtagaggcaccactaagaaaggcatctgaaaggaccaaagagagtgaccagcaagcattttttgcaaggctgaggagctgacagcttccatgaaaggctggaccacccagtggtgaaaagcatcatctgggttaccttgtgctgccataaaacacaccacagacttggtgacttaaaccacagatatttatcttctcacaatcctggaggctggaagtctgcaatcacggtgccagcatggtcaggttctggtgagggcctctttccttctcactgtgtgctctttcttgtgcatggagagagagagcatgaacaagccctctactgtccctcttagaagggcactaatcccataataag

SEQ ID NO: 9271 - DNA, 947 bp, Homo sapiens
  misc_feature 5, 6, 7, 634, 644, 661, 672, 677, 701, 721, 810, 827, 851,860, 874, 916, 928, 940, 946: n = A,T,C or G
atgtnnngacgcgcgtaatacgactcactatagggcgaattgggagctcccccgcggtggcggcccgaggtaccacatcttaaatactctccagtgttctgagtctattatgggaggagcagtctttgagacgctggaaggaaatacaattgagataggatgtgacggtgacagtataacagtaaatggaatcaaaatggtgaacaaaaaggatattgtgacaaataatggtgtgatccatttgattgatcaggtcctaattcctgattctgccaaacaagttattgagctggctggaaaacagcaaaccaccttcacggatcttgtggcccaattaggcttggcatctgctctgaggccagatggagaatacactttgctggcacctgtgaataatgcattttctgatgatactctcagcatggatcagcgcctccttaaattaattctgcagaatcacatattgaaagtaaaagttggccttaatgagctttacaacgggcaaatactggaaaccatcggaggcaaacagctcagagtcttcgtatatcgtacctcgcccgctctagaactagtggatcccccgggctgcaggaattcgatatcaagcttatcgataccgtcgaccctcganggggggcccnggacccagcttttggtncctttagtgangggtnaatgcgcgcttggccgtaatcatngggcatagctggttccctgnggggaaattggtattccctcacaatttccccacaacataccaacccgggagccttaaaagtgtaaagcctgggggtgccttaatgaggngggcctacctaccattnattggggtggcgctcactggcccnttttccaancgggaaaactggcnggcccccttgcattaatgaaacggccaccccccgggggaagngggttgggtttnggcctttttccntttctng

SEQ ID NO: 9272 - DNA, 811 bp, Homo sapiens
  misc_feature 5, 15, 23, 29, 30, 31, 39, 45, 51, 242, 550, 591, 599, 611,619, 657, 662, 670, 698, 706, 719, 784, 799, 809, 811: n = A,T,C or G
tcgcnactactatanggcgaatnggagcnnnccgagctncccgcngtggcngctcgaggtaccacatcttaaatactctccagtgttctgagtctattatgggaggagcagtctttgagacgctggaaggaaatacaattgagataggatgtgacggtgacagtataacagtaaatggaatcaaaatggtgaacaaaaaggatattgtgacaaataatggtgtgatccatttgattgatcangtcctaattcctgattctgccaaacaagttattgagctggctggaaaacagcaaaccaccttcacggatcttgtggcccaattaggcttggcatctgctctgaggccagatggagaatacactttgctggccctgtgaataatgcattttctgatgatactctcagcatggatcaacgcctccttaaattaattctgcagaatcacatattgaaagtaaaagttggccttaatgagctttacaacgggcaaatactggaaaccatcggaggcaaacagctcaaaagtcttcgtatatcgtacctcggncgctctaaaaactaatggatccccccggctgcaggaattcnattcaacntatcgatcccgnccacctcnaaggggggccccgtcccaacttttgttcctttaatgangggtnaatgcccncttggcgtaaacatgggcatactggttnctgtgtgnaaatggttttccntccaaattcccacaacataccaacccggggccttaaatgtaaaacctggggggcctatgaggggncctaccccccttaantgcgtgcgcncn

SEQ ID NO: 9273 - DNA, 619 bp, Homo sapiens
  misc_feature 2, 3, 6, 8: n = A,T,C or G
cnngcntncgcactgcagactgcaaggcctcagaccgggttctgagtacacagtcagtgtggttgccttgcacgatgatatggagagccagcccctgattggaacccagtccacagctattcctgcaccaactgacctgaagttcactcaggtcacacccacaagcctgagcgcccagtggacaccacccaatgttcagctcactggatatcgagtgcgggtgacccccaaggagaagaccggaccaatgaaagaaatcaaccttgctcctgacagctcatccgtggttgtatcaggacttatggtggccaccaaatatgaagtgagtgtctatgctcttaaggacactttgacaagcagaccagctcagggagttgtcaccactctggagaatgtcagcccaccaagaagggctcgtgtgacagatgctactgagaccaccatcaccattagctggagaaccaagactgagacgatcactggcttccaagttgatgccgttccagccaatggccagactccaatccagagaaccatcaagccagatgtcagaagctacaccatcacaggtttacaaccaggcactgactacaagatctacctgtacaccttgaatgaa

SEQ ID NO: 9274 - DNA, 522 bp, Homo sapiens
  misc_feature 2, 6, 10, 11, 12, 13, 14, 15, 17, 18, 20, 21, 24, 28, 30,32, 515: n = A,T,C or G
tngcgngccnnnnnntnnannagnaacncntnttttaccacgcccccggttcctggacgtgtacaagaactgcaacggggtggtcatgatgttcgacattaccaagcagtggaccttcaattacattctccgggagcttccaaaagtgcccacccacgtgccagtgtgcgtgctggggaactaccgggacatgggcgagcaccgagtcatcctgccggacgacgtgcgtgacttcatcgacaacctggacagacctccaggttcctcctacttccgctatgctgagtcttccatgaagaacagcttcggcctaaagtaccttcataagttcttcaatatcccatttttgcagcttcagagggagacgctgttgcggcagctggagacgaaccagctggacatggacgccacgctggaggagctgtcggtgcagcaggagacggaggaccagaactacggcatcttcctggagatgatggaggctcgcagccgtggccatgcgtcccactggcggncaacggg

SEQ ID NO: 9275 - DNA, 642 bp, Homo sapiens
  misc_feature 6: n = A,T,C or G
ggtttngcgtaataccgactcactatagggcgaattggagctccaccgcggtggcggccgaggtacaacttcattgaactgccctaccacggggaaagcatcagcatgctgattgcactgccgactgagagctccactccgctgtctgccatcatcccacacatcagcaccaagaccatagacagctggatgagcatcatggtgcccaagagggtgcaggtgatcctgcccaagttcacagctgtagcacaaacagatttgaaggagccgctgaaagttcttggcattactgacatgtttgattcatcaaaggcaaattttgcaaaaataacaaggtcagaaaacctccatgtttctcatatcttgcaaaaagcaaaaattgaagtcagtgaagatggaaccaaagcttcagcagcaacaactgcaattctcattgcaagatcatcgcctccctggtttatagtagacagaccttttctgtttttcatccgacataatcctacaggtgctgtgttattcatggggcagataaacaaaccctgaagagtatacaaaagaaaccatgcaaagcaacgactactttgctacgaagaaagactcctttcctgcatctttcatagttctgttaaatatttttgtacc

SEQ ID NO: 9276 - DNA, 974 bp, Homo sapiens
  misc_feature 1, 4, 5, 6, 7, 9, 648, 649, 669, 677, 686, 688, 700, 711,728, 735, 738, 760, 774, 782, 792, 793, 811, 815, 829, 830,835, 844, 850, 854, 862, 865, 867, 876, 877, 878, 883, 897,898, 902, 911, 919, 923, 926, 933, 943, 944, 947, 958: n = A,T,C or G
  misc_feature 959, 960, 967, 969: n = A,T,C or G
ncgnnnngncgcgcgtaatacgactcactatagggcgaattgggagctcccccgcggtggcggcccgaggtacagtcctgattgcatcataattgtggtttccaacccagtggacattcttacgtatgttacctggaaactaagtggattacccaaacaccgcgtgattggaagtggatgtaatctggattctgctagatttcgctaccttatggctgaaaaacttggcattcatcccagcagctgccatggatggattttgggggaacatggcgactcaagtgtggctgtgtggagtggtgtgaatgtggcaggtgtttctctccaggaattgaatccagaaatgggaactgacaatgatagtgaaaattggaaggaagtgcataagatggtgggttgaaagtgcctatgaagtcatcaagctaaaaggatataccaactgggctattggattaaagtgtggctgatcttattggaatccatgttgaaaaaatctatccaggattcatcccgtgtcaacaatggtaaagggggatgtatggcattgaaaatgaaagcttcctgagccttcatggtatcctcaatgccccggggattaaaccagcggttatcaacccagaaacctaaaggatgatgaaggttgcttcnnctcaagaaaaggtgccagantcccctgnggggacatncnagaagggacctnaaaagacctgngacttaggtgagccttnagcttgnganaaaattttaaaacctccaatgnggattaacttccancctttaanttttcattcnntgtaccctcggcccgttntaanaactaagggggatnnccccnggcttgccnggaatncatnatcaagcntantngaatccccnnnccttnaagggggggcccgnncccnactttttgntcccttangggnggntaattgnccccctggcnnaancatgggcctannngttcccngnggaat

SEQ ID NO: 9277 - DNA, 613 bp, Homo sapiens
  misc_feature 19, 26, 77, 112, 529, 593, 596, 606: n = A,T,C or G
gcgtctggtactcacttgntggcctnattggaactccaccgcggtggcggccgcccggcaggtacctcatcccatgnagaccctggtgcctggctctttcgtcacccttggnacaagacaaaccaagtcggaacaacagataacaatgcagcaaggccctgctgcccaatctccatctgtcaacaggggcgtgaggtcccaggaagtggccaaaagctagacagatccccgttcctgacatcacagcagcctccaacacaaggctccaagacctaggctcatggacgagatgggaaggcacagggagaagggataaccctacacccagaccccaggctggacatgctgactgtcctctcccctccagcctttggccttggcttttctagcctatttacctgcaggctgagccactctcttccctttccccagcatcactccccaaggaagagccaatgttttccacccataatcctttctgccgacccctagttccctctgctcagccaagcttgttatcagctttcanggcccatggttcacattagaataaaaggtagtaactaaaaaaaaaaaaaaaaaaaaaaaaaaantcncctcggcccnttttaac

SEQ ID NO: 9278 - DNA, 873 bp, Homo sapiens
  misc_feature 602, 662, 681, 699, 713, 737, 756, 763, 764, 771, 775, 781,793, 799, 811, 813, 818, 821, 829, 831, 832, 835, 836, 847,859, 865, 870, 871: n = A,T,C or G
gcgcgtaatacgactcactatagggcgaattggagctccaccgcggtggcggccgaggtcggcgccggaggagacgcacgcagctgactttgtcttctccgcacgactgttacagaggtctccagagccttctctctcctgtgcaaaatggcaactcttaaggaaaaactcattgcaccagttgcggaagaagaggcaacagttccaaacaataagatcactgtagtgggtgttggacaagttggtatggcgtgtgctatcagcattctgggaaagtctctggctgatgaacttgctcttgtggatgttttggaagataagcttaaaggagaaatgatggatctgcagcatgggagcttatttcttcagacacctaaaattgtggcagataaagattattctgtgaccgccaattctaagattgtagtggtaactgcaggagtccgtcagcaagaaggggagagtcggctcaatctggtgcagagaaatgttaatgtcttcaaattcattattcctcagatcgtcaagtacctcggccgctctagaactagtggatcccccgggctgcaggaattcgatattcaagcttatcgataccgtcnacctccaagggggggcccggtcccaactttgttccctttagtgaggggttaattgccccnccttggcgttaatcatggncatagcttgtttccctgngtgaaattggttantccgttcacatttccccccaacantacccaacccggggagccntaaaagnngtaaaancctngggggngcctattgaggngagccnaccccccatttnanttggnggntggggctnanntgnnccctttttaantaggggaaaaantctggnggccnncc

SEQ ID NO: 9279 - DNA, 601 bp, Homo sapiens
  misc_feature 2, 29, 48, 504, 567, 589, 594: n = A,T,C or G
gnccacgcgtccgcccacgcgtccggggnagttccgggcggtgacggnagctggggcggcctgatgaggagtactggaacagccagaaggacttcctggaagacaggcgggccgcggtggacacctactgcagacacaactacggggttgtggagagcttcacagtgcagcggcgagtccatcctaaggtgactgtgtatccttcaaagacccagcccctgcagcaccacaacctcctggtctgttctgtgagtggtttctatccaggcagcattgaagtcaggtggttccggaatggccaggaagagaagactggggtggtgtccacaggcctgatccacaatggagactggaccttccagaccctggtgatgctggaaacagttcctcggagtggagaggtttacacctgccaagtggagcacccaagcgtgacaagccctctcacagtggaatggagagcacggtctgaatctgcacagagcaagatgctgagtggagtcnggggctttgtgctgggcctgctcttccttggggcccgggctgttcatctacttcaggaatcanaaaggacacttttggacttcanccaanaagattc

SEQ ID NO: 9280 - DNA, 617 bp, Homo sapiens
  misc_feature 3, 4, 5, 8, 9, 10, 16, 570: n = A,T,C or G
ggnnngcnnncatttngggatcgacccccgtctgcatcagtgctcttgacccacgtccagcgagccttttccccggttccgggctcagggctcgttctggtctgcctagtcctgggagctgtgcggtcttatgcattggaacttaatttgacagattcagaaaatgccacttgcctttatgcaaaatggcagatgaatttcacagttcgctatgaaactacaaataaaacttataaaactgtaaccatttcagaccatggcactgtgacatataatggaagcatttgtggggatgatcagaatggtcccaaaatagcagtgcagttcggacctggcttttcctggattgcgaattttaccaaggcagcatctacttattcaattgacagcgtctcattttcctacaacactggtgataacacaacatttcctgatgctgaagataaaggaattcttactgttgatgaacttttggccatcagaattccattgaatgacctttttagatgcaatagtttatcaactttggaaaagaatgatgttgtccaacactactgggatgttcttgtncaagcttttgtccaaaatggcacagtgagcacaaatgaattcctgtg

SEQ ID NO: 9281 - DNA, 833 bp, Homo sapiens
  misc_feature 3, 4, 7, 11, 15, 23, 24, 26, 29, 547, 558, 657, 662, 667,692, 720, 752, 761, 774, 787, 825, 827: n = A,T,C or G
agnntanttantcangcaactanntntcnggtgaatggggccctctagatgcatgctcgagcggccgccagtgtgatggatatctgcagaattcgcccttagcgtggtcgcggccgaggtacgacgagtcgggcccctccatcgtccaccgcaaatgcttctagacggactcagcagatgcgtagcatttgctgcatgggttaattgagaatagaaatttgcccctggcaaatgcacacacctcatgctagcctcacgaaactggaataagccttcgaaaagaaattgtccttgaagcttgtatttgatatcagcactggattgtagaacttgttgctgattttgaccttgtattcaagttaactgttccccttggtattaacatgtcagggctgaatgttctgggatttctctagaggctggcaagaaccagttgtttttgtcttgcgggtctgtcagggttggaaagtccaagccgtaggacccagtttcctttcttaactgatgtctttggccagaacaccgtgggctgttaacttgccttganttggaagcggnttgcatttacccctgtaaatgtattcattcttaatttatgtaaaggttttttgtactctcaaaatgtttgtcatatgcttcttgccatgcatatttttnatctnaaacntttcaattaaaccatttttcagatntaaagagaattcttcaaatgagtaattnaaaaaactcagaattaaattaaaaagggtttngacttgggnaaaaagatttttncctttttactganaaaacctgcccggggggcgtttaaggggaattccaccncntggggc

SEQ ID NO: 9282 - DNA, 512 bp, Homo sapiens
  misc_feature 12, 15, 19, 21, 38, 458: n = A,T,C or G
ggtaggtccgtntangacntncgacttactatatggcnaattggagctccaccgcggtggcggcccgcccgggcaggtaccggtcacttacgcgtcagagcagtgactttgatacgcagtcaggtttttccattaatagtcaggtctttgctgcagatggtgcctccactgagacttccgcatctgggacctcccaaggagaggcttcaactccagaggagtctcgagatgggaagaaagataaagaaggggaccgggcctctgaggaaggcaaacagaaaggcaagggcagcaaacctttaatgcctacctccactatccttcgtcttctggcagagttggtgaggtcctatgttggtattgctaccctgattgccaactacagctacactgtgggccagtctgaactgatcaaagaggactgcagtgtgctagcttttgttctggaccacctgctnccacatacccagaatgcagaagacaaggacacccctgcttggcccgctgttcct

SEQ ID NO: 9283 - DNA, 854 bp, Homo sapiens
  misc_feature 5, 11, 12, 673, 710, 718, 755, 797, 851, 852, 853: n = A,T,C or G
ttgtngacgcnntaatacgactcactatagggcgaattggagctccccgcggtggcggcccgaggtacaaaaatatttaacagaactatgaaagatgcaggaaaggagtctttcttcgtagcaaagtagtcgttgctttgcatggtttcttttgtatactcttcagggtttgtttatctgccccatgaataacacagcacctgtaggattatgtcggatgaaaaacagaaaaggtctgtctactataaaccagggaggcgatgatcttgcaatgagaattgcagttgttgctgctgaagctttggttccatcttcactgacttcaatttttgctttttgcaagatatgagaaacatggaggttttctgaccttgttatttttgcaaaatttgcctttgatgaatcaaacatgtcagtaatgccaagaactttcagcggctccttcaaatctgtttgtgctacagctgtgaacttgggcaggatcacctgcaccctcttgggcaccatgatgctcatccagctgtctatggtcttggtgctgatgtgtgggatgatggcagacagcggagtggagctctcagtcggcagtgcaatcaacatgctgatgctttccccgtggtagggcagttcaatgaagttgtacctcggccgctctagaactagtggatccccnggctgcaggaattcatatcaagcttatcgatccgtcnacctcganggggggccccggtcccaacttttgttcctttaatganggttaattgcgcgcttggcgtaatcatgggcataacttgttncctgggtgaaaatggtatccgctcacaaattcccccacatacaagccgggagcnnnt

SEQ ID NO: 9284 - DNA, 718 bp, Homo sapiens
  misc_feature 4, 7, 12, 674: n = A,T,C or G
gagnttntcctntatagggagtcgacccacgcgtccggagccctacatgaagatcccttgcaatgactctaaaatcaccagtgctgtttggggacccctgggggagtgcatcatcgctggccatgagagtggagagctcaaccagtatagtgccaagtctggagaggtgttggtgaatgttaaggagcactcccggcagatcaacgacatccagttatccagggacatgaccatgtttgtgaccgcgtccaaggacaacacagccaagctttttgactccacaactcttgaacatcagaagactttccggacagaacgtcctgtcaactcagctgccctctcccccaactatgaccatgtggtcctgggcggtggtcaggaagccatggatgtaaccacaacctccaccaggattggcaagtttgaggccaggttcttccatttggcctttgaagaagagtttggaagagtcaagggtcactttggacctatcaacagtgttgccttccatcctgatggcaagagctacagcagcggcggcgaagatggttacgtccgtatccattacttcgacccacagtacttcgaatttgagtttgaggcttaagaagctggatctcctgccgggcgtggtggctcatgcctgtaatcccaccactttttttttaaggcangcggatcacctgaggtcaggagtttaagaccagcctgaccaaca

SEQ ID NO: 9285 - DNA, 611 bp, Homo sapiens
  misc_feature 611: n = A,T,C or G
cacgcgtccgcctatataaaaagtatgtttacatttaaaaaattagtagataacttcctttctttcaagtgcacaatttcattttgacttgagtcaacttttgttttggaacaaattaagtaagggagctgcccaatcctgtctgatatttcttgaggctgccctctatcattttatctttcccatgggcagagatgttgtaagtgggattcttaatatcaccattcttgggactggtatacataaggcagccgtgaaactggaaagtcattttgatgactgatgtgatacatccagaggtaaaatgcatttaaacatattaaagtatttgccaaagatacaattttcttgctgacataaaaatcacacaaacaagtcccccccaaaccacaactgtctctcaaatagcttaaaaaaattgaaaaacattttaggatttttcaagttttctagattttaaaaagatgttcagctattagaggaatgttaaaaattttatattatctagaacacaggaacatcatcctgggttattcaggaatcagtcacacatgtgtgtgtgtctgagatatagtctaaattagcaaagcacatagtattacatacttgan

SEQ ID NO: 9286 - DNA, 783 bp, Homo sapiens
  misc_feature 3, 4, 5, 7, 9, 25, 492, 493, 494, 495, 496, 498, 499, 500,501, 502, 503, 504, 505, 506, 507, 508, 509, 510, 511, 512,513, 514, 515, 516, 517, 518, 519, 520, 521, 523, 525, 526,527, 528, 530, 531, 532, 533, 534, 535, 536, 537, 538: n = A,T,C or G
  misc_feature 539, 540, 541, 542, 543, 544, 545, 546, 547, 548, 549, 550,551, 552, 553, 554, 555, 556, 557, 558, 559, 560, 561, 563,564, 565, 566, 567, 568, 569, 570, 571, 572, 573, 574, 575,576, 577, 578, 579, 580, 581, 582, 583, 584, 586, 587: n = A,T,C or G
  misc_feature 588, 589, 590, 591, 592, 593, 594, 595, 596, 597, 598, 599,600, 601, 602, 603, 604, 605, 606, 607, 608, 609, 610, 611,612, 613, 614, 615, 616, 617, 618, 619, 620, 621, 622, 623,624, 625, 626, 627, 628, 629, 630, 631, 632, 633, 634: n = A,T,C or G
  misc_feature 635, 636, 637, 638, 639, 640, 641, 642, 643, 644, 645, 646,647, 648, 649, 650, 651, 652, 653, 654, 655, 656, 657, 658,659, 660, 661, 662, 663, 664, 665, 666, 667, 668, 669, 670,671, 672, 673, 674, 675, 676, 677, 678, 679, 680, 681: n = A,T,C or G
  misc_feature 682, 683, 684, 685, 686, 687, 688, 689, 690, 691, 692, 693,694, 695, 696, 697, 698, 699, 700, 701, 702, 703, 704, 705,706, 707, 708, 709, 710, 711, 712, 713, 714, 715, 716, 717,718, 719, 720, 721, 722, 723, 724, 725, 726, 727, 728: n = A,T,C or G
  misc_feature 729, 730, 731, 732, 733, 734, 735, 736, 737, 738, 739, 740,741, 742, 743, 744, 745, 746, 747, 748, 749, 750, 751, 752,753, 754, 755, 756, 757, 758, 759, 760, 761, 762, 763, 764,765, 766, 767, 768, 769, 770, 771, 772, 773, 774, 775-783: n = A,T,C or G
agnnngncngcgtttactactactntagggcgaattggagctccacccgcggtggcggcccgatcctgagccacctttggaagagctgggctaccacatctactccagcgacccaccttttgaagttcgtggtgccaatcagtggatcaagtttaagtcagtcagttaaggggaggagaaggagaggttataccttcagggggctaccagacagtgttctcaacttggttaaggaggaagaaaacccagtcaatgaaattcaatgaaattcttggaaacttccattaagtgtgtagattgagcaggtagtaattgcatgcagtttgtacctcggccgctctagaactagtggatcccccgggctgcaggaattcgatatcaagcttatcgataccgtcgacctcgagggggggcccggtacccagcttttgttccctttagtgagggttaattgcgcgcttggcgtaatcatggtcatagctgttcctggannnnnannnnnnnnnnnnnnnnnnnnnnnnantnnnntnnnnnnnnnnnnnnnnnnnnnnnnnnnnnnnngnnnnnnnnnnnnnnnnnnnnnntnnnnnnnnnnnnnnnnnnnnnnnnnnnnnnnnnnnnnnnnnnnnnnnnnnnnnnnnnnnnnnnnnnnnnnnnnnnnnnnnnnnnnnnnnnnnnnnnnnnnnnnnnnnnnnnnnnnnnnnnnnnnnnnnnnnnnnnnnnnnnnnnnnnnnnnnnnnnnnnnnnnnnnnnnnnnnnnnnnnnnnnnnnnnnnnnnnnnnn

SEQ ID NO: 9287 - DNA, 581 bp, Homo sapiens
  misc_feature 6, 8, 10, 12: n = A,T,C or G
gttttncntncnaatccctatagggcgaattgggccctctagatgcatgctcgagcggccgccagtgtgatggatatctgcagaattcggctttcgagcggccgcccgggcaggtacacagccagagtaaccaaagataacactaatataatgtatgggaaggcgtaatataaaaggcctccaccaactgcctgaagcacggttaaaattgggaagaagtaaagtgcagcataaatacttttaaatcgatcagatttccctaacccacatgcaatcttcttcaccagaagaggtcggagcagcatcattaataccaagcagaatgcgtaatagataaatacaatggtatatagtgggtagacggcttcatgagtacctcggccgcgaccacgctaagccgaattccagcacactggcggccgttactagtggatccgagctcggtaccaagcttggcgtaatcatggtcatagctgtttcctgtgtgaaattgttatccgctcacaattccacacaacatacgagccggaagcataaagtgtaaagcctggggtgcctaatgagtgagctaactcacatta

SEQ ID NO: 9288 - DNA, 721 bp, Homo sapiens
  misc_feature 8, 11, 42, 262, 279, 324, 333, 337, 344, 346, 349, 352, 374,381, 383, 399, 400, 401, 415, 417, 427, 430, 431, 432, 439,445, 454, 457, 458, 459, 464, 468, 469, 470, 473, 475, 477,488, 493, 495, 504, 509, 519, 529, 536, 545, 547: n = A,T,C or G
  misc_feature 552, 555, 559, 560, 564, 565, 578, 580, 581, 585, 587, 589,590, 593, 594, 600, 604, 609, 611, 623, 625, 626, 627, 628,629, 642, 643, 644, 647, 648, 651, 658, 664, 671, 673, 676,679, 681, 691, 694, 695, 696, 698, 703, 706, 712, 713: n = A,T,C or G
  misc_feature 714, 718: n = A,T,C or G
tttgaggnttnccgggggcggcgccgggcaggtacttaaacncttgataagccttcagtaaaagcagcaccaattgctaggccatcgctgaaattgtgcaggccatcacccattatcaccatccaggccagagtggcgacgccggcatctttcagctcctcccgagagtagcgctggctgtgactgtgaggatggtggttttggtggtggtgatgatggagaatatgatggtagtcatgatggtggtgaatgagatcgtctnactggccgagtgtattngtggaaatgtgaatggcatttattcttgcaccctctgggtacctnggcccgttntaanaactagngnatnccncgggtttttaagagaaatctcnatatttncntcttttttagattccnnntccatctccttagngngggggggccnccnnncacccantttttntttctcctnttnnngtggngggnnntantntnccccctccttnggttntnatataattnatacnaacttcttcnttcctttgtngaataangttttattntntcttntanattnntctnnaaaatattattancnntctngntnnttnnaataantatntacancnggtgggtctctnannnnnggggatgtcttannnccnnttnaatttgntagtcntctaccntnccntcntnttactattgnaannncnttctnttnccacannntatntat

SEQ ID NO: 9289 - DNA, 721 bp, Homo sapiens
  misc_feature 502, 542, 580, 640, 652, 704, 721: n = A,T,C or G
gagcgcgcgtaatacgactcactatagggcgaattggagctccaccgcggtggcggccgaggtacagaaacttaccggcctagttctgcctcacagtgtgtggctggtattgcttgtgcagagatcccagtaaaccagtggccagaactcattcctcagctggtggccaatgtcacaaaccccaacagcacagagcacatgaaggagtcgacattggaagccatcggttatatttgccaagatatagacccagagcagctacaagataaatccaatgagattctgactgccataatccaggggatgaggaaagaagagcctagtaataatgtgaagctagctgctacgaatgcactcctgaactcattggagttcaccaaagcaaactttgataaagagtctgaaaggcactttattatgcaggtggtctgtgaagccacacagtgtccagatacgagggtacctcggccgctctagaactagtggatcccccgggctgcanggaattcgatatcaagcttatcgataccgtcgacctcganggggggcccggtacccagcttttgttccctttagtganggttaattgcgcgcttggcgtaatcatggtcatagctggttcctgtgtgaaattggtatncgcttacaattncacacaacataccaaccggggagcataaaagtgtaaaagcctggggtgcctnatgagtgagctaactcn

SEQ ID NO: 9290 - DNA, 698 bp, Homo sapiens
  misc_feature 6, 27, 423, 443, 454, 485, 488, 498, 529, 534, 541, 572,588, 589, 601, 604, 636, 654, 661, 663, 665, 674, 675, 684,686, 691: n = A,T,C or G
gatttnaatacgactcactatagggcnaattgggccctctagatgcatgctcgagcggccgccagtgtgatggatatctgcagaattcggcttagcgtggtcgcggccgaggtaccctgaacagtggcccaaaggccactgatcaaaaataaaatagtggctgtatatcaatgaaatgaaatccaagaagctttaaccctttggcatcagaaatccagatttttccaattatgtaaatgcttatttcttacatgccaagagtgggagaagtgaatgtgccaatgtggaaagaaaaaaagccaccactcactgggacacccagagaattggcttttaacagacaattaggggggttaggcagaaaacccagaaatggttattagctgcttgtgtcatcaatttaagtgggagattgactgagtncctaaaggtaccctgccccngggcggcccgntcgaagcccgaattccagcacacttggcggncgnttactaagtnggatccgagctcggtacccaagcttgggcgntaatnatgggcnatagcttgtttcccttgtgtgaaatttggtntccgctcacaattccnnaccaacataccnagnccgggaagcataaaggtgtaaaggcctggggntgccttaatgaggggagnttaactncncnttaaattgnngtttgcgcncncttgncccgttt

SEQ ID NO: 9291 - DNA, 575 bp, Homo sapiens
  misc_feature 30, 36: n = A,T,C or G
ccccgcgtccggccatcggtggggcggggnacgcgngtgtggatggggggtcgccttgacctctgcctcagccagtagcgcagtctcggcctcgccgttacggagatggtgccctgggtgcggacgatggggcagaagctgaagcagcggctgcgactggacgtgggacgcgagatctgccgccagtacccgctgttctgcttcctgctgctctgtctcagcgccgcctccctgcttcttaacaggtatattcatattttaatgatcttctggtcatttgttgctggagttgtcacattctactgctcactaggacctgattctctcttaccaaatatattcttcacaataaaatacaaacccaagcagttaggacttcaggaattatttcctcaaggtcatagctgtgctgtttgtggtaaagtgaaatgtaaacgacataggccttctttgctacttgaaaactaccagccatggctagacctgaaaatttcttccaaggttgatgcatctctctcagaggttcttgaattagtgttggaaaactttgtttatcccgtggtacagggatgtga

SEQ ID NO: 9292 - DNA, 594 bp, Homo sapiens
  misc_feature 5, 594: n = A,T,C or G
tcaanctgggagacgcatataatatgaggcatccacttactggtggaggaatgactgttgcttttaaagatataaaactatggagaaaactgctaaagggtatccctgacctttatgatgatgcagctattttcgaggccaaaaaatcattttactgggcaagaaaaacatctcattcctttgtcgtgaatatccttgctcaggctctttatgaattattttctgccacagatgattccctgcatcaactaagaaaagcctgttttctttatttcaaacttggtggcgaatgtgttgcgggtcctgttgggctgctttctgtattgtctcctaaccctctagttttaattggacacttctttgctgttgcaatctatgccgtgtatttttgctttaagtcagaaccttggattacaaaacctcgagcccttctcagtagtggtgctgtattgtacaaagcgtgttctgtaatatttcctctaatttactcagaaatgaagtatatggttcattaagcttaaaggggaaccatttgtgaatgaatatttggaacttaccaagtcctaagagacttttggaagaggatatatatan

SEQ ID NO: 9293 - DNA, 812 bp, Homo sapiens
  misc_feature 677, 690, 692, 738, 762, 803: n = A,T,C or G
gcgtaatacgactcactatagggcgaattggagctccaccgcggtggcggccgaggtacaaaggttccaagggacaggaccaagaacgaggggctgagacatttacaacagcaggcattttctcttcctcttcttcacgggaggcgggcagaggactgctcggatcgcttcgtcaaacactgtcttgaggcctcgctgtgtgagcgccgagcactccaggtattttacagcaccaatctccttagccatggctagaccctgcggataggtgatgggagtcagcttcttctccttcagtttctcgatcgtgtctttatcatccctaagatcaagtttagttcccactaggatgatgggagtgttgggacagtggtgccgcacctcaggataccactttgcacggacattttcaaatgatgcaggactcacaagggaaaagcaaattaagaacacatcggcaatcggcttgtctttgccccgggaggttatatccttaccgtacctcggccgctctagaactagtggatcccccgggctgcaggaattcgatatcaagcttatcgatccgtcgacctcgagggggggcccgggacccagcttttggtccctttatgagggtaattgcgcgcttggcgtaatcatggtcataagctgtttcctgtgtgaaaattggtatncgctcacaaattncncacaacataccagcccgggagcataaagtgtaaaagccctgggggngcctaatgagtggagcttacctcnccattaaattgcgttgccgctcactggcccgtttttcaagnccggggaat

SEQ ID NO: 9294 - DNA, 492 bp, Homo sapiens
  misc_feature 5: n = A,T,C or G
tattnggcgaatggggccctctagatgcatgctcgagcggccgccagtgtgatggatatctgcagaattcgccctttcgagcggccgcccgggcaggtaccatggcagtcatgcaaagcatgggacagaagaaataccacggcagtgaactgtgaggataacttccattttttccctcggagagaacagtttacggggcagaggtgatatgttctgccttttgaagattactggcacacgttcagctttttcacctctctaatcgactggaagcagccagccgatcactagtcctccatccccctcgagtcctccgattgtcatgcctaggccttgccacaaagacagcacctttatgtgaaaaaaaacttagaaaaaatgcaggttaaagaaagcaataaactttctttaaaaaagttaaatggagatcttctgggaaaccaagccatgaatgcgagtttgtacctcggccgcgaccacgctaagggcgaa

SEQ ID NO: 9295 - DNA, 501 bp, Homo sapiens
  misc_feature 2, 6, 8, 9, 10, 12, 13, 14, 15, 16, 24, 419, 446, 481: n = A,T,C or G
angtgngnnnannnnnatagggcnaattgggtaccgggccccccctcgaggtcgacggtatcgataagcttgatatcgaattcctgcagcccgggggatccactagttctagagcggccgaggtaccaaagatttaattaaaagtaagtggggatcgaagcctagtaactccaaatccgaaactacattagaaaaattaaagggagaaattgcacacttaaagacatcagtggatgaaatcacaagtgggaaaggaaagctgactgataaagagagacacagacttttggagaaaattcgagtccttgaggctgagaaggagaagaatgcttatcaactcacagagaaggacaaaagaaatacagcgactgagagaccaactgaaggccagatatagtacctgcccggacctgcccggncggccgccccgcggtggagctccagcntttgttccctttagtgaggggttaatgcgcccttngcgtaatcatggcataagct

SEQ ID NO: 9296 - DNA, 517 bp, Homo sapiens
  misc_feature 2, 3, 4, 15, 17, 30, 31: n = A,T,C or G
gnnngaccgcgatancnactactgagggcnnattggagctccccgcggtggcggccgaggtaccatttgtggtgcccaagtttaagttatcttacattcaacccaggacacaagaaactccttcacatctggaagaacttgaaggatctgccagagcatcttttggagatcgaaaggtagaactttccagttcatcccagcacgaacctagctatgatgtgtataacccattctatatgtatcagcacatttcacctgatttgagtcgacgctttcctccccgttcagaagtgacgagactgtatggatcggtttgtgatttaaggacgaacaaacttcccggttcccctgggctaagcaaatctatgtttgatcttacaaactcatctcagcgattcatccagagacatgattcattgtccagtgtacctcggccgctctagaactagtggatcccccgggctgcaggaattcgatatcaagcttatcgataccgtcgacctcgagggggggccct

SEQ ID NO: 9297 - DNA, 640 bp, Homo sapiens
  misc_feature 90, 241, 244, 563, 612, 621: n = A,T,C or G
cgcgcgtaatacgactcactatagggcgaattggagctccaccgcggtggccgagcggccgcccgggcaggtaccggttggaaggcactncctggtgtaatctgagatactgcacagacccatccactgtggaggacaagtgtgagaaggcctgccgccccgaggaggagtgccttgccctcaacagcacctggggctgtttctgcagacaggacctcaatagttctgatgtccacagttngcngcctcagctagactgtgggcctagggagatcaaggtgaaggtggacaaatgtttgctgggaggcctgggtttgggggaggaggtcattgcctacctgcgagacccaaactgcagcagcatcttgcagacagaggagaggaactgggtatctgtgaccagccccgtccaggctagtgcctgcaggaacattctggagagaaatcaaacccatgccatctacaaaaacaccctctccttggtcaatgatttcatcatcagagacaccatcctcaacatcaacttccaatgtgcctacccactggacatgaaagtcagcctncaagctgccttgcaacccattgtaagttccctgaacgtcagtgtggacnggaatgganagttcatttgtcaggatgg

SEQ ID NO: 9298 - DNA, 629 bp, Homo sapiens
  misc_feature 3, 4, 8, 23, 36, 628, 629: n = A,T,C or G
ggnntcgnccacgcgtccgcggncgcgtgggctagnatcagcgctggttgtaaatgcatgctgtacctcactgttttctccccatcatgccgctaaacttgctcgccaggttgtgcttaacttgtggtgaactggacttgattctgttttgttttgtttttttaaaaaaaaaaaacaaaaatgtaagggacagtgcataagccttttctttgttaagtagtggtgttttgctttttcttcaggattggatggcatgttgtccacaggaatgcctactgcagggctaacactggcaatatggcagctttaaattctgagttactacagtctccatgtcaaagcataatgtgtagcatatcagcaataactacatatttatagaaaacactttttcactttactgagccaattcatttaattgtcaaatgtctatatccatggtttaaatggcaacatatctataagtatgtatacacattatatttaagcttttctctgggccaaactgcttcatccttttttctttctttttttttttttttagccttatgatgaatttgtttgaagggcattttctttatgaacaaaggcttggatgcatattcctttctttctgtgaatgggtatnn

SEQ ID NO: 9299 - DNA, 644 bp, Homo sapiens
  misc_feature 86, 87, 91, 528, 582, 639: n = A,T,C or G
agcgcgcgtaatacgactcactatagggcgaattggagctccaccgcggtggcggccgcccgggcaggtacgcgggggcacacatnngttncaggccccattccattctctgaacatcttctgacacactgacagtgctgagcagagcaaggttgggttcgctcctctggcagaacctcggctctcaggaggtccttgttccagggaacagctgcttctctggggctgggctctactccctgcagcccctcgcactacccagctggaaccagggacaacgcctgagtccaaccctcgtgtctattttccagaaaacgggcaatgctgtgagagccattggaagactgtcctctatggcaatgatctcagggctcagtggcaggaaatcctcaacagggtcaccaaccagcccgctcaatgcagaaaaactagaatctgaagaagatgtgtcccaagctttccttgaggctgttgctgaggaaaagcctcatgtaaaaccctatttctctaagaccattcgcgatttanaagttgtggagggaagtgctgctagatttgactgcaagattgaaggatacccanaccccgaggttgtcttggttcaaagatgaccagtcaatcagggagtccccccacttncaaaa

SEQ ID NO: 9300 - DNA, 795 bp, Homo sapiens
  misc_feature 14, 48, 116, 117, 211, 338, 353, 417, 434, 495, 497, 574,593, 598, 621, 626, 630, 640, 681, 700, 714, 738, 741, 751,755, 768, 781, 782: n = A,T,C or G
tcctattacgccanctggcgaaagggggatgtgctgcaaggccgattnagttgggtaacgccagggttttcccagtcacgacgttgtaaaacgacggccagtgaattgtaatacgnntcactatagggggaattgggccctctagatgcatgctcgagcggccgcagtgtgatggatatctgcagaattcgcccttggcagcttgggggangatgacatgcatgtcggactcacattctatgcttggctgaacaaggatcaactgctttattagaccagattcacagcatacctgcggacccgtgggtcgacccgggaattcggaccggtacctgcangcgtaccagcttttncaagggcgaaattccagcacactggcgggccgttactaagtggatccgaagctcggtacccaancttggcgtaatcatggncataagcttgttttcctggtgtgaaaaatggtatcccgcttacaattccacacaacatacnancccggaaagcattaaagtgtaaaagccctgggggtgccctaaatgaggtggagcctaacttcacattaaattggcgnttgcgcctcacttgcccgnttttncaagtcgggaaaaccttgtcgtngccancctngcattaatgnaatcgggcccaacccccccgggggaaaagccgggtttgcgntatttggggcgcctttttncccttttctttggnttaaatgacttcgcttgggctttnggncgtttccggnttgngggcaagcgggtntcaacttaacttnnaaagggggggaat

SEQ ID NO: 9301 - DNA, 871 bp, Homo sapiens
  misc_feature 3, 4, 11, 587, 597, 607, 641, 659, 714, 715, 725, 755, 770,772, 783, 812, 850, 856, 857: n = A,T,C or G
agnngacgccntaatacgactactatagggcgaattggagctccaccgcggtggcggcccgcacagtaacagtaatagtcagcctcatcctcaacgtgggccccactgatggtcaaggtgactgtggtccgtgaactggagccggagaatcgctcagagatccctgagggccgctcgctgtctttatacatcactaacacaggggcctggcctggcttctgctggaaccaccgagcatctttttttgccagtacctcggccgggaccgagggtttggtgcacctcgatttggaggaagtagggcagggcccttatctggaaagaagtttggaaaccctggggagaaattagttaaaaagaagtggaatcttgatgagctgcctaaatttgagaagaatttttatcaagagcaccctgatttggctaggcgcacagcacaagaggtggaaacatacagaagaagcaaggaaattacaagttagaggtcacaactgcccgaaccagttctaaacaattatttttactaaaatgcataattatgtgatagttatacatataccaacctgttatgtgagaacaaagctganctgcaagtanttccaaggcnagtgaattaattactggttgtaccctcgggccgntctagaactaattggatncccccggcttgcaaggaattcgatattaaagcttattcgaataccggccaacctnnaagggggggncccgggacccaacttttggttcctttaatngaagggttaattgcncnctttggggtantcattgggcatagctgtttcctggggggnaaattgttttccgttccaatttccaacaaaattaccancccggnnccataaatgtaaat

SEQ ID NO: 9302 - DNA, 364 bp, Homo sapiens
  misc_feature 4, 19, 21, 22, 23, 27, 30, 32, 44, 215, 219, 221, 223, 233,252, 255, 258, 264, 265, 267, 268, 269, 272, 274, 275, 277,278, 279, 281, 282, 283, 288, 289, 290, 291, 292, 293, 294,295, 296, 297, 305, 306, 307, 308, 309, 310, 311, 313: n = A,T,C or G
  misc_feature 314, 315, 316, 318, 319, 320, 321, 322, 323, 324, 325, 326,327, 328, 329, 330, 331, 332, 333, 334, 336, 337, 338, 339,340, 341, 342, 343, 344, 345, 346, 347, 348, 349, 350, 351,353, 354, 355, 356, 357, 358, 359, 360, 361, 362, 363: n = A,T,C or G
  misc_feature 364: n = A,T,C or G
accnatacctacttcactntnnngtcnacntngggcccctctanagccatgctcgagcggccgccagtgtgatggatatctgcagaaattcggcttctaatacgactcactatagggctcgagcggccgcccgggcaggtacttttttttttttttttttttttttttttttttttttttttttttttttttttttttttttttttttttttttncttntntntttttttttnttttttttttttttttttntantcntttttnnannncantnncnnncnnnactannnnnnnnnntttttttnnnnnnncnnnncnnnnnnnnnnnnnnnnntnnnnnnnnnnnnnnnnannnnnnnnnnnn

SEQ ID NO: 9303 - DNA, 400 bp, Homo sapiens
gcgtatacgactcactatagggcgaattggagctccaccgcggtggcggccgaggtacaggtgactaccctagttcaaaacaaccactttctcaggcttctcatgtgtgtagctaagctaccttgtcatatgtgttgattcttgaaaactgggacgtgtatttccattgggggttggccatttatgctgacatgccatccttccagcaaacgtacctgcccgggcggccgctctagaactagtggatcccccgggctgcaggaattcgatatcaagcttatcgataccgtcgacctcgagggggggcccggtacccagcttttgttccctttagtgagggttaattgcgcgcttggcgtaatcatggtcatagctgtttcctgtgtgaaattgttatccg

SEQ ID NO: 9304 - DNA, 482 bp, Homo sapiens
  misc_feature 4, 7: n = A,T,C or G
gacntanttgttggctgattggagctccaccgcggtggcggccgcccgggcaggtacaaaggtgcaatctcggctcaccacaacctccgcctcttgggttcaagcaattctcctgcctcagcctcctgagcagctgggattacaggcatgtgccaccacgcctggctaacttttctgtattttcagtagagactgggtttctccatgttggtcaggctggtctcaaactcccgacctcaggtgatccgcccacctcggcctcccaaagtgctgggattacaggcaggagccaccacgcccggccaggaagccatttttcatgggagggatatagggagaggaaggcgatatttacatcccactctgcacaactcagtacctcggccgctctagaactagtggatcccccgggctgcaggaattcgatatcaagcttatcgataccgtcgacctcgagggggggcccggtacccagcttttgt

SEQ ID NO: 9305 - DNA, 727 bp, Homo sapiens
  misc_feature 1, 4, 5, 9, 10, 12, 15, 16, 20, 22, 23, 27, 28, 30, 32, 37,41, 42, 43, 68, 72, 77, 84, 102, 120, 169, 189, 197, 241,242, 251, 266, 275, 293, 319, 331, 354, 394, 432, 434, 435,437, 441, 442, 446, 447, 449, 464, 482, 504, 520, 562: n = A,T,C or G
  misc_feature 564, 566, 581, 589, 596, 598, 604, 605, 627, 629, 634, 639,652, 654, 657, 658, 675, 677, 686, 713, 716, 718, 719, 720,726, 727: n = A,T,C or G
nttnncttnntnatnnattnanntatnnantntttantatnnntaggttaggccgatcactactatanggcnaactntagggcnaattggagctccacccgnggtgggcggctcgcccgngcaggtacacctttgaatgacaatgctcggagctccccttgtggtcatngacgcctccactgccattgntgcaccanccaacctgcgttttctggccaccacacccaatttccttgctggnntcatggcanccgccacgtgccatngattacccngctacatcatcaaagttntgagaagcctggggtcttcctcccanaagaaatgggtncctcgtgccccgcccttggtgtnacagaggctactattactggccttggaaccgggaaacccnaatattacaatttatgtcattgcccctgaagaaatttntnnangaannagcnngncccccttgtatttgnggaaagggaaaaaaaagnaccagggactaaaggaaaggcnttctttttctttcaantaacaaaacccattttttattgggggggccccccctatttcncnangggaactaccttttntttgtagntaacccntntcgggnncccggctttttaagaaaaactnanatttngggantccccccccgggncnttnncgataggggaaaatttntnaaataattnaaaggcctttaatttcggatttacccngtntnnnaacccnn

SEQ ID NO: 9306 - DNA, 650 bp, Homo sapiens
  misc_feature 8, 9, 31, 33, 40, 211, 230, 265, 286, 294, 319, 344, 355,358, 359, 375, 377, 384, 385, 386, 387, 388, 389, 390, 391,392, 393, 394, 395, 396, 397, 398, 399, 400, 401, 402, 403,404, 405, 406, 407, 408, 409, 410, 411, 412, 413, 414: n = A,T,C or G
  misc_feature 415, 416, 417, 418, 419, 420, 421, 422, 423, 424, 425, 426,427, 428, 429, 430, 431, 432, 433, 434, 435, 436, 437, 438,439, 440, 441, 442, 443, 444, 445, 446, 447, 448, 449, 450,451, 452, 453, 454, 455, 456, 457, 458, 459, 460, 461: n = A,T,C or G
  misc_feature 462, 463, 464, 465, 466, 467, 468, 469, 470, 471, 472, 473,474, 475, 476, 477, 478, 479, 480, 481, 482, 483, 484, 485,486, 487, 488, 489, 490, 491, 492, 493, 494, 495, 496, 497,498, 499, 500, 501, 502, 503, 504, 505, 506, 507, 508: n = A,T,C or G
  misc_feature 509, 510, 511, 512, 513, 514, 515, 516, 517, 518, 519, 520,521, 522, 523, 524, 525, 526, 527, 528, 529, 530, 531, 532,533, 534, 535, 536, 537, 538, 539, 540, 541, 542, 543, 544,545, 546, 547, 548, 549, 550, 551, 552, 553, 554, 555: n = A,T,C or G
  misc_feature 556, 557, 558, 559, 560, 561, 562, 563, 564, 565, 566, 567,568, 569, 570, 571, 572, 573, 574, 575, 576, 577, 578, 579,580, 581, 582, 583, 584, 585, 586, 587, 588, 589, 590, 591,592, 593, 594, 595, 596, 597, 598, 599, 600, 601, 602: n = A,T,C or G
  misc_feature 603, 604, 605, 606, 607, 608, 609, 610, 611, 612, 613, 614,615, 616, 617, 618, 619, 620, 621, 622, 623, 624, 625, 626,627, 628, 629, 630, 631, 632, 633, 634, 635, 650: n = A,T,C or G
gcgcgttnnacgtacttcactttgagggccnanttggaanctccaccgcggtggcggccgccacgctggttttgcatcttcaggaagacgctcgtagccctcgcgcttctcctcggccaattcgcggaagaagtggctcacgccttccagagccacatcatcgcggtcgaaatagaagcccagaaagaggtaggtgtaaggaagcctgcangtaccctcggccgctctanaactagtggatcccccgggctgcaggaattcgatntcaagcttatcgataccgtcnacctcganggggggccccgggacccaacttttnttcctttaatgagggttaaattgcnccccttggcgnaannatgggcataactggtntncccgggnnnnnnnnnnnnnnnnnnnnnnnnnnnnnnnnnnnnnnnnnnnnnnnnnnnnnnnnnnnnnnnnnnnnnnnnnnnnnnnnnnnnnnnnnnnnnnnnnnnnnnnnnnnnnnnnnnnnnnnnnnnnnnnnnnnnnnnnnnnnnnnnnnnnnnnnnnnnnnnnnnnnnnnnnnnnnnnnnnnnnnnnnnnnnnnnnnnnnnnnnnnnnnnnnnnnnnnnnnnnnnnnnnnnnnnnnnnnnnnnnnnnnnnnnnnnaaaaaaaaaaaaaan

SEQ ID NO: 9307 - DNA, 858 bp, Homo sapiens
  misc_feature 6, 599, 641, 651, 690, 691, 725, 741, 744, 757, 762, 772,776, 784, 823, 843, 858: n = A,T,C or G
atgttnatcgactcactatagggcgaattgggccctctagatgcatgctcgagcggcccgccagtgtgatggatatctgcagaattcggctttcgagcggccgcccgggcaggtactcagtatttcaaatcagaacacaagattgaaacttttggaaaaatgggttcaagctttcctattagccatggaaatgcaaagtttagcagaagcaagcaattaggcagagaacaaaaatgttaagcatggtgttgtctatcttattgaagtggttggaaatgaaagcttttaatttgatagatttatcagtataaaattagggaaaccacgtgtggggaatgaatcaatttagagcttcgggaattgtgaggtgacttttgtaacttttgttctgtgtgtgacctgtgaaccactaggatgtgatctgcccttgtgggcaggtccagcatagttaggagttaggctttagcataaatttctagctgcatctgagtctcctgggatgggtgctccttggctggttttggctgcggatggtgagatcaaaagcagctcttcctgctgctggcccctgcaatcaattgttgggatgcccagtgcanatcacttaagtagtaaagaatttaatcaaaccccaacaggtnccaaatgcangtcatgaatggtgaaaatcttaaatttacataaaaagtnnaaagttttgacagtttaacattttggtattaaanggaaaggaaattgtanccncttttcccgtttnccagncccattaganggcntgggaacntgtaccttgggccggaacccccctaaaccgaattcaacncactgggggccgttcctagnggatcccacttgggn

SEQ ID NO: 9308 - DNA, 733 bp, Homo sapiens
  misc_feature 2, 5, 6, 9, 10, 11, 12, 14, 19, 461, 469, 470, 473, 476,478, 488, 490, 491, 492, 497, 505, 513, 550, 556, 560, 579,597, 600, 601, 604, 619, 620, 640, 642, 648, 652, 681, 685,686, 687, 690, 692, 724, 726, 732, 733: n = A,T,C or G
gntgnncannnntnacccncggacagagtgaaactgtctcaaaaaagagagacttccgggacacgtcattatcacgataggccccaaacctgtgatttttcttgggcaagattggtgtttacttaggggtgctttaaaaatatatttttacaagtatacttgtaggaagttggttttttattttctatttttgtttgtttttggagtttggttaaacgactcttttattttctgttttgccttatcttactaaagtgaagttttcctaaggcaagcaagaagaggagtggaagcacagttgcctggatttggaggcagagttgtcaggcttttcaagctaagagtcttgtgcttggattttccagattaatttgaaaagacctcccatttgtggctttgtacataaccaacaggcagatactgagtgccttggctcctagagttttgtggttggttaggtnggttttgnnggnggntngttttgggtntnnnttcantgtgaagnttaagaanccttgactttttaaatgctcttaaggctattccatgnaattcnactnctaaaactggtggtcttanctgaaatctaatgcttgnttnntgnacctcttccagtggnnacactctaggatgacatgangnttaatnttangggaaatacattttacctatgctgtactnggcnnnacncntttatgcaacttccaaccatgggtacagacgncnttaaann

SEQ ID NO: 9309 - DNA, 488 bp, Homo sapiens
  misc_feature 14, 374, 377, 389, 404, 411, 431, 441, 449, 450, 480, 485,488: n = A,T,C or G
gccagcgcgcaatnaccctcctaaagggaacaaaagctgggtaccgggccccccctcgaggtcgacggtatcgataagcttgatatcgaattcctgcagcccgggggatccactagttctagagcggccgcccgggcaggtacgcggggaggcattgaggcggccagcgcaggggcttctgctgagggggcaggcggagcttgaggaaaccgcagataagtttttttctctttgaaagatagagattaatacaactacttaaaaaatatagtcaataggttactaagatattgcttagcggttaagtttttaaccgtaatttttaatagccttaagaattttaagaagaaaatttgaaagacctttaaaaagantanccttgggggaanggaaaaagataaaanggttttnttaaaaacattgaacggganggtttggaanaatgaaannctttttttcattggggagttaaaaaaaaanttttnttn

SEQ ID NO: 9310 - DNA, 555 bp, Homo sapiens
  misc_feature 14: n = A,T,C or G
ttgtggaggaaagnaatcaatgaattgtacaaatgtgaaggctgtaacaagttgtagaagctttttccagacattcctatgcaatgttctccacagtaaatacctgggggcagccaagagggaagatttcagataagtgcaaacagtgattggatgttatctacctacaatccctttagacatttttgagagaactctgtttaaatgttgtttaactctcccaccccgaccaatgaatccctacggaccagcagtgccctgggagactgagtaatgaaaacatcctgtcaagcttcaagacctttgggcagatgggactctgcagacccgtgggagcacaaaggactaaaaagctgcaggtaaccgtatttggtaaccgagaccacacctggccacaggataacttgcaaaattcccagaaccctgcttctggctcttaaagccattgcacatgtggaggctaatttctgaattcaggagatatcaggatggacatgtatttttcacccaagggacaggaatgtgagctctgtgggctggttagcccagcacacc

SEQ ID NO: 9311 - DNA, 890 bp, Homo sapiens
  misc_feature 1, 2, 3, 5, 678, 681, 693, 696, 719, 797, 798, 803, 832,835, 839, 848, 860, 865, 890: n = A,T,C or G
nnntngccgcgtatacgactactatagggcgaattggagctccaccgcggtggcggcccgcccgggcaggtaccaacagaatcctggccaggctcccaggctcctcatctatgatgcatccaacagggccgctggcatcccagccaggttcagtggcagtgggtctgggccagacttcactctcaccatcagcagcctagagcctgaagattttgcagtttattactgtcagtcctcggacacttttggccaggggaccaagctggagatcaaacgaactgtggctgcaccatctgtcttcatcttcccgccatctgatgagcagttgaaatctggaactgcctctgttgtgtgcctgctgaataacttctatcccagagaggccaaagtacctcggccgaggtacaatttgagtcaggaagggagaaaggatggcttctttctggccacccactagcagaagtcttggagtgggcgcttcgccgttcccgtgttaaatgagcagttctgattctgtctgggcacattctacttctgaaagcaaaatttcacaccgatctctgtgggtggtattattgtgaggaccattggaagggactctccttcttccctccttttctgcataacttttctatctttattgacccattcttcaataggggtgagatgctggttcancangccctgtaatancancacacttctgccctgcaaaaggntggaaggaagtgacacccaacccttttttaaccacggggggctggtgaagggtgaatgtggggaaagaaaccagtcanngcccntaattttaatggtgatactgaccacaccntanattngaccaaatnttttccaagggngggcngtggttttttccatgaccctataan

SEQ ID NO: 9312 - DNA, 666 bp, Homo sapiens
  misc_feature 3, 4, 7, 8, 15, 519, 556, 562, 567, 576, 601, 603, 636, 647,650, 653, 656, 660: n = A,T,C or G
ggnngtnntcttttnccccgcgtccgcacgcgtcgacgctggggcgtacctttcgggctcctgactcctgccgcttctcttccccttccgtgggtcagggccggtccggtccggaacctgcagcccctttcccagtgttctagttcgcccgtgacccggaataatgagcaaggagggtgtggtgggttgaaagccatcctactttactcccgagttagagcatggattcagttttagtcttaagggggaagtgagattggagatttttatttttaattttgggcagaagcaggttgactctagggatctccagagcgagaggatttaacttcatgttgctcccgtgtttgaaggaggacaataaaagtcccaccgggcaaaattttcgtaacctctgcggtagaaaacgtcaggtatcttttaaatcgcgatagttttcgctgtgtcaggctttcttcggtggagctccgagggtagctaggttctaggtttgaaacagatgcagaatccaaggcagcngcaaaaaacagccaccgatttttgctatgtctttgangctgcnagggngagttgcanttgtattgaagcgaaaaagtttgtnancttctcctgttcacaagaattttgggttcaacntgtgagggccncancgnctncatnttgttt

SEQ ID NO: 9313 - DNA, 455 bp, Homo sapiens
  misc_feature 1, 12, 18, 55: n = A,T,C or G
nggatattaggngcaccncgcgtccgctgattagggcaaacatgatgcagacaangaaatgcaccggttcagaggagggaaggtcaggccgcctggggagagtccatgaaaaagatggaacgtgccagatgctgtacctggtgctgggaaagagttgactaggccagcatccctttcctcaaagggggggctcctagactggggggagggctggacatctgaatacatcctgaggagacagtgtgggacagcatggtggcagtggaaccagccgtggttctgctcttggtcggctggaaaggagtagatgtaagggatggtttagaagaagggaagtggaagaaaagttttctgagctgacaagaggaaggaaaggccgcctagaaggacactaaaaaggcaagagaagccctaagcagagtgagcaccagactccacaggttaagggctcagtc

SEQ ID NO: 9314 - DNA, 671 bp, Homo sapiens
  misc_feature 12, 561, 624, 655, 669, 670: n = A,T,C or G
gtttgagcctgntccactcgctcggatccctagtaacggccgccagtgtgctggaattcggcttagcgtggtcgcggccgaggtacttttgttttacaaaaattacaaaaaatgactcttaaaaatagaaatagcttctcagactcttgggaactacttttaagcaaccaaggagttagaactcagatggttttcttctttgtaacagcaacaatgaccacggctctgtgccatggcaatcactgctgagtgtcttctcctacaattacacaggcccgagctgtgtctggtggaaaggtctccactcaggtcagagtctgaaggagcaagatcttctcattaatgcagaacctgtgcagaaccaccatcagattctctccacagcgggagacctggcgctccatggccaggcgaaagtcctccttcacgcctttggtgatgcctcgagttacagtgtggtgcttgatcagcattccttgattgggtagtaattccagatgaattttcccaccttcctgagttctcaagtaggcaaattcctccagcatatcaatatttgtnacgtaattgaaaaaattctcatattggaaatttcttgttggcaattttattggcagctttcangaaaagattctcgccccgtggccactcttgntgaacaacacaatnnt

SEQ ID NO: 9315 - DNA, 404 bp, Homo sapiens
gattgtatacgactcactatagggcgaattgggccctctagatgcatgctcgagcggccgccagtgtgatggatatctgcagaattcggcttagcgtggtcgcggccgaggtcgcgtttgcacctcgctgctccagcctctggggcgcattccaaccttccagcctgcgacctgcggagaaaaaaattacttattttcttgccccatacataccttgaggcgagcaaaaaaattaaattttaaccatgagggaaatcgtgcacatccaggctggtcagtgtggcaaccagatcggtgccaagttctgggaggtgatcagtgatgaacatggcatcgaccccaccggcacctaccacggggacagcgacctgcagctggaccgcatctctgtgtacctgcccggc

SEQ ID NO: 9316 - DNA, 903 bp, Homo sapiens
  misc_feature 580, 606, 715, 718, 734, 757, 765, 767, 769, 791, 802, 807,814, 839, 843, 868, 872, 883, 889: n = A,T,C or G
actactatagggcgaattggagctcaccgcggtggcggccgcccgggcaggtacccaaaccacctttacttcctcccaaaagacccttgtcctcttctcatgaagcaagtgaggggcaagcaaaggatgccacttcctctggcggcacggcaaggttcatcatctccacctccatcaccacagcacccgctgccaccactgctgccacaagccttgcaaagactgttaatctctctgtcaccccttccccagcacccaggactctgcctgctgctcctgccagcactaacactactgctaccccaagcctcactcatatggtccctgccaagcagccccctatccctccccctaaaccagctcacagaaatagcaaccctgtcattgctgaactgtcccaagcaataaacagtggtacctcggccgctctagaactagtggatcccccgggctgcaggaattcgatatcaagcttatcgataccgtcgacctcgagggggggcccggtacccagcttttgttccctttagtgagggttaattgcgcgcttggcgtaatcatggtcatagctggttcctgngtgaaattggtatccgctcacaattncacacaacatacgagccgggagcataaagtgtaaaagcctggggtgcctaatgagtgagctaacttacaataaattgcgttggcgcctcactggccgcttttcaagtcnggnaaacctgtcgtgccanctgcattaatgaatcggccaacncccggggnanangcgggttgggtattgggcgctnttccctttctngcttnattgacntgcttggcttggtcgttcgggttgngggnaaccggtattaacttactcaaaagngggnaaaccggtatncacaanaatcaggggataat

SEQ ID NO: 9317 - DNA, 691 bp, Homo sapiens
  misc_feature 1, 3, 4, 9, 15, 16, 18, 28, 39, 46, 71, 73, 105, 121, 155,165, 182, 186, 196, 207, 212, 218, 224, 231, 268, 270, 274,317, 349, 357, 403, 425, 447, 459, 461, 480, 502, 523, 528,542, 546, 548, 549, 552, 557, 574, 580, 597, 606, 607: n = A,T,C or G
  misc_feature 613, 617, 619, 629, 635, 641, 651, 657, 669, 673, 683: n = A,T,C or G
ngnnccgangatcgnntngaactcccgnactagtttatnccctgtngcccgaaaagatattttatttcctnantcttttgaaatttggtgacttggttagtcatntaacatactggctatnctagagaaagggccatttgcacttgagaaaaacntgtgtactgntggtgtgtctggtaggnccanctggtatgangctggtcaagntctgncttgcnactgancttctgnctgggtggcctatccggtactgaaagtgggctactgnantctnctactcttactggagaactatccatttcttcctttgattctgncaatggttggttcatatattttgggctgatgnttggtgcntatatattacatcttggtgaattttcaaactttttaaatttcaacntgaagatgaaattataggatgnctgggatttcctttgaatcccntggggctgggantnactattaatgaaaccagantggccgggaatttgaggctgcnaggataggtcacacaggggantgaancaaggcttggagcncatngnnaanaatgntggcttttccagccatngggctnttttgccccttggcacnaaatggctnnaaaccncccnangggggcacgncccaancctgtnggctgggttnccaacntttttggccatnaaanctggaattcncaactttt

SEQ ID NO: 9318 - DNA, 852 bp, Homo sapiens
  misc_feature 2, 3, 4, 5, 6, 7, 8, 10, 706, 728, 762, 796, 811, 817, 821,824: n = A,T,C or G
gnnnnnnngngcgcgcgtaatacgactcactatagggcgaattggagctccaccgcggtggcggccgcccgggcaggtacacaagagtttgtcagacaaataaaataagaatacttcacacacgtatcaacaccatacaaggcattattcttcacacagtaacatctaatgtgttcttttatttttgaaacagcaggaaaagagccctttcccttcagaggaaaataaaaactttatctgttgcttaagccaaactccagggaggaaggtgtggtcctctggggaaagtagagggatggggatgtatggaggagaatggacgccccttcataagcacttcaggaggaaggaattgcaggaggttcctcggggacagtcacacagcttcccgatccttgcccctttcctcactgcacactgctcaccggcgtcacacatggggacttggccatacttcttctcatagatgggaacacgtttactcttgagcttcttcaagacttcttgcagcgcttcgatcagctccttctcgtgggaggcatcatccacggcagagtagatgtccagggctcggggctggagctcggcgtcctctgggcacgggtacctcggcccgctctagaactagtggatccccccggctgcaggaattcgatatcaagcttattcgataccgtcgaccttgaaggggggccccggtacccanctttttgttcccttttagtgangggttaattgcgccccttgggcgtaatcattggncataggtggtttcctgggggaaattggtttcccntttacaaattccccncaaaantccnaanccgggaagcaataaaatgttaaaaacct

SEQ ID NO: 9319 - DNA, 528 bp, Homo sapiens
  misc_feature 2, 3, 6, 7, 8, 13, 55, 467: n = A,T,C or G
gnnttnnnacggnttcgccacgcgtccgcatcataaaagctaagtggtatttctngtgtagtttccgtctggaactgctttcccattcccgggaacccatagccgggccagccagggtcccgaacacaggcccaaagtttattaaaccccgatcataacctccagcaggcatttcatttaatactgagcttagttcctgctgggtaaggcattccgaggtaaccagggccctctgggcaccccctcaaaagccagctcttcgagggtgaagtactccttgtttctactgtgagtcgcgtcttgattttccctttctttgatgtctcagtgtgtgtcccaaacacctgcatctcatggactgtttgtgcccatgcccagttcctggcatgccaggccctgggctcaggtgcacaactgactctttttttcactccctaggggaaccccctcggaaggggaagggtttnggggtgctgacggggcagggagcacaaaagaagacacatttcgatgtgttccgacagagga

SEQ ID NO: 9320 - DNA, 658 bp, Homo sapiens
  misc_feature 3, 5, 7, 8, 11, 16, 23, 32, 42, 51, 82, 565, 617, 649: n = A,T,C or G
tcntntnnggngtcgncccacgncgtccgctncaatgtaatncagtttggnaaaaacatttttaaaaaaaccacagcatagnaaaacaccacagggttcatactaaaatatgtttttgcagatgcagtaaaaatgaaaaaaatttaatccgaaattaagtttatgtaaatatctgagaattcacagtagaaatatctaaggcgcggacacttcagacattacactaaatcagtgctaagtacagaaaacaacacaaaataaaacttggtggataaattatttgtatataacattaaaagaagtagaagattttcagttataattacaattaaagtatacttttatcttgaaaaaattactgatttttaaattagtgaataatgatgtaattaaactctcaaataactttatgctcttttttcattcctgctatattcacatgtgaaagcatgtgaccaattgttgctgcaccaaagatatgagagattcttttattaggtgggcattatttaaaacattttttatggaacagtaaggatattaaagtgtaagatgcagcgccttngggggggctcatgccctgggggcccagcactttggggaggctgaggccgggnggatcaccctgaggtcgggaggtttgagaccngcctgacca

SEQ ID NO: 9321 - DNA, 636 bp, Homo sapiens
  misc_feature 3, 9, 56, 59: n = A,T,C or G
ctntagaanttttatgacgtcgcatgcacgcgtacgtaagcttggatcctctaganttnccgccatcgccgtcgcttggcttcttctggactcatctgcgccacttgtccgcttcacactccgccgccatcatggtgaagctcgcgaaggcaggtaaaaatcaaggtgaccccaagaaaatggctcctcctccaaaggaggtagaagaagatagtgaagatgaggaaatgtcagaagatgaagaagatgatagcagtggagaagaggtcgtcatacctcagaagaaaggcaagaaggctgctgcaacctcagcaaagaaggtggtcgtttccccaacaaaaaaggttgcagttgccacaccagccaagaaagcagctgtcactccaggcaaaaaggcagcagcaacacctgccaagaagacagttacaccagccaaagcagttaccacacctggcaagaagggagccacaccaggcaaagcattggtagcaactcctggtaagaagggtgctgccatcccagccaagggggcaaagaatggcaagaatgccaagaaggaagacagtgatgaagaggaggatgatgacagtgaggaggatgaggaggatgacgaggacgaggatgaggatgaagatg

SEQ ID NO: 9322 - DNA, 619 bp, Homo sapiens
  misc_feature 2, 4, 5, 8, 13, 27, 35, 46, 47, 77, 85, 161, 164, 411, 420,422, 423, 425, 428, 429, 444, 464, 465, 468, 469, 481, 482,483, 486, 489, 502, 506, 509, 513, 514, 515, 520, 521, 522,528, 539, 542, 543, 550, 566, 568, 581, 585, 598, 600: n = A,T,C or G
  misc_feature 603, 608, 610, 615: n = A,T,C or G
tntnnggngtcgncccacgcgtccggnccaacggnactgaaaaaannaacaaacattagctattttatgctgcaagnaaccaggnacacacaattcgccaatcatcccaccatataaccttcgattgtgcttctcaactccaccccataatttctcccagnagnaccatctatcaccttttccccaaagaagaaacaaaaccagttgcaccttaaaccatggatattttttcctcaggggctttaaatagtttcctatgcaacgtgtcttgtagcacaaataaaattctacaaaagttgcagtaaattttatttggaaaaaaaaaaaaaaaaaaaaaaaaaaaaaaaaaaaaaaaaaaaaaaaaaaaaaaaaaaaaaaaaaaaaaaaaaaaaaaaaaaaaaaaaaaaaaanggggggggncnntnaanntttttaaaaaaaaancccccccccccccccccggnnccnnaaaaaaaaaagnnnggncangggggggggaaanttgnttntggnnncttannnggggtncaaaaaaagcnatnncctcccnaatttcccaaaaaaancntttttttccccgncttntaaaggggggggngnccnaaacntntaaangggt

SEQ ID NO: 9323 - DNA, 850 bp, Homo sapiens
  misc_feature 1, 7, 8, 13, 575, 616, 657, 704, 721, 759, 780, 791, 802,818, 838, 849: n = A,T,C or G
ncatagnntgttngctgattggagctccaccgcggtggcggcccgcccgggcaggtacttcactgcggacttgacttcttgagcaagaaggctggcactgttcattaagagaatcacagagatgaatctcacaatgcaggaaaactaggtcataatgtccagcaaacatgaacatctgaactgagaaccggctttccgaggactgcccattctcctccacgtggatggtggaatcacgttgatttgagcagctgtttctgatgatgaaatacttcacaaggtcagccttgtcttcagtgggggtggcatagcagttcctcaacaccaggttaaaccgggaggtgtccccttgttccaagatggcacccacatacagcacggactcaacagacagttcaactgcatccccttcgtaaggattcgtgtagttctggtcttggaagagggccatcctgacaatgaactctccattcccgtccacactgacgttcagggaacttacaatgggctgcaaggcagcttggaggctgactttcatgtccagtgggtaggcacattggaaagttgatgttgangatggtgtctcttgatgatgaaatcattgacccaaggaganggggtttttgtagatggcatgggttttgatttctcttccanaatgttcctgcaggcactaaccctggaccggggctggtcacaaatancccagttccttttcctntgttttgcaaaaagcttgcttgcagttttgggtctcgnaggttggcaatgaacttcttnccccaaaccanggccttccaanaaaaaattttgtcccncctttaccttgattttcctngggccccaatnt

SEQ ID NO: 9324 - DNA, 632 bp, Homo sapiens
  misc_feature 4, 5, 7, 609, 627: n = A,T,C or G
gggnngnccgcgtaatcgactcactatagggcgaattggagctccaccgcggtggcggccgaggtactgtccaactggatgctgccctggtggctgaaggcacacttcatgatgctgtccagggtcatcagggagacatgttgaaagagctccagacgtgagttttgggcaatgtgttcctcccatttgttcagcatcatccgaacactctcagacatcatggtgatgaatattttcagaatgctgatgttgaagccaggtttcacaatctggcggtgctttttccatttagaaccatccagggtcacaagtcctcgaccaacccaggattcaaggattttgtggctaacagcacttttgggatcttgtcttttcaggagaatcttggcatagtctgggtcatggacactgaagaacatcgtaaagggtccaacccacaagggaacagcacatgggtatttttccatcagcttatgatacacctcaaactcctttactgggtaaaactccttgtggccatagaaccagtgggcagggggtgcaggaaacaggtgcagggctctgatcatccatcttctcctctggtacctgcccgggcgggcgctctanaactagtggatcccccgnctgca

SEQ ID NO: 9325 - DNA, 880 bp, Homo sapiens
  misc_feature 5, 17, 18, 19, 26, 32, 39, 40, 47, 51, 54, 56, 59, 74, 75,82, 105, 128, 145, 146, 148, 164, 172, 533, 572, 590, 599,655, 685, 692, 719, 825, 865, 878, 879: n = A,T,C or G
atatnctactatgggcnnntttgcgntccgcnccccgtnnttttccnggcnggngnccncttcacccatgcctnnaatcccntgtatgtggaagctgacgccganaatctcttgaacttggaaggcanaggttgcctgaaccaanntnacgcccagcactccancctggganacagagcaaggcttagttttaaaaaaaaaaatcaaatattgtgtgattctgtttataggaaatattcagaattggtaagtccataaggacaaaaaccagattgacaggggctgagatgaaaaagagaatggggtatggggagtgacagcttgataggtatgggttttgttggggggagataatgaaaacatttggaactaggagaatcacctgacatcaggagttcaagaccactgaactcgaacctgggtgacagagtgagactccgtctcagaaaaaaagaaaatgtttggaactagatggtggtggttgtacctgcccgggcggccgctctagaactagtggatcccccgggctgcangaattcgatatcaagcttatcgataccgtcgacctcganggggggccccggtcccancttttgttncctttagtgagggtttaattgcgcgctttggcgtaatcatgggccatagctggttncttgtgtgaaattgttattccctccaattnccaccancatacgagcccggggcattaaagtgtnaaagcctggggtgccttatgagtgagctacctcactttattgcgttgcgctcactggccccttttcagtcgggaaacctgtcgtgccacttcattaatgaatcggnccaccccccggggaagaggccggtttgcttttgggcgctntttccctttcttnnt

SEQ ID NO: 9326 - DNA, 623 bp, Homo sapiens
  misc_feature 2, 3, 4, 6, 15, 17, 19, 30: n = A,T,C or G
gnnngnatgtttttnananacttcatttcngaccccgctcggatcctctagtaacggccgccagtgtgctggaattcggcttcgagcggccgcccgggcaggtacatagagtaaaatctacatcaagccccaccacccaaaagaaaagaaaatgacagcaatctggattcattttgcagtgattcaagttttggtccataaaggatcattctattttaatggctcatctttaaaagtcctaagagaaatatgtgacaggtagttactgtcagtagggatattttctacctttttttccctattgttgaagtgtcggccacaacagcttctgggcatgttacagcctcaaaatcaccacctaccaaaaagggcaaaactaaaaatccctataaaataaaaaagaaagttccacccaaatgtttagtgcatttgacaaaatattatgggtatttagcaaatgaataagaaaataaagaaaacagtgcaggaagaactatataatgttttaagatttttatattacagacctgcatctctgtacctcggccgcgaccacgctaagccgaattctgcagatatccatcacactggcggccgctcgagcatgcatctagagggcccat

SEQ ID NO: 9327 - DNA, 673 bp, Homo sapiens
  misc_feature 591, 633: n = A,T,C or G
attggccctcgaggccaagaattcggcacgagcaattctccttctagatatcaatgacaaccctcctcttgttttgtttcctcagtctaatatgtcttatctgttagtactgccttctactctgccaggctccccggttacagaagtctatgctgtcgacaaagacacaggcatgaatgctgtcatagcttacagcatcatagggagaagaggtcctaggcctgagtccttcaggattgaccctaaaactggcaacattactttggaagaggcattgctgcagacagattatgggctccatcgcttactggtgaaagtgagtgatcatggttatcccgagcctctccactccacagtcatggtgaacctatttgtcaatgacactgtcagtaatgagagttacattgagagtcttttaagaaaagaaccagagattaatatagaggagaaagaaccacaaatctcaatagaacccgactcataggaaggtagaatctgtgtcttgtatgcccaccttagtagctctgtctgtaataagcttgggttccatcacactggtcacagggatgggcatatacatctggttaaggnaaggggaaaagcatcccagggaagatgaaaatttgggaagtncagattccactgaaaaggaaaaattgacttgcatatgcca

SEQ ID NO: 9328 - DNA, 616 bp, Homo sapiens
  misc_feature 7, 8, 9, 11, 13, 536, 616: n = A,T,C or G
ggcgcgnnncncncgtatacgactactatagggcgaattggagctccaccgcggtggcggcccgcccgggcaggtacccctagcaactactaatggttcagccacccgtggagtccagttggggctgagttatgctccactaacccatagcagaccagcaacattctatctttgagctgcttaagaaacacacaaaggataccagccagtggtccaagagcagaccagaatccccacgcagctacacagtaacaagtcccagcaactcctgaagatagatgcggaaagggtgactttaccatggggttcgagtctgagccaagagaagttataaaggggtccctaactcattcctttttcaaaataaataaaaaaaggactgtctttcaaacaaaaaccctgcgattttaatgagaattaaaggaggatgtaaattaaaaggcctgtttgtctgtacctcggccgctctagaactaagtggatcccccgggctgcaggaattcgatatcaagcttatcgataccgtcgacctcganggggggcccggtacccaagcttttgttccctttagtgaggggttaattgcgccgcttggcgtaatcatggtcatagctgn

SEQ ID NO: 9329 - DNA, 610 bp, Homo sapiens
  misc_feature 15, 16, 17, 18, 28: n = A,T,C or G
cgggccccccctcgnnnntacttctagnaattaattaacgcggtgggtgggggttgctttttggagtgctggggaacttttttcccttcttcaggtcaggggaaagggaatgcccaattcagagagacatgggggcaagaaggacgggagtggaggagcttctggaactttgcagccgtcatcgggaggcggcagctctaacagcagagagcgtcaccgcttggtatcgaagcacaagcggcataagtccaaacactccaaagacatggggttggtgacccccgaagcagcatccctgggcacagttatcaaacctttggtggagtatgatgatatcagctctgattccgacaccttctccgatgacatggccttcaaactagaccgaagggagaacgacgaacgtcgtggatcagatcggagcgaccgcctgcacaaacatcgtcaccaccagcacaggcgttcccgggacttactaaaagctaaacagaccgaaaaagaaaaaagccaagaagtctccagcaagtcgggatcgatgaaggaccggatatcgggaagttcaaagcgttcgaatgaggagactgatgactatgggaaggcgcaggtagcc

SEQ ID NO: 9330 - DNA, 884 bp, Homo sapiens
  misc_feature 421, 463, 547, 554, 578, 593, 609, 614, 629, 646, 648, 656,668, 680, 683, 686, 691, 696, 704, 717, 723, 727, 734, 747,754, 757, 763, 769, 775, 783, 799, 806, 809, 812, 816, 823,827, 833, 835, 838, 843, 844, 849, 850, 854, 858, 860: n = A,T,C or G
  misc_feature 863, 865, 875, 876, 879, 880: n = A,T,C or G
attggagctccaccgcggtggcggccgaggtaccaggctaagttgctgctaacactctgactggccctgcaggagagggtggctctttcccctggagacacagacagggtggctggagactgcgtcatcactatttctccagtggtatctgggagccagagtagcaggaggaagagaagctgcgctggggcttccatggttccgtctgggtcctaactgagcagttcctcccccgcgtacctgcccgggcggccgctctagaactagtggatcccccgggctgcaggaattcgatatcaagcttatcgataccgtcgacctcgagggggggcccggtacccagcttttgttccctttagtgagggttaattgccgcgcttggcgtaatcatggtcatagctgtttcctgtgtgaaattgtnatccgctcacaattccacacaacataccgagcccggagcatnaagtgtaaagcctggggtgcctaatgagtgagctaactcacattaaattgcgtttgcgctcacttgcccgctttccagtcgggnaacctgntcgggcccagcttgcatttaatgnaatcgggccaacgcnccggggagaaggccgnttttnccttttttgggcgcntttttccgctttccttngnttcacctnaactcacttggngcctcggttcgnttncgntttgnggcanagccggtnttcaacctcactnccaaanggcnggtaatnccggttatttccncagaatnccngggggntaaccncccggnaaaaaaanttttgagcccaaaagngcccgcntanagncccngtaaccnctanaaaagncnccnctgtnnggcgnntttncccntnggntncgcccccccnngannaagg

SEQ ID NO: 9331 - DNA, 952 bp, Homo sapiens
  misc_feature 4, 24, 400, 401, 404, 442, 443, 461, 476, 486, 493, 494,496, 497, 505, 508, 511, 525, 563, 567, 573, 578, 583, 595,608, 609, 610, 611, 627, 637, 647, 662, 663, 665, 689, 695,698, 701, 705, 708, 722, 729, 736, 742, 745, 749, 752: n = A,T,C or G
  misc_feature 754, 764, 765, 768, 770, 779, 780, 789, 790, 791, 796, 797,805, 812, 814, 817, 818, 830, 831, 832, 838, 841, 842, 843,847, 848, 863, 872, 876, 878, 885, 887, 888, 908, 909, 912,913, 927, 928, 930, 931, 933, 944, 948, 952: n = A,T,C or G
tagncactcactatagggcgaatnggagctccaccgcggtggcggcccgcccgggcaggtacgcggggtgctttaagaattaacgaaagcagtgtcaagacagtaaggattcaaaccatttgccaaaaatgagtctaagtgcatttactctcttcctggcattgattggtggtacctcggcgtctagaactagtggatcccccgggctgcaggaattcgatatcaagcttatcgataccgtcgacctcgagggggggcccggtacccagcttttgttccctttagtgagggttaattgcgcgcttggcgtaatcatggtcatagctgtttcctgtgtgaaattgttatccgctcacaattccacacaacatacgagccgggagcataaaggagtaaaagnntgnggtgcctaatgaagtagggctaactgacatttaatttnngttgcgctcactgcccgntttcagagtcggganaacctgtcgngccaagnntnnattaattnaangtngccaacgccccggngaagagggcgggtttggcgttttggggcgctccttccncttnctcacntactnactcncttgcgctcggnaaggttccggctnnnnggagaacggtttaatntcacttaaanggcgggtaantcttgtttttcacannantcagggggatatcccctggtaaanacattnttnccnaaangcncatctaaaatgtcnggtaccngttaaanggccgnttngttngcnanttttccattnnttncncccccttgnngtgctttannnaattnnccttctanttaaaantntgnnaaaccctctagnnntttaanaannncaannttttccctgtatatntccttatgnctcntncttttcnannatgcctttacgatatacctnnccnnctttttctttcttnnanntnactttgttatntatnatcn

SEQ ID NO: 9332 - DNA, 634 bp, Homo sapiens
  misc_feature 1, 16, 619, 624: n = A,T,C or G
ngggccccccctcggngtacttctagaattaattaacgcgggcgatacagtttccgaggcacgccgcgtcccgcctagcctgttgaacagtgcggatttgcgaggcgcgccctggagctgctagagatccggaagcacagccccgaggtgtgcgaagccaccaaacatcccagttaccagtgtccttgaattgatagtggcttctgtttgtcagtctcatataagaactacagctcatcaggaggagatcacagcagggtaagagacaccaacaccatgttctgcacgaagctcaaggatctcaagatcacaggagagtgtcctttctccttactggcaccaggtcaagttcctaacgagtcttcagaggaggcagcaggaagctcagagagctgcaaagcaaccgtgcccatctgtcaagacattcctgagaagaacatacaagaaagtcttcctcaaagaaaaaccagtcggagccgagtctatcttcacactttggcagagagtatttgcaaactgattttcccagatttgaacggctgaatgttgcacttcagagaacattggcaaagcacaaaaaaaaaaaaagcggccgcccccgggggggagctccaattcnccctntagtgagtcc

SEQ ID NO: 9333 - DNA, 835 bp, Homo sapiens
  misc_feature 3, 22, 26, 444, 445, 446, 447, 448, 449, 450, 451, 452, 453,454, 455, 456, 457, 458, 459, 460, 461, 462, 463, 464, 465,466, 467, 468, 469, 470, 471, 472, 473, 474, 475, 476, 477,480, 481, 482, 483, 484, 485, 486, 487, 488, 489: n = A,T,C or G
  misc_feature 490, 491, 492, 493, 494, 495, 496, 497, 498, 499, 500, 501,502, 503, 504, 505, 506, 507, 508, 509, 510, 511, 512, 513,515, 516, 517, 518, 519, 520, 521, 522, 523, 524, 525, 526,527, 528, 529, 530, 531, 532, 533, 534, 535, 536, 537: n = A,T,C or G
  misc_feature 538, 539, 540, 541, 543, 544, 545, 546, 547, 548, 549, 550,551, 552, 558, 561, 562, 563, 564, 565, 566, 567, 568, 569,570, 571, 572, 573, 574, 575, 576, 577, 578, 579, 580, 581,582, 583, 584, 585, 586, 587, 588, 589, 590, 591, 592: n = A,T,C or G
  misc_feature 593, 594, 595, 596, 597, 598, 599, 600, 601, 602, 603, 604,605, 606, 607, 608, 609, 610, 611, 612, 613, 614, 615, 616,617, 618, 619, 620, 621, 622, 623, 624, 625, 626, 627, 628,629, 630, 631, 632, 633, 634, 635, 636, 637, 638, 639: n = A,T,C or G
  misc_feature 640, 641, 642, 643, 644, 645, 646, 647, 648, 649, 650, 651,652, 653, 654, 655, 656, 657, 658, 659, 660, 661, 662, 663,664, 665, 666, 667, 668, 669, 670, 671, 672, 673, 674, 675,676, 677, 678, 679, 680, 681, 682, 683, 684, 685, 686: n = A,T,C or G
  misc_feature 687, 688, 689, 690, 691, 692, 693, 694, 695, 696, 697, 698,699, 700, 701, 702, 703, 704, 705, 706, 707, 708, 709, 710,711, 712, 713, 714, 715, 716, 717, 718, 719, 720, 721, 722,723, 724, 725, 726, 727, 728, 729, 730, 731, 732, 733-834: n = A,T,C or G
agnccgttatcgactactatanggcnaattggagctccccgcggtggcggcccgaggtactctgcgttgttaccacaggcgatgacagctccatgtgtgttattgcccctgaagaccttccagagacaaaatgtggaggtggaagacagtgatactgatgaccctgaccctgtgtggatctaggctaacatgtgtttttgtgtcttagttttcaacaaaaaagtttaaaaagttaaaatactaagtttataaagttaaaaagttaccccgcgtacctgcccgggcggccgctctagaactagtggatcccccgggctgcaggaattcgatatcaagcttatcgataccgtcgacctcgagggggggcccggtacccagcttttgttccctttagtgagggttaattgcgcgcttggcgtaatcatggtcatagctgttcctgannnnnnnnnnnnnnnnnnnnnnnnnnnnnnnnnnggnnnnnnnnnnnnnnnnnnnnnnnnnnnnnnnnnngnnnnnnnnnnnnnnnnnnnnnnnnnnngnnnnnnnnnntttccnggnnnnnnnnnnnnnnnnnnnnnnnnnnnnnnnnnnnnnnnnnnnnnnnnnnnnnnnnnnnnnnnnnnnnnnnnnnnnnnnnnnnnnnnnnnnnnnnnnnnnnnnnnnnnnnnnnnnnnnnnnnnnnnnnnnnnnnnnnnnnnnnnnnnnnnnnnnnnnnnnnnnnnnnnnnnnnnnnnnnnnnnnnnnnnnnnnnnnnnnnnnnnnnnnnnnnnnnnnnnnnnnnnnnnnnnnnnnnnnnnnnnnnnnnnnnnnnnnnnnnnnnnnnnnnnnnnnc

SEQ ID NO: 9334 - DNA, 654 bp, Homo sapiens
  misc_feature 2, 4, 7, 12, 16, 633, 645: n = A,T,C or G
gnanttntactncctnagtcgcccccgcgtccggtccctaaaaaagtaagagattccaaggtcaggttgatatggaaactctaggttaaataaagttaagcatttctttatgaaagaacttctggaaacttccatgtgataatgtgcattgcggatctctaggaaggaaatgatagtgtatagtattttctaaatacttgtgattcctaaagttctcttacaaggagccctttgtaggaccagtgttcttagtagcgcgctttgggcagtgtggctgtgtagtgcatagctacctctgcaaggtgataactaagccggcaagctgcctttcaacactcatgcagtcacgttgtccacctgagattctcaacagggtataaaaggaaggtctcatcttgcctcacaggaagagtgggctcagtgtggcttttttccaactatggagaaactcagtgctcatctactttaagtttccacatatggcttgctcatagccttggtccttacctttcctgccataactttctagaagagcttaatgggattttttttctaaaaaatgtaaatatgcagttagggcattattttatgtaaatgcattgggtttttactggtaagccaattttttttttngggggggggggncccccccct

SEQ ID NO: 9335 - DNA, 833 bp, Homo sapiens
  misc_feature 2, 3, 4, 5, 6, 7, 8, 9, 11, 13, 36, 645, 730, 770, 773, 787,815, 824: n = A,T,C or G
gnnnnnnnnangnaaataactgctattgggcgaatngggccctctagatgcatgctcgagcggccgccagtgtgatggatatctgcagaattcgccctttcgagcggccgcccgggcaggtacgcggggataggtccaagaacaattgtctctggacggcagctatgcgactcaccgtgctgtgtgctgtgtgcctgctgcctggcagcctggccctgccgctgcctcaggaggcgggaggcatgagtgagctacagtgggaacaggctcaggactatctcaagagattttatctctatgactcagaaacaaaaaatgccaacagtttagaagccaaactcaaggagatgcaaaaattctttggcctacctataactggaatgttaaactcccacgtcatagaaataatgcagaagcccagatgtggagtgccagatgttgcagaatactcactatttccaaatagcccaaaatggacttccaaagtggtcacctacaggatcgtatcatatactcgagacttaccgcatattacagtggatcgattagtgtcaaaggctttaaacatgtggggcaaagagatccccctgcatttcaggaaagttgtatggggaactgctgacatcatgattggctttgcgcgangagctcatggggactcctacccatttgatgggccaggaaacacgctggctcatgcctttgcgcctgggacaggtctcggaggaanatgctcacttcgatgaagatgaaccctggacggatggtancantctagggattaacntcctgtatgctgcacttatgaacttggncattctttnggtatggga

SEQ ID NO: 9336 - DNA, 928 bp, Homo sapiens
  misc_feature 470, 473, 494, 497, 499, 505, 511, 542, 549, 551, 556, 572,579, 608, 610, 631, 653, 655, 668, 671, 673, 678, 680, 699,704, 705, 716, 718, 742, 744, 764, 775, 778, 787, 789, 808,825, 829, 830, 834, 842, 844, 862, 867, 874, 897, 898: n = A,T,C or G
  misc_feature 905, 908, 922, 927: n = A,T,C or G
atgacaacaacccggtgtttagcgagtccacctacgcggcgagcgtgccagaaaactcgcctcccaacacacccgtcatccgcctcaacgccagcgatccagacgagggcaccgacggccaggtggtctactccttctatggctacaagggcgaattccagcacactggcggccgttactagtggatccgagctcggtaccaagcttggcgtaatcatggtcatagctgtttcctgtgtgaaattgttatccgctcacaattccacacaacatacgagccggaagcataaagtgtaaagcctggggtgcctaatgagtgagctaactcacattaattgcgttgcgctcactgcccgctttccagtcgggaaacctgtcgtgccagctgcattaatgaatcggccaaccgccccggggagaggcggtttgcgtattgggcgctttttccgctttcttggttactgactcgntgngctcggtcgttccggcttgcngcnanccggtnttaacntcacttaaaaggggggggaaaaaccgggttnttccccnanaaatnaggggggaaaaacccngggaaanaaaacattttggggcccaaaaagggcccncnaaaaaagggccccgaaacccnttaaaaaagggccccggttggntnggggggttttttncananagggntnccccccccctttgaagagncaatnnccaaaaaaatngncccctcaaagtaaaaaaggggggngnaaacccccccccgggacttnttaaaagaaanccncgggggttntncccctggaaaagggccccntgggggctttttttttnacannctcngggggttnancgggaaaaactgttcccnttttnccctttngggaaggggggggggttttttannaaataanccngggggggggttttnaaacng

SEQ ID NO: 9337 - DNA, 616 bp, Homo sapiens
  misc_feature 3, 4, 5, 6, 13, 553, 615: n = A,T,C or G
atnnnngattgantacgactcactatagggcgaattgggccctctagatgcatgctcgagcggccgccagtgtgatggatatctgcagaattcggcttagcgtggtcgcggccgaggtactggaggagctgaaagaaaaacacccaaggctgggcgtggtggcacacgcctgtaatcccagcactttgggaggccgaggcaggtggatcacctgaggtcgggagttggagaccagcttgaccaacatggagaaaccccgtctctactaaaaatacaaaattggccgggcgtggtggcgcatgcctgtaatcccagctactcgggagggtgaggcaggataattgcttgaccctgggaggtggaggttatggtgagctaagatcgtgccattgcactccagccttggcaacaagagcgaaactccgtctcaaaaaaaaaaataaaacaacacccagatagatacacatactccttcagacttacagacctaagctgcatttatggggtagtgatgaggtttagaacatatacatattttgttaaaattccccanatgattcttggtatgaacgactatattataaattttaagatgtacctgcccgggcgggccgnt

SEQ ID NO: 9338 - DNA, 589 bp, Homo sapiens
  misc_feature 99, 105, 106, 108, 111, 121, 123, 124, 127, 128, 129, 130,132, 138, 139, 142, 150, 151, 152, 157, 158, 162, 165, 167,169, 170, 172, 173, 175, 181, 182, 185, 186, 190, 192, 196,197, 204, 205, 206, 213, 214, 215, 218, 222, 224, 225: n = A,T,C or G
  misc_feature 226, 233, 234, 242, 253, 254, 255, 256, 258, 259, 262, 263,272, 274, 278, 284, 292, 293, 297, 299, 300, 302, 304, 310,314, 318, 322, 323, 326, 327, 331, 338, 344, 345, 350, 354,360, 367, 370, 371, 372, 373, 376, 377, 382, 383, 389: n = A,T,C or G
  misc_feature 390, 391, 400, 408, 410, 412, 414, 418, 420, 424, 425, 426,432, 433, 434, 436, 438, 441, 442, 444, 445, 450, 451, 452,454, 458, 459, 463, 464, 465, 467, 469, 470, 476, 477, 478,479, 480, 482, 483, 487, 490, 492, 493, 494, 497, 499: n = A,T,C or G
  misc_feature 500, 501, 502, 503, 504, 506, 509, 511, 512, 514, 521, 525,529, 531, 534, 535, 536, 540, 553, 556, 557, 558, 559, 560,562, 563, 567, 568, 575, 576, 581, 585, 587, 588: n = A,T,C or G
aaaaaaaaaaaaaaaaaaaaaaaaaaaaaaaaaaaaaaaaaaaaaaaaaaaaaaaaaaaaaaaaaaaaaaaaaaaaaaaaaaaaaaaaggggggggccnttaaannanttnaaaaaaaaancnnccnnnncntccccnngancctgaaannnaaaannaagncantngnngnngnaaactnnttnntggnantttnnaagggtnnnaaaaaannnaanaccntnnnaattttnnaaaaaaangcttttttttnnnngnnttnnaatgggggntngccnaaaccnaaaaaggnntttnannangnggggancccngggncccnnccnnaaanaaattcnttttcnntttcntggntaatanactcggnggnnnnggnnttttnnttgggnnnggggttttntttttttntnangncggnanattnnnttttannntnanatnncnntattnnngntganntttnnntntnnaataannnnnannattngtnannnccncnnnnnnanatntnntntaagttnctantttnantcnnncttntttattatttaantcnnnnntnnattnntttattnngtcangtgncnng

SEQ ID NO: 9339 - DNA, 831 bp, Homo sapiens
  misc_feature 1, 444, 544, 620, 639, 673, 693, 706, 715, 723, 727, 730,731, 737, 738, 754, 762, 771, 780, 802, 812, 819, 830, 831: n = A,T,C or G
nactactatagggcgaattgggccctctagatgcatgctcgagcggccgccagtgtgatggatatctgcagaattcggcttagcgtggtcgcggccgaggtacctgggccaccaaacacagctggactcaatatatggggaaggtaagtgtcctcagtttttggagagagattaccctcttccaaaagagtgcttgattctggtagtccaagccgtctccgtctggtggcaccccaatttcccctgcctagacccacctcctttcctcagcccccttcgcctgccgccccgcgtacctgcccgggcggccgctcgaagccgaattccagcacactggcggccgttactagtggatccgagctcggtaccaagcttggcgtaatcatggtcatagctgtttcctgtgtgaaattgttatccgctcacaattccacacaacatacnagccggaagcataaagtgtaaagcctggggtgcctaatgagtgagctaactcacattaattgcgttgcgctcactgcccgctttccagtcgggaaacctntccgtgccagctgcattaatgaatcggccaacgccggggagaggcggtttgcgtattgggcgctcttccctttctngttaactgactcgcttgcnctcggtcgttcggctgcggcgaagcggtattaantcacttaaaaggccgggaantaccggtattcancaaaaattnaggggganaacnccnngaaaannacattttgaccaaaanggcccgcnaaaaggccntggaacccntaaaaagggcccgggtggtggnggttttttcntaagccncccccccccann

SEQ ID NO: 9340 - DNA, 613 bp, Homo sapiens
  misc_feature 3, 4, 5, 6, 7, 8, 9, 15, 22, 26, 39, 84, 571, 572, 576, 577,583, 584, 586, 588, 596, 597, 611, 612: n = A,T,C or G
agnnnnnnnttaaancatttanggantcgacccttcgtncggtcctttacttaaattattttggttgtttttccctttttttcnttcttttcccaccccctccccctccatgtgaagatttgggtgcttaacatatcatttttttccctgccggaattttagcattgatatgaaccatggacaagtatattctgctgccacaaagactgtaaagtgcttcatttcaacagctgaggaaggtgtcttgctgcaggtaactaatgaagaagtggtcaaccacagagtcttcaagaaataagaaattctgtaccatctgaaagtagttcttgttggtgccttcatttaaaaagcactctttaaaataaaagggaaatgttttctgataaaacaaacatttagttgaggttcttgatataaaacaattacaaaatgagtgttgtttgtaaaacagtaacatcaaattggctagagagataaatgtatcatgttttaaattaggttttgtgagtagacagattacaattctattttaaatataaaggtttataaaataaatactttttgtatcccnnaccnnacgggnntntnaaataccnngccgtttccccccnng

SEQ ID NO: 9341 - DNA, 664 bp, Homo sapiens
  misc_feature 4, 5, 11, 27, 32, 34, 40, 52, 63, 76, 81, 91, 103, 114, 120,121, 129, 134, 153, 157, 158, 173, 175, 181, 187, 189, 191,202, 215, 223, 229, 231, 234, 241, 244, 250, 270, 272, 274,299, 350, 402, 409, 411, 419, 427, 433, 438, 453: n = A,T,C or G
  misc_feature 460, 479, 495, 505, 516, 521, 526, 534, 545, 548, 551, 568,569, 571, 572, 577, 586, 587, 609, 612, 624, 626, 627, 634,638, 639, 655, 663: n = A,T,C or G
gatnncaaagncctatttgattttganacgcnancaactnaatgtccgaggngttatgggttngggccaaatattnggccntattactggntgcacctttggntgagagcgcanacacannggaaccgntcggntgacgactggtaaaggcgncggnntggatagagacaaananggtacnacgctntntntgggcttttgntacgcgcacttgnaatggaangaagangnctncattgcncgncatgtncaccttcatattgccctctntntngatcagagagcgcaaacggcgagcnatttgcaataccacatctttttcgcgcgttttgtatttccccaccgcaccngagttttcgccaccgtggccagtgtcaagcataatgacaatcggacgatcgngccctgntntacccggntggggacnactttncgctngcggtacctgctttnagaggancgcctttggtgtaatcctncccaagcgccagcagntgggtccttnataaacttgancattngccgngaaaaggnacatgaccaanacnctntttaaatccaagaccgnncnnaaggncaacaaaanncggttttacttttgctttaagnganaaaccatacctncnngtttggngggnncaaattgccccacgcncgcccaant

SEQ ID NO: 9342 - DNA, 645 bp, Homo sapiens
  misc_feature 3, 502, 524, 541, 593, 597, 610, 620, 624, 631, 634: n = A,T,C or G
tcnactccagacaggcaagctgagacattgggctggtccctgtcccgagtgctcctcacatctcggattccatacagcttccccactgtccgccgatgagtgccccccatgttgcgggatcgcacattcacttccagtggccccacaatcttcaccttgatatagcaggccctgaattccatcggctttggccaccatgccagatagtcttcagtccagctcatagggtcatcttcgttgaaggggactgtgttgtagtcatatcgatccccctcaatctggtagaaccggaagtgggctgcactgggtggtgcctcttcacatgcccggaggttctcaaaggcatagatgggcccattgctctcctcagctgagttgggccttggcttggccatgctaatctggaaagctgtctttttaacccgtggatcctcatggtcccgtcgacggtagttgagcttgttgagatagggctgagggacgcccattgcatttgggttgnatttaagagaaaacttcactgnttgcagttcttcccaancagcttggcaagaatagcagaagaggcatcaaggggctgggcttaaaaaagngggnccccaggcccctngggcctgatnaccntgaaaanggnccaggccctag

SEQ ID NO: 9343 - DNA, 649 bp, Homo sapiens
  misc_feature 2, 3, 10, 619, 638, 643: n = A,T,C or G
gnntttttgntgcgctccccgcggtggcggccgcccgggcaggtacaaaagatgttggagtccagtaacgcccatacctaaattaactgtaaagcttcaaggactttttgtttatttttatatactagttttcttctgtgacaagttgattttatctccaagacttaaggccattccctggctctttgcacgaattcttatatggccggtaacagcagcatctggtccctggtgaattggcttctcaatgctgacatttgcaagtgcatcttcaccaaatatggaacgagcataaaggttggctgccataaagccacagtaaccagaaagggccttttctggagtcaggcatttcatattggttgactttaatatgtgctgtaagtagtcatttaaatcaaccatgttggtgttaactgtcactttgttttcccattcaaattcggcccacatctgacggaattctgcatcagtgcaagttgcaggctggatatagtccatgatgtcgatggtggaatatcactgagaaccacacaatttctgtcacttgctgctccagagacatcataaactatattacccaaaattattcattttctggtggtgctactttgaccgntagcttttaatatttgcgnagtcntgaggg

SEQ ID NO: 9344 - DNA, 874 bp, Homo sapiens
  misc_feature 3, 4, 5, 6, 20, 36, 431, 432, 433, 434, 435, 436, 437, 438,439, 440, 441, 442, 443, 444, 445, 446, 447, 448, 449, 450,451, 452, 453, 454, 455, 456, 457, 458, 459, 460, 461, 462,463, 464, 465, 466, 467, 468, 469, 470, 471, 472, 473: n = A,T,C or G
  misc_feature 474, 475, 476, 477, 478, 479, 480, 481, 482, 483, 484, 485,486, 487, 488, 489, 490, 491, 492, 493, 494, 495, 496, 497,498, 499, 500, 501, 502, 503, 504, 505, 506, 507, 508, 509,510, 511, 512, 513, 514, 515, 516, 517, 518, 519, 520: n = A,T,C or G
  misc_feature 521, 522, 523, 524, 525, 526, 527, 528, 529, 530, 531, 532,533, 534, 535, 536, 537, 538, 539, 540, 541, 542, 543, 544,545, 546, 547, 548, 549, 550, 551, 552, 553, 554, 555, 556,557, 558, 559, 560, 561, 562, 563, 564, 565, 566, 567: n = A,T,C or G
  misc_feature 568, 569, 570, 571, 572, 573, 574, 575, 576, 577, 578, 579,580, 581, 582, 583, 584, 585, 586, 587, 588, 589, 590, 591,592, 593, 594, 595, 596, 597, 598, 599, 600, 601, 602, 603,604, 605, 606, 607, 608, 609, 610, 611, 612, 613, 614: n = A,T,C or G
  misc_feature 615, 616, 617, 618, 619, 620, 621, 622, 623, 624, 625, 626,627, 628, 629, 630, 631, 632, 633, 634, 635, 636, 637, 638,639, 640, 641, 642, 643, 644, 645, 646, 647, 648, 649, 650,651, 652, 653, 654, 655, 656, 657, 658, 659, 660, 661: n = A,T,C or G
  misc_feature 662, 663, 664, 665, 666, 667, 668, 669, 670, 671, 672, 673,674, 675, 676, 677, 678, 679, 680, 681, 682, 683, 684, 685,686, 687, 688, 689, 690, 691, 692, 693, 694, 695, 696, 697,698, 699, 700, 701, 702, 703, 704, 705, 706, 707, 708-874: n = A,T,C or G
agnnnngacgcgcgttatangacttactatagggcnaattggagctccccgcggtggcggcccgcccgggcaggtacgcggggacaccaaacaactcattacacaaagaggtaaggtcccagaccacgccaaagcttcctgagacctctcctcatctgtgcatggacggatgaccaactctggggcccaggctgttgcttcccagtataatgatgaatccgccatagtctggtgagtgtagaggctgactctggagcccaggctgtacctcggccgctctagaactagtggatcccccgggctgcaggaattcgatatcaagcttatcgataccgtcgacctcgagggggggcccggtacccagcttttgttccctttagtgagggttaattgcgcgcttggcgtaatcatggtcatagctgtttcctggnnnnnnnnnnnnnnnnnnnnnnnnnnnnnnnnnnnnnnnnnnnnnnnnnnnnnnnnnnnnnnnnnnnnnnnnnnnnnnnnnnnnnnnnnnnnnnnnnnnnnnnnnnnnnnnnnnnnnnnnnnnnnnnnnnnnnnnnnnnnnnnnnnnnnnnnnnnnnnnnnnnnnnnnnnnnnnnnnnnnnnnnnnnnnnnnnnnnnnnnnnnnnnnnnnnnnnnnnnnnnnnnnnnnnnnnnnnnnnnnnnnnnnnnnnnnnnnnnnnnnnnnnnnnnnnnnnnnnnnnnnnnnnnnnnnnnnnnnnnnnnnnnnnnnnnnnnnnnnnnnnnnnnnnnnnnnnnnnnnnnnnnnnnnnnnnnnnnnnnnnnnnnnnnnnnnnnnnnnnnnnnnnnnnnnnnnnnnnnnnnnnnnnnnnnnnnnnnnnnnnnnnnnnnnnnnnnnnnnnnnnnn

SEQ ID NO: 9345 - DNA, 385 bp, Homo sapiens
gtatacgactactatagggcgaattggagctccaccgcggtggcggccgaggtaccaggctaagtagctgctaacactctgactggccctgcaggagagggtggctctttcccctggagacaaagacagggtggctggagactgtgtcaacacaatttctccggtggtatctgggagccagagtagcaggaggaagagaagctgagctggggcttccatggttccctctgggtcctaactgagcagttcctcccccgcgtacctgcccgggcggccgctctagaactagtggatcccccgggctgcaggaattcgatatcaagcttatcgataccgtcgacctcgagggggggcccggtacccagcttttgttccctttagtgag

SEQ ID NO: 9346 - DNA, 375 bp, Homo sapiens
  misc_feature 6, 7, 10, 15, 31, 33, 41, 181, 192, 193, 200, 215, 216, 217,218, 219, 220, 237, 238, 246, 247, 248, 271, 272, 274, 275,284, 299, 311, 312, 313, 338, 344, 345, 368, 369, 370, 371,372, 373, 374, 375: n = A,T,C or G
gcgaannatngtacntcaactcagagggccnanattggaanctccaccgcggtggcggccgcccgggcaggtacttttttttttttttttttttccccttttttttttttttttttttttttttttttttttttttttttttttttttttttttttttttttttttttttttttttttttnggggggggggnnaaaaaanccccccccccccccnnnnnnaaaaaaaaaaaaaaaanncccccccnnnaaaaaaaaaaaaaaaaaaaaaanncnnccccccccnggggggggggggggnaaaaaaaaaaannntttaaaaaaaaaaaaaaaaaaaaancccccnnaaaaaaaaaaaaaaaaaaaaaannnnnnnn

SEQ ID NO: 9347 - DNA, 593 bp, Homo sapiens
  misc_feature 3, 4, 38, 507, 540, 557, 578, 580, 592: n = A,T,C or G
ggnnagtgccaactagtaacccacgcgtccgggaggtnaacgggctatgctggcttgacagggctgggctcttcagaacagaagcatggatctcggaatccctgacctgctggacgcgtggctggagcccccagaggatatcttctcgacaggatccgtcctggagctgggactccactgcccccctccagaggttccggtaactaggctacaggaacagggactgcaaggctggaagtccggtggggaccgtggctgtatcagtggagcccagcatttatggtgcctgattcctgcatggtcagtgagctgccctttgatgctcatgcccacatcctgcccagagcaggcaccgtagccccagtgccctgtacaaccctgctgccctgtcaaaccctgttcctgaccgatgaggagaagcgtctgctggggcaggaaggggtttccctgccctctcacctgcccctcaccaaggcagaggagagggtcctcaaagaaggtcaggangaaaatccgtaacaagctgtcaactcatgacantcagcgggcggaagaangagtacattcaaaggctggananttttttgaaaant

SEQ ID NO: 9348 - DNA, 596 bp, Homo sapiens
  misc_feature 3, 203, 427, 428, 430, 442, 444, 445, 449, 450, 453, 454,455, 456, 457, 458, 459, 460, 461, 462, 463, 464, 465, 467,468, 469, 470, 471, 472, 473, 474, 475, 486, 499, 556: n = A,T,C or G
agnagctccagcaggggcacagaaggattgggggcaggaaggagtctggaacacagccttcatgccccctgaccccaggccgaccctccccacaccctagggtaccccagtcgtatcctctgtccgcatgtgtggccaggcctgacaaacacctgcagatggctgctgccccaacctgggacctgcccaggaggttggagcanaaagggctctccctggggtggtgtttctcctctagggtattgggatgcatgttctgcactgccagcagagagggtgtgtctgggggccaccacctatgggacacggggtcgaaggggcctgtacactctgtcatttcctttctagcccctgcatctccaacaagtccaaggtgacagctggtgctaggggcgtggggttaataaatggcttatccttctctccnnanaaaaaaaaaaanannaaannaannnnnnnnnnnnnannnnnnnnnggggcggccgntaaactagtctanaaaaaaaacctcccacacctccccctgaacctgaaacataaaatgaatgcaatggtngttgttaacttgtttattgcagcttataatggttacaaac

SEQ ID NO: 9349 - DNA, 879 bp, Homo sapiens
  misc_feature 19, 524, 749, 752, 811, 818, 819, 821, 834, 863, 877, 878: n = A,T,C or G
ggctactatagggcgaatnggccctctagatgcatgctcgagcggccgccagtgtgatggatatctgcagaattcggcttagcgtggtcgcggccgaggtactcctgcaattatgttctatcgcacaatcaaccttaaaatatatctgtgggcttgagctaatcatatgcccctaaaacaggaggacgggagagagatatgaagcatgagaaagagcaggaaggttggtttgaagctggaggggaccacataagaaggaatgcaggcagccttgaggtgagagaggggcctccagctgagagccagcaaagaactgaattccgccaacaacctgaatgaatttagaagcagattcttccccagagcctccatgaaggaatgttgtcctgccaacccttatttcagcctttaagaccctgagcagagaatccagccacactgtgccagactcatgagctacagaactgctatgggtattgttttttaaactgctaaatttggggtaatttgtcacacagcaatanaaaactaatacactgcccaaggggtaacttttcttaacctaattacatttggcagtttctgcttgggttcttgaatgcatttttttcctgctgactagtagtaatattctccttttgcaggcaacctttggaaaacctttaatataaatcatactggtttgtattcagtatccagtattgtttgtttggcctaagtcctgttttctaatgtacctgccgggcggncgntcgaaagcccaattccaacccactggcgggcgtacctatggatccgagctcggtccaanacttggnntnatcatgggcatanctggttcctggtgaaaattgttttccgtnacaattccacacannt

SEQ ID NO: 9350 - DNA, 579 bp, Homo sapiens
  misc_feature 5, 6, 7, 8, 11, 21, 25, 579: n = A,T,C or G
aggannnnccngtttcggcanaccngtccggggatgctctgacaaccaggtgtcgtccacgggcgggggcatgggcatggtgacagtggtcctgttgatgtcaccgatgatgctgagcgcctccttcagcgcgtggtgcatgtgcagcatctcgtcgtgctgctgtgcctgctctgccaactcctccatcagtgtgttctggttcccacatgagtacatattggccagcggctccgagatgatgaactccggggtctgagagtgggcaaacagggaagaaggttgggacctggtgcctgtgccgccctggctgccttgctgggcccttctgggactgtgcgctggacttggagccccttggagtatggcttttcacacgggcttctataccgcttcgactggaagatccacctccccactgccttttctcactcagatggggacaccgaggtccagaggaaaagacacctgtcaaatgtcaccagatctgggaggggacttaagacttatcatgccaagaggacacctgtctactcagtttttttttggtggggcggggggcggtgataggggtctcgn

SEQ ID NO: 9351 - DNA, 430 bp, Homo sapiens
  misc_feature 2, 3, 9, 10, 404: n = A,T,C or G
gnnagcctnncactactatagggcgaattggagctccccgcggtggcggccgcccgggcaggtactattgacccagcgatgggggcttcgacatgggctttagggagtcataagtggagtccgtaaagaggtatctttactataaaagctattgtgtaagctagtcatattaagttgttggctcaaggaagttttgatagttcttgagcagtgagagtgagtagtagaatgtttagtgagcctagggtgttgtgagtgtaaattagtgcgatgagtaggggaagggagcctactagggtgtagaataggaagtatgtgcctgcgttcaaggccgttctggcctggttgccctcatcgggtgatgatagccaaggtggggataaagttgttggtttcgaaagaanatataaaaatatgattaggttctgtg

SEQ ID NO: 9352 - DNA, 882 bp, Homo sapiens
  misc_feature 11, 462, 508, 523, 542, 554, 574, 580, 608, 610, 611, 627,638, 641, 644, 652, 656, 659, 661, 667, 669, 673, 674, 680,682, 683, 689, 690, 691, 699, 702, 706, 713, 717, 720, 727,729, 730, 731, 732, 733, 734, 735, 737, 738, 739, 741: n = A,T,C or G
  misc_feature 742, 744, 745, 750, 751, 754, 760, 775, 777, 783, 784, 786,789, 793, 794, 797, 800, 801, 804, 805, 806, 807, 808, 810,811, 813, 815, 816, 825, 829, 830, 831, 832, 834, 835, 836,837, 839, 845, 846, 848, 854, 855, 858, 860, 863, 864: n = A,T,C or G
  misc_feature 865, 866, 867, 869, 871, 872, 874, 875, 876, 879, 880, 882: n = A,T,C or G
aacgccgtatncgactactatagggcgaattggagctccaccgcggtggcggccgcccgggcaggtacctggatctctgctgcaaggcacccatcggtgaatcacatggccttccatgccctcctgcggactccagtctttccagctatttctcccagcttttaaccggattccttcatcaggccactgtagctctttccttttagacaggttgatcccttccagaatttgactgggatccacaatttggactctgtaaatcacttctgcctttctggagtgtgaattgttggcaggacttaaggtgttgcctggctgtgcatcagtggcactgctctgacctccctctgtcgcaagaaagcccacgagagtgtgatgtttgcaggctgggatgctttggctggagctgctggaggaaggcaggcccgtgctgcacacaggccagcccgctttgaccttganggttccatttggttcaccatcaacagtcgggattggatggatgatnggcaagtttccgaancgatattctgactaagtanaagagccgcccnacaaggccacaaaacccaantgggtngacatcccggaagggatgaatgcccgcntnntttttccataggaaanactggcttgcntantgnaggcccgngcanganantttttnancaanncccgantnnacaaannnaaaactgnggntaangctaaangatnganggaaacncnnnnnnntnnngnnanntttannaanaagtgnatccccctggcttgnangaattnntnatntaanntanttnnttnnnnnanncntnnagggggggnccgnnnncnnnntntagttnnantaatgnnagntnatnnnnntntnnannnatnntn

SEQ ID NO: 9353 - DNA, 464 bp, Homo sapiens
  misc_feature 178, 186, 326, 346, 368, 369, 380, 387, 389, 395, 397, 398,400, 402, 405, 418, 421, 423, 442, 444, 450, 453, 457, 458,462, 464: n = A,T,C or G
ggcgaattgggccctctagatgcatgctcgagcggccgccagtgtgatggatatctgcagaattcgccctttcgagcggccgcccgggcaggtacgcggggagaacatggacgttaatatcgccccactccgcgcctgggacgatttcttcccgggttccgatcgctttgcccggccnggactttnagggacattttcccaaatgggaacaaccgcggtagtgagcaacctgctctattaccagaccaactacctggtggtggctgccatgatgatttccattgtggggtttctgagtcccttcaacatgatcctgggaggaatcntgggtggtgcttggatgttnaacagggttttgtgttgggcanncccacattaanataactntnctttancnntngnatntaaagtaaaatcnttntntatcaaaccaacctttatntntttatnggngatnnattnan

SEQ ID NO: 9354 - DNA, 616 bp, Homo sapiens
  misc_feature 2, 3, 4, 5, 9, 11, 12, 334, 489, 506, 512, 520, 547: n = A,T,C or G
gnnnntgancnntcacttagggcgaattgggccctctagatgcatgctcgagcggctcgccagtagtgatggatatctgcagaattcggctttcgagcggccgcccgggcaggtacaaaaacccaaattgataaatctgcaaaatcttaaacttcttaatccattgataaatattaaggagtagctggtcttcaaacaccgtaaaaagttaaagggttgaaaacatgttcaccctttgctatacggtggcatctgaaattatcaggcatgacaacttgaatttgttttgctcttccatgcaagaagtatatatatgcattttaagatagcttanaattaagagttaacttctagtcagtattggtaagtgactaggatggctatccaatcagtattctatggtatcacataccaaagtctctacaatatgacagtcttgtcttgttcagaactcatcacttttgggtagggaagagaggcacggcaganaagcagttgcaattaanaaaaanaaacagcngaaaagctttaaatatctatataattntgaatcatcttgtattctatcagataatacttggaacaaaatcttatttcaatcagctcaatctataca

SEQ ID NO: 9355 - DNA, 600 bp, Homo sapiens
  misc_feature 2, 3, 7, 14, 15, 18, 21, 22, 23, 29, 108, 111, 117, 118,122, 127, 130, 131, 133, 134, 142, 148, 152, 153, 154, 160,162, 166, 172, 177, 181, 182, 183, 184, 187, 188, 189, 195,196, 197, 204, 208, 209, 210, 211, 218, 221, 224, 227: n = A,T,C or G
  misc_feature 236, 237, 239, 244, 245, 246, 257, 267, 269, 275, 276, 288,292, 293, 301, 308, 311, 312, 316, 317, 321, 325, 332, 336,341, 371, 387, 392, 393, 399, 401, 402, 403, 407, 408, 413,414, 421, 422, 424, 427, 428, 443, 450, 458, 468, 474: n = A,T,C or G
  misc_feature 476, 479, 492, 495, 500, 505, 511, 512, 513, 514, 515, 517,519, 520, 521, 526, 527, 528, 529, 530, 531, 532, 533, 534,535, 536, 537, 538, 539, 540, 541, 542, 543, 544, 545, 546,547, 548, 549, 550, 551, 552, 553, 554, 555, 556, 557: n = A,T,C or G
  misc_feature 558, 559, 560, 561, 562, 563, 564, 565, 566, 567, 568, 569,570, 571, 572, 573, 574, 575, 576, 577, 578, 579, 580, 581,582, 583, 584, 585, 586, 587, 588, 589, 590, 591, 592, 593,594, 595, 596, 597, 598, 599: n = A,T,C or G
anngcgntaaactnnttnctnnnaggganaaatagggaactccaccgcggtggccggctcgcccgggcaggtactttttttttttttttttttttaaaaaagggtttnccntttttnncccnagggnggnngnnaagggggnaatttnggtnnncccaancntttncccccngggtnaaannnnttnnncccccnnnccccccnaaannnngggggtnaanggnttnccccccctnncngggtnnnttttttttttnaaaaaaaaananggtttnncctttttaaaangggnngttttaanccccaanccnngggnntttntttnccttggnttcnaaaanggcccccggttcctgggccgttttaaaaantagggacccccccggncgggnnaatttnannnaaannttttnnaaccccnncnccnngggggggggccccgnccccccntttttttnccttttaagngggganantcnccccttgggaaanaanagggnaaatntttttnnnnngnannnaaaannnnnnnnnnnnnnnnnnnnnnnnnnnnnnnnnnnnnnnnnnnnnnnnnnnnnnnnnnnnnnnnnnnnnnnnnnc

SEQ ID NO: 9356 - DNA, 678 bp, Homo sapiens
  misc_feature 19, 22, 30, 247, 347, 371, 393, 435, 542, 597, 651, 656,659, 668, 673: n = A,T,C or G
gcaattaaccctcactaanggnaacaaagnctgggtaccgggccccccctcgggtcgacggtatcgataagcttgatatcgaattcctgcagcccgggggatccactagttctagagcggccgaggtactttttttttttttttttttttttttttttactatcgatctcttttaatttttaggccaattttgagtagtcaaagtcagagcagtcaatctgtgttgtgagccgaggcacagctgcanaagcgtgtctgaggtgtccggtggaggtggcagccgagctctgggactaatcaccgtgctggggacggcaccgcgtcaggatgcaggcagatccctgcanaagtgtctaaaattcacactcctnttctggagggacgtcgatggtnttaggatagaagcaccaggggaccccacgaacggtgtcgtcnaaacagcagcccttatttgcacactgggagggcgtgacaccaggaaaaccacaattctgtctttcacggggggccactgtacctgcccgggcggccgccaccgcggnggagctccaattcgccctatagtgagtcgtattacgcgcgctcactggccgtcgntttacaacgtcgtgactgggaaaaccctggcgttacccaacttaatcgccttgnagcanatncccctttcngcagntgggg

SEQ ID NO: 9357 - DNA, 442 bp, Homo sapiens
  misc_feature 5: n = A,T,C or G
gagcnccgcgtaatacgacctcactatagggcgaattggagctccaccgcggtggcggccgaggtacaggacacaatgcccccagaaaagtaacagccgtcatttatgctagaaaaggaagtgtcctccagagcatagagaaaataagttcctctgttgatgcaacaactgttacttcacaacagtgtgtttttagagaccaagaaccaaagatccataatgagatggcatcaacatcagataaaggtgcccaaggaagaaatgacaagaaagattctcaaggaagaagtaataaggcattacatctgaagagtgatgctgaatttaaaaagatatttggccttactaaggatttgagagtgtgccttactcgaattcctgaccatttgacctctggagaaggtttcgattcctttagcagtttggtaaagagcggtacctg

SEQ ID NO: 9358 - DNA, 635 bp, Homo sapiens
  misc_feature 3, 5, 12, 15, 58: n = A,T,C or G
gtngnagcgttnccncgcgtccgggcccggcggcgcagccccaaagcgagcgaagctngggtcgccgccactgccgcaggaggcgtgaggggataaaaacattcagatggcagatcacagtttttcagatggggttccttcagattccgtggaagctgctaaaaatgcaagtaacacagaaaagctcacagatcaggtgatgcagaatcctcgagttctggcagctttacaggagcgacttgacaatgtccctcacaccccttccagctacatcgaaactttacctaaagcagtaaaaagaagaattaatgcattgaaacaacttcaggtgagatgtgctcacatagaagccaagttctatgaagaggtacatgacttggaaagaaagtatgcagcgctataccagcctctctttgacaagagaagagaatttatcaccggcgatgttgaaccaacagatgcggaatcggaatggcacagtgaaaatgaagaggaagagaaattggctggagacatgaaaagtaagtagtcgtccagaaaaaagcacggcaaccgctgaagagccagatccccaaggaattcagagttctgggttacccttcttcagaaatgtggacatgctgagtgaattagtc

SEQ ID NO: 9359 - DNA, 409 bp, Homo sapiens
gtatacgactactatagggcgaattggagctccaccgcggtggcggccggggccggagaggggctgaccgggttggttttgatctgataaatgcacgcatcccccccgcgaagggggtcagcgcccgtcggcatgtattagctctagaattaccacagttatccaagtaggagcccgcgtacctgcccgggcggccgctctagaactagtggatcccccgggctgcaggaattcgatatcaagcttatcgataccgtcgacctcgagggggggcccggtacccagcttttgttccctttagtgagggttaattgcgcgcttggcgtaatcatggtcatagctgtttcctgtgtgaaattgttatccgctcacaattccacacaacatacgagcccgggagcataaagtg

SEQ ID NO: 9360 - DNA, 970 bp, Homo sapiens
  misc_feature 418, 425, 426, 427, 428, 429, 430, 431, 432, 433, 434, 435,436, 437, 438, 439, 440, 441, 442, 443, 444, 445, 446, 447,448, 449, 450, 451, 452, 453, 455, 456, 458, 459, 460, 461,462, 463, 464, 465, 466, 467, 468, 469, 470, 471, 472: n = A,T,C or G
  misc_feature 473, 474, 475, 476, 477, 478, 479, 480, 481, 482, 483, 484,485, 486, 487, 488, 489, 490, 491, 492, 493, 494, 495, 496,497, 498, 499, 500, 501, 502, 503, 504, 505, 506, 507, 508,509, 510, 511, 512, 513, 514, 515, 516, 517, 518, 519: n = A,T,C or G
  misc_feature 520, 521, 522, 523, 524, 525, 526, 527, 528, 529, 530, 531,532, 533, 534, 535, 536, 537, 538, 539, 540, 541, 542, 543,544, 545, 546, 547, 548, 549, 550, 551, 552, 553, 554, 555,556, 557, 558, 559, 560, 561, 562, 563, 564, 565, 566: n = A,T,C or G
  misc_feature 567, 568, 569, 570, 571, 572, 573, 574, 575, 576, 577, 578,579, 580, 581, 582, 583, 584, 585, 586, 587, 588, 589, 590,591, 592, 593, 594, 595, 596, 597, 598, 599, 600, 601, 602,603, 604, 605, 606, 607, 608, 609, 610, 611, 612, 613: n = A,T,C or G
  misc_feature 614, 615, 616, 617, 618, 619, 620, 621, 622, 623, 624, 625,626, 627, 628, 629, 630, 631, 632, 633, 634, 635, 636, 637,638, 639, 640, 641, 642, 643, 644, 645, 646, 647, 648, 649,650, 651, 652, 653, 654, 655, 656, 657, 658, 659, 660: n = A,T,C or G
  misc_feature 661, 662, 663, 664, 665, 666, 667, 668, 669, 670, 671, 672,673, 674, 675, 676, 677, 678, 679, 680, 681, 682, 683, 684,685, 686, 687, 688, 689, 690, 691, 692, 693, 694, 695, 696,697, 698, 699, 700, 701, 702, 703, 704, 705, 706, 707-970: n = A,T,C or G
agccgtatcgactactatagggcgaattggagctccccgcggtggcggccgccgggcaggtactttactgcacccagcagactttcaacaactcattgatccaaagatacatgcacagtctgagcaccagctatggtgctcataacttctttaagacttgaaccctttcaatctgtgtgattcattaaattggaccattgatgataagaatacacattgtatgtttctgtgcacatgacagtgtgtgtgtgtgcacgtacctcggccgctctagaactagtggatcccccgggctgcaggaattcgatatcaagcttatcgataccgtcgacctcgagggggggcccggtacccagcttttgttccctttagtgagggttaattgcgcgcttggcgtaatcatggtcatagctgtttncctggannnnnnnnnnnnnnnnnnnnnnnnnnnnncnngnnnnnnnnnnnnnnnnnnnnnnnnnnnnnnnnnnnnnnnnnnnnnnnnnnnnnnnnnnnnnnnnnnnnnnnnnnnnnnnnnnnnnnnnnnnnnnnnnnnnnnnnnnnnnnnnnnnnnnnnnnnnnnnnnnnnnnnnnnnnnnnnnnnnnnnnnnnnnnnnnnnnnnnnnnnnnnnnnnnnnnnnnnnnnnnnnnnnnnnnnnnnnnnnnnnnnnnnnnnnnnnnnnnnnnnnnnnnnnnnnnnnnnnnnnnnnnnnnnnnnnnnnnnnnnnnnnnnnnnnnnnnnnnnnnnnnnnnnnnnnnnnnnnnnnnnnnnnnnnnnnnnnnnnnnnnnnnnnnnnnnnnnnnnnnnnnnnnnnnnnnnnnnnnnnnnnnnnnnnnnnnnnnnnnnnnnnnnnnnnnnnnnnnnnnnnnnnnnnnnnnnnnnnnnnnnnnnnnnnnnnnnnnnnnnnnnnnnnnnnnnnnnnnnnnnnnnnnnnnnnnnnnnnnnnnnnnnnnnnnnnnnnnnnnnnnn

SEQ ID NO: 9361 - DNA, 597 bp, Homo sapiens
  misc_feature 307, 317, 318, 319, 320, 321, 322, 323, 324, 325, 326, 327,328, 329, 330, 331, 332, 333, 334, 335, 336, 337, 338, 339,340, 341, 342, 343, 344, 345, 346, 347, 348, 349, 350, 351,352, 353, 354, 355, 356, 357, 358, 359, 360, 361, 362: n = A,T,C or G
  misc_feature 363, 364, 365, 366, 367, 368, 369, 370, 371, 372, 373, 374,375, 376, 377, 378, 379, 380, 381, 382, 383, 384, 385, 386,387, 388, 389, 390, 391, 392, 393, 394, 395, 396, 397, 398,399, 400, 401, 402, 403, 404, 405, 406, 407, 408, 409: n = A,T,C or G
  misc_feature 410, 411, 412, 413, 414, 415, 416, 417, 418, 419, 420, 421,422, 423, 424, 425, 426, 427, 428, 429, 430, 431, 432, 433,434, 435, 436, 437, 438, 439, 440, 441, 442, 443, 444, 445,446, 447, 448, 449, 450, 451, 452, 453, 454, 455, 456: n = A,T,C or G
  misc_feature 457, 458, 459, 460, 461, 462, 463, 464, 465, 466, 467, 468,469, 470, 471, 472, 473, 474, 475, 476, 477, 478, 479, 480,481, 482, 483, 484, 485, 486, 487, 488, 489, 490, 491, 492,493, 494, 495, 496, 497, 498, 499, 500, 501, 502, 503: n = A,T,C or G
  misc_feature 504, 505, 506, 507, 508, 509, 510, 511, 512, 513, 514, 515,516, 517, 518, 519, 520, 521, 522, 523, 524, 525, 526, 527,528, 529, 530, 531, 532, 533, 534, 535, 536, 537, 538, 539,540, 541, 542, 543, 544, 545, 546, 547, 548, 549, 550: n = A,T,C or G
  misc_feature 551, 552, 553, 554, 555, 556, 557, 558, 559, 560, 561, 562,563, 564, 565, 566, 567, 568, 569, 570, 571, 572, 573, 574,575, 576, 577, 578, 579, 580, 581, 582, 583, 584, 585, 586,587, 588, 589, 590, 591, 592, 593, 594, 595, 596, 597: n = A,T,C or G
actactatagggcgaattggagctccaccgcggtggcggccgaggtacagcatttcctggaggatctctggagcgatatagtctggcgtgccacagaatgtggccgtggtgacaccattgcaaatcccctccttgcacattccgaagtctgccagtttacagtgaccctcgtggtccaacaggacattgtccagtttcagatctctcatactcagcctataccccatcctccactctagcacccatctctacccatcagagtcagaatgaacacccataggggaggtggccactgtgtgcccccccncgtacctggnnnnnnnnnnnnnnnnnnnnnnnnnnnnnnnnnnnnnnnnnnnnnnnnnnnnnnnnnnnnnnnnnnnnnnnnnnnnnnnnnnnnnnnnnnnnnnnnnnnnnnnnnnnnnnnnnnnnnnnnnnnnnnnnnnnnnnnnnnnnnnnnnnnnnnnnnnnnnnnnnnnnnnnnnnnnnnnnnnnnnnnnnnnnnnnnnnnnnnnnnnnnnnnnnnnnnnnnnnnnnnnnnnnnnnnnnnnnnnnnnnnnnnnnnnnnnnnnnnnnnnnnnnnnnnnnnnnnnnnnn

SEQ ID NO: 9362 - DNA, 658 bp, Homo sapiens
  misc_feature 19, 22, 23, 26, 30, 38, 39, 48, 49, 55, 58, 60, 61, 586,587, 595, 596, 597, 598, 599, 600, 601, 602, 603, 604, 605,606, 607, 608, 609, 610, 611, 612, 613, 614, 615, 616, 617,618, 619, 620, 621, 622, 623, 624, 625, 626, 627, 628: n = A,T,C or G
  misc_feature 629, 630, 631, 632, 633, 634, 635, 636, 637, 638, 639, 640,641, 642, 643, 644, 645, 646, 647, 648, 649, 650, 651, 652,653, 654, 655, 656, 657, 658: n = A,T,C or G
ggtctggactgtttcctgngtnnaanggancctctagnngcatgctcnnagcggncgncnntgtgatggatatctgcagaaattcggctttcgagcggccgcccgggcaggttctagctagagggtttaactcctatttaaaaagaagaacctttgaattctaacggctgagctcttggaagacttgggtccttgggtcgcaggtgggagccgacgggcatcatggaccgatctaaagaaaactgcatttcaggacctgttaaggctacagctccagttggaggtccaaaacgtgttctcgtgactcagcaaattccttgtcagaatccattacctgtaaatagtggccaggctcagcgggtcttgtgtccttcaaattcttcccagcgcgttcctttgcaagcacaaaagcttgtctccagtcacaagccggttcagaatcagaagcagaagcaattgcaggcaaccagtgtacctcggccgcgaccacgctaagccgaattccagcacactggcggccgttactagtggatccgagctcggtaccaagcttggcgtaatcatggtcatagctgtttcctgggannaaaaaaannnnnnnnnnnnnnnnnnnnnnnnnnnnnnnnnnnnnnnnnnnnnnnnnnnnnnnnnnnnnnnn

SEQ ID NO: 9363 - DNA, 884 bp, Homo sapiens
  misc_feature 4, 6, 199, 558, 664, 694, 768, 771, 827, 829, 842, 855, 876: n = A,T,C or G
tcantnggagtcgacccacgcgtccgcacaggagcggattcgtcgctttcacggccatcgagccgaacctctcgcaagtccgtgagccgttaaggaggcccccagtcccgacccttcgccccaagcccctcggggtccccgggcctggtactccttgccacacgggaggggcgcggaagccggggcggaggaggagccncccgggctgggctgagacccgcagaggaagacgctctagggatttgtcccggactagcgagatggcaaggctgaggacgggaggctgattgagaggcgaaggtgtcgtgaaaactacccctaaaagccaaaatgggaaaggaaaagactcatatcaacattgtcgtcattggacacgtagattcgggcaagtccaccactactggccatctgatctataaatgcggtggcatcgacaaaagaaccattgaaaaatttgagaaggaggctgctgagatgggaaagggctccttcaaagtatgcctgggtcttggataaactgaaagctgagcgtgaacgtggtatcaccattgatatctncttgtggaaatttgagaccagcaagtactatgtgactatcattgatgccccaggacacagagactttatcaaaaacatgattacagggacatttaagcttgactgngctgtcctgaatggtgctgctggtgttggngaaatttgaagcttgtattttcaagaatgggccagaccccagagcattccctttttggcttacacacttgggtntgnaacaactaaattgtcggtggtaacaaaaatggatttcacttgagccccccttcagncngaaaaaatatganggaaattttttanggaagtcgcccttacattaanaaaaatgg

SEQ ID NO: 9364 - DNA, 688 bp, Homo sapiens
  misc_feature 3, 9, 13, 18, 20, 33, 35, 74, 77, 80, 101, 104, 115, 670,679, 686: n = A,T,C or G
gtnatacgnactncactntnagggcgaattggnanctccaccgcggtggcggccgcccgggcaggtacgcgggnagnagnatggagagctaaagtccaagnagnaggatccgagnaacgctctaagcctgtccacgagctcaatagggaagcctgtgatgactacagactttgcgaacgctacgccatggtttatggatacaatgctgcctataatcgctacttcaggaagcgccgaggggccaaatgagactgagggaagaaaaaaaatctctttttttctggaggctggcacctgattttgtatccccctgtagcagcattactgaaatacataggcttatatacaatgcttctttcctgtatattctcttgtctggctgcacccctttttcccgcccccagattgataagtaatgaaagtgcactgcagtgagggtcaaaggagagtcaacatatgtgattgttccataataaacttctggtgtgatacttaaaaaaaaaaaaaaaaaaaaaaaaaagtacctcggccgctctagaactagtggatcccccgggctgcaggaattcgatatcaagcttatcgataccgtcgacctcgagggggggcccggtacccagcttttgttccctttagtgagggttaattgcgcgcttggcgtaatcatggncatagctgnttcctgngc

SEQ ID NO: 9365 - DNA, 416 bp, Homo sapiens
  misc_feature 7, 11, 18, 28, 324, 325, 326, 327, 328, 329, 330, 331, 332,333, 334, 335, 336, 337, 338, 339, 340, 341, 342, 343, 344,345, 346, 347, 348, 349, 350, 351, 352, 353, 354, 355, 356,357, 358, 359, 360, 361, 362, 363, 364, 365, 366, 367: n = A,T,C or G
  misc_feature 368, 369, 370, 371, 372, 373, 374, 375, 376, 377, 378, 379,380, 381, 382, 383, 384, 385, 386, 387, 388, 389, 390, 391,392, 393, 394, 395, 396, 397, 398, 399, 400, 401, 402, 403,404, 405, 406, 407, 408, 409, 410, 411, 412, 413, 414: n = A,T,C or G
  misc_feature 415, 416: n = A,T,C or G
atccgcntatngacatantatagggctnattggagctccaccgcggtggcggccgaggtacgcggggatgctgcgcctctccgaacgcaacatgaaggtgctccttgccgccgccctcatcgcggggtccgtcttcttcctgctgctgccgggaccttctgcggccgctctagaactagtggatcccccgggctgcaggaattcgatatcaagcttatcgataccgtcgacctcgagggggggcccggtacccagcttttgttccctttagtgagggttaattgcgcgcttggcgtaatcatggtcatagctgttttccctgannnnnnnnnnnnnnnnnnnnnnnnnnnnnnnnnnnnnnnnnnnnnnnnnnnnnnnnnnnnnnnnnnnnnnnnnnnnnnnnnnnnnnnnnnnnn

SEQ ID NO: 9366 - DNA, 887 bp, Homo sapiens
  misc_feature 1, 2, 4, 5, 6, 7, 311, 312, 313, 314, 315, 316, 317, 318,319, 320, 321, 322, 324, 325, 326, 327, 328, 329, 330, 331,332, 333, 334, 335, 336, 337, 338, 340, 342, 343, 345, 346,348, 349, 350, 352, 354, 356, 357, 358, 359, 360, 361: n = A,T,C or G
  misc_feature 362, 363, 366, 368, 369, 371, 372, 373, 374, 375, 376, 377,378, 379, 380, 382, 383, 386, 387, 389, 390, 391, 393, 394,395, 396, 397, 398, 399, 400, 401, 402, 403, 404, 405, 406,407, 408, 409, 410, 411, 412, 414, 416, 417, 418, 419: n = A,T,C or G
  misc_feature 420, 421, 422, 423, 424, 425, 426, 427, 428, 429, 430, 431,432, 433, 434, 435, 436, 437, 439, 440, 441, 442, 443, 444,445, 446, 447, 448, 449, 450, 451, 453, 459, 460, 462, 463,464, 465, 466, 467, 468, 469, 470, 471, 472, 473, 479: n = A,T,C or G
  misc_feature 480, 482, 485, 486, 487, 488, 489, 490, 491, 493, 494, 495,496, 497, 498, 499, 500, 501, 502, 503, 504, 505, 506, 507,508, 509, 510, 511, 512, 514, 515, 516, 518, 519, 520, 521,522, 523, 524, 525, 526, 527, 528, 529, 530, 531, 532: n = A,T,C or G
  misc_feature 533, 535, 536, 537, 538, 539, 540, 541, 542, 543, 544, 545,546, 547, 548, 549, 550, 551, 552, 553, 554, 555, 556, 557,558, 559, 560, 561, 562, 563, 564, 565, 566, 567, 568, 569,570, 571, 572, 573, 574, 575, 576, 577, 578, 579, 580: n = A,T,C or G
  misc_feature 581, 582, 583, 584, 585, 586, 587, 588, 589, 590, 591, 592,593, 594, 595, 596, 597, 598, 599, 600, 601, 602, 603, 604,605, 606, 607, 608, 609, 610, 611, 612, 613, 614, 615, 616,617, 618, 619, 620, 621, 622, 623, 624, 625, 626, 627-886: n = A,T,C or G
nngnnnngaccgcgcgttatacgactcactatagggcgaattggagctccaccgcggtggcggcccgcccgggcaggtaccatagaacaaggcttcctccaacaggccgaggttgatgcaggcatccatggcgcagtcgagcaccttcagctggtgctctagaactagtggatcccccgggctgcaggaattcgatatcaagcttatcgataccgtcgacctcgagggggggcccggtacccagcttttgttccctttagtgagggttaattgcgcgcttggcgtaatcatggtcatagctgtttcctgannnnnnnnnnnngnnnnnnnnnnnnnnnancnncnntnnnanangnnnnnnnnttngnncnnnnnnnnnntnnaannannngnnnnnnnnnnnnnnnnnnnnantnnnnnnnnnnnnnnnnnnnnnncnnnnnnnnnnnnngngggggnncnnnnnnnnnnnntttttnncnttnnnnnnngnnnnnnnnnnnnnnnnnnnnannntnnnnnnnnnnnnnnnncnnnnnnnnnnnnnnnnnnnnnnnnnnnnnnnnnnnnnnnnnnnnnnnnnnnnnnnnnnnnnnnnnnnnnnnnnnnnnnnnnnnnnnnnnnnnnnnnnnnnnnnnnnnnnnnnnnnnnnnnnnnnnnnnnnnnnnnnnnnnnnnnnnnnnnnnnnnnnnnnnnnnnnnnnnnnnnnnnnnnnnnnnnnnnnnnnnnnnnnnnnnnnnnnnnnnnnnnnnnnnnnnnnnnnnnnnnnnnnnnnnnnnnnnnnnnnnnnnnnnnnnnnnnnnnnnnnnnnnnnnnnnnnnnnnnnnnnnnnnnnnnnnnnnnnnnnnnnnnnnnnnnnnnnnnnnnnnnnnnnnnnnnnnnnnnng

SEQ ID NO: 9367 - DNA, 892 bp, Homo sapiens
  misc_feature 484, 510, 651, 653, 655, 725, 738, 758, 762, 775, 781, 796,798, 805, 814, 819, 837, 854, 858, 882: n = A,T,C or G
gcgtaatacgactcactatagggcgaattggagctccaccgcggtggcggccgaggacgcggggaagcggagcaggtgctgcagaagtttgttcaaaacaagtggctgattgaggaaggggagttcaccctgcacggccgctctagaactagtggatcccccgggctgcaggaattcgatatcaagcttatcgataccgtcgacctcgagggggggcccggtacccagcttttgttccctttagtgagggttaattgcgcgcttggcgtaatcatggtcatagctgtttcctgtgtgaaattgttatccgctcacaattccacacaacatacgagccgggagcataaagtgtaaagcctggggtgcctaatgagtgagctaactcacattaattgcgttgcgctcactgcccgctttccagtcgggaaacctgtcgtgccagctgcattaatgaatcggccaacgccccgggagaggcggtttncgtatttgggcgctcttcgctttctngctcactgacttccttgcgctcggtcgttccggctgcggcgagcggtattcaacttcactcaaaaggcggtaaataccgggttattcacaaaaatcaagggggataacgccaggaaaaaacattgttgaaccaaaaggccnancnaaaaagggccaggaacccgtaaaaaaaggcccccgtttgcttgggccgtttttttccataaggcttccgnccccccttgaccnagccatttacaaaaaaattngacnctcaaaattcaanaaggtnggggaaaacccccgncngggactntttaaaganacccnggccgttttccccctggnaagctccccttggtgcncctntttcttgttcccaacccttgccgntttaccggat

SEQ ID NO: 9368 - DNA, 521 bp, Homo sapiens
  misc_feature 229, 335, 363, 371, 441, 478, 479, 500, 517: n = A,T,C or G
ctatagggcgaattgggccctctagatgcatgctcgagcggccgccagtgtgatggatatctgcagaattcggcttagcgtggtcgcggccgaggtacacgtgtcagcatttgttgaattagcacttattgttgaatttagctctggaacaatgcagggaatttgaaatttcttgtaaataaccacaattaggaaaaaaaccatacagctcaaggaaaatccactagtntagccaagataccctaagttcttcaagagacacagagggagaattatgccaaaggtaactatcaccaccagaacgcggccatccacgtacctgcccgggcggccgntcgaaagccgaattccagcacactggcnggccgttnctagttggatccgagctcggtaccaagcttggcgtaatcatggtcatagctgtttcctgtgtgaaaattnttatccgcttacaattccacacaacataccgagccgnnagcataaaagtggaaagcctnggggtgcctaaatgagnggag

SEQ ID NO: 9369 - DNA, 902 bp, Homo sapiens
  misc_feature 5, 6, 631, 649, 659, 668, 699, 703, 707, 714, 747, 787, 798,801, 825, 833, 840, 865, 876, 877, 882, 886, 887, 889, 899,900: n = A,T,C or G
tgggnnactacttagggcgaattggagctccccgcggtggcggccgaggtactaccccttccccaaccccagggaatgcagctcctgactccaaaagagacccttccttcctcttggggagaggagggagaagagtaaagaggactttgtcttgcattgaagtcctctttgatgagtggggattcctagctcccagaaaccatttttagaaacaccctgggccagaagggaacctgctgccatgaaggaaaggacccagtccttgcggaatacgtcacctgctgactaaagatcccttgggccttgaataaccagcagcaatatccaagtagtataccatgggccttgggtgaaactctgagactttctggctccaggtgaaacccagcatattgccagctgtggtggctatagtgagagacttcttctgcttgagaaaagctgaaggaaaaataaagcagtatttgccttgtacctgcccgggcggccgctctagaactagtggatcccccgggctgcaggaattcgatatcaagcttatcgatccgtcgacctggagggggggcccggtacccagcttttgttccctttagtgagggttaattgcccgcttggcgtaatcatggcatanctgtttcctgtgtgaaantgttatccgntcacaattncacacaacataccagcccgggagcattaagngtanaagnctggggngcctaatgaagtgaagctaactcacatttattncgttgggcctacttgcccgttttcaatcgggaaacctggngtgccacttgnttnatgaatcggccaaccccccggggngaggcggnttgggtnttgggcgcttttccctttctggttnctgactccttnnccttngtcnntncggttggggnnat

SEQ ID NO: 9370 - DNA, 617 bp, Homo sapiens
  misc_feature 15, 17, 27, 62, 165, 441, 544, 600: n = A,T,C or G
cgggccccccctcgnantacttctagnaattaattaacgcggggcgatggagcgaaaagtangaaggaggtgaggaaactgaagtcccgggagagacagtggcaaggtcaagtagcaaagtgcactcagccctcccagcaaggagtctgccactcgcgcttgaangacgtgtttgaagagctgctttcccagtgggatgctgccttaaagtcttgattccctggcactctttcctattactgcattttatcggtgctgtttgtgttatgcaacggtagcatcgtgtctccggaagataaaaaaggtctcgatacaaacatccataaccttccacccactccgtcaggaacaacccaatcaaaataaagtcatgagaatttaaaaacaaaaaaaaaaaaaaaagcggccgccaccgcggtggagctccaattcgccctatantgagtcgtattacgcgcgctcactggccgtcgttttacaacgtcgtgactgggaaaaccctggcgtacccaacttaatcgccttgcagcacattccccctttngccagctggcgtattatcgaaaaggcccgcaccgatcgccctttccaacagttgcncaaccctgatgggaatg

SEQ ID NO: 9371 - DNA, 473 bp, Homo sapiens
  misc_feature 1, 4, 11, 15, 19, 29, 30: n = A,T,C or G
ngcnatcactncttnggtntaaggcgganntggagctccccgcggtggcggccgaggtacagatggcttccaggaacaggctcaccaatgaatgaaggagaatgaatacaatgatcgtgatgaaaaaagatttaaatttcttgctgatttggcataaaatgttgaaaccaacaaagacaacataaaactcagaacaggtccctgtgatgagagcatcaaagcctcgcgtggtcaccagtgtggcccatccaagaagcatgtaaggtcaggtcccacatgagaaaacttgacacagccatgccctgaactcttcctgctaccatatcaaagaaatttgattgaagtttgttttctctatagaatatggcattgcaaaatccttgttgtacctgcccgggcggcccgctctagaactagtggatcccccgggctgcaggaattcgatatcaagctttatcgatacccgtcgacct

SEQ ID NO: 9372 - DNA, 501 bp, Homo sapiens
  misc_feature 2, 3, 4, 10, 14, 37, 39, 57, 85, 111: n = A,T,C or G
gnnnaaccantgantccgggcaatttagctcaccgcngnggcggccgggcaggtacnttacccttaggctgaccattcccttttnggggtgcaaaactgctttgaggaaangtccccaggaggaataaactagaagacgcacctgctatttcaccatactatggagaatacagctaatgaagtggtggcagaagcttggccgtgtgagtgccccagggtaaaagtctctcttctgtccagtccagagcagagacttctcccccgtgggcagcagcctgccaccaagactcaagcaatgtaagagtcatctccccagactggctgtcagagcaagaagcacccagccttcctaaaggcagaagagtggaaatctgacagtgcctgccatttccggtacctcggccgctctagaactagtggatcccccgggctgcaggaattcgatatcaagcttatcgataccgtcgacctcgagggggggcccggtacccagcttttgtt

SEQ ID NO: 9373 - DNA, 450 bp, Homo sapiens
  misc_feature 119, 121, 155, 321: n = A,T,C or G
ctatcactactatagggcgaattggagctccaccgcggtggcggccgcccgggcaggtacagagtcttttgcttcctcccacccctagggggaaaaactgctttgtgctttgggaagtngnctctgaaacccggggacagaggacgcattgacanactaggagggagccgggaggatgggctgcagctgtggaggagggtttcagaggagagaggtcggagagcagaggcctgagaagccagaggcaggtgcccgcgtacctcggccgctctagaactagtggatcccccgggctgcaggaattcgatatcaagcttatcnataccgtcgacctcgagggggggcccggtacccagcttttgttccctttagtgagggttaattgcgcgcttggcgtaatcatggtcatagctgtttcctgtgtgaaattgttatcccgctcacaattcc

SEQ ID NO: 9374 - DNA, 593 bp, Homo sapiens
  misc_feature 4, 28, 34, 35, 436, 438, 473, 486, 498: n = A,T,C or G
tcgnccagcgtccggtctatttttattnccttgnnatttttcttttttttttttttttttttgtggatggggacttgtgaatttttctaaaggtgctatttaacatgggaggagagcgtgtgcggctccagcccagcccgctgctcactttccaccctctctccacctgcctctggcttctcaggcctctgctctccgacctctctcctctgaaaccctcctccacagctgcagcccatcctcccggctccctcctagtctgtcctgcgtcctctgtccccgggtttcagagacaacttcccaaagcacaaagcagtttttccccctaggggtgggaggaagcaaaagactctgtacctattttgtatgtgtataataatttgagatgtttttaattattttgattgctggaataaagcatgtggaaatgaccccnanaaaaaaaaaaaaaaaaaaaaaaaaaaaaaaaaaangggcggccgctanactagtctaaanaaaaaacctcccacacctccccctgaacctgaaacataaaatgaatgcaattgttgttgttaacttgtttattgcagcttataatggttacaaat

SEQ ID NO: 9375 - DNA, 685 bp, Homo sapiens
  misc_feature 23, 413, 414, 459: n = A,T,C or G
gactcactatagggcgaattggnactccaccgcggtggcggccgcccgggcaggtacagtggccccccgtgaaagacagaattgtggttttcctggtgtcacgccctcccagtgtgcaaataagggctgctgtttcgacgacaccgttcgtggggtcccctggtgcttctatcctaataccatcgacgtccctccagaagaggagtgtgaattttagacacttctgcagggatctgcctgcatcctgacgcggtgccgtccccagcacggtgattagtcccagagctcggctgccacctccaccggacacctcagacacgcttctgcagctgtgcctcggctcacaacacagattgactgctctgactttgactactcaaaattggcctaaaaattaaaagagatcgatagtnnaaaaaaaaaaaaaaaaaaaaaaaaaaggtccctcggccgctctanaactagtggatcccccgggctgcaggaattcgatatcaagcttatcgataccgtcgacctcgagggggggcccggtacccagcttttgttccctttagtgagggttaattgcgcgcttggcgtaatcatggtcatagctgtttcctgtgtgaaattgttatccgctcacaattccacacaacatacgagcccgggagcataaagtgtaaagcctggggtgccttac

SEQ ID NO: 9376 - DNA, 384 bp, Homo sapiens
  misc_feature 345: n = A,T,C or G
gagctctgcgtaatacgactcactatagggcgaattggagctccaccgcggtggcggccgaggtaccagaattcttcctcggcctccttcagcagctgggtggccttcgccatatccttttcattcttatgttcttcaaaccgggctctcatcaaacaagcaaagtatcggtatttgtctctctggacgcaccacgactcgaggtggcagtagcgcccgcttataaagccgcaacaccttttactgatgggtcgggtagggtcccgacgccaagaacgccattacggcgctgaccttccccggccgctctagaactaggtggatcccccgggctgcaggaattcnatatcaagcttatcgataccgtcgacctcgagggggggc

SEQ ID NO: 9377 - DNA, 467 bp, Homo sapiens
  misc_feature 2, 3, 5, 6, 7, 8, 10, 429, 466: n = A,T,C or G
gnngnnnngntgatacgactactatagggcgaattgggccctctagatgcatgctcgagcggccgccagtgtgatggatatctgcagaattcgccctttcgagcggccgcccgggcaggtacctattattatttcaaatttaaaaacttcttcttttttaagagatagggtatcactatgttgcccaggctgatcttgaactcttggcctcagatgatcctcctgggttcaagtgattcttctgcctcagcctccctcttatttgctttacaagtcctgcttcagggttaccttccctgaccactgctgcctccctcccagcatttgccagggactgtcattgccttagtttattttttctgttttgttttttttttgtcgtttttgtttttttttgagacagcgttcttagtctgtcgccaaggctgngagttgcagttggccgcaatcaaaggcttgctgcaanc

SEQ ID NO: 9378 - DNA, 862 bp, Homo sapiens
  misc_feature 3, 11, 15, 20, 28, 420, 422, 423, 424, 425, 426, 427, 428,429, 430, 431, 432, 433, 434, 435, 436, 437, 438, 439, 440,441, 442, 443, 444, 445, 446, 447, 448, 449, 450, 451, 452,453, 454, 455, 456, 457, 458, 459, 460, 461, 462, 463: n = A,T,C or G
  misc_feature 464, 465, 466, 467, 468, 469, 470, 471, 472, 473, 474, 475,476, 477, 478, 479, 480, 481, 482, 483, 484, 485, 486, 487,488, 489, 490, 491, 492, 493, 494, 495, 496, 497, 498, 499,500, 501, 502, 503, 504, 505, 506, 507, 508, 509, 510: n = A,T,C or G
  misc_feature 511, 512, 513, 514, 515, 516, 517, 518, 519, 520, 521, 522,523, 524, 525, 526, 527, 528, 529, 530, 531, 532, 533, 534,535, 536, 537, 538, 539, 540, 541, 542, 543, 544, 545, 546,547, 548, 549, 550, 551, 552, 553, 554, 555, 556, 557: n = A,T,C or G
  misc_feature 558, 559, 560, 561, 562, 563, 564, 565, 566, 567, 568, 569,570, 571, 572, 573, 574, 575, 576, 577, 578, 579, 580, 581,582, 583, 584, 585, 586, 587, 588, 589, 590, 591, 592, 593,594, 595, 596, 597, 598, 599, 600, 601, 602, 603, 604: n = A,T,C or G
  misc_feature 605, 606, 607, 608, 609, 610, 611, 612, 613, 614, 615, 616,617, 618, 619, 620, 621, 622, 623, 624, 625, 626, 627, 628,629, 630, 631, 632, 633, 634, 635, 636, 637, 638, 639, 640,641, 642, 643, 644, 645, 646, 647, 648, 649, 650, 651: n = A,T,C or G
  misc_feature 652, 653, 654, 655, 656, 657, 658, 659, 660, 661, 662, 663,664, 665, 666, 667, 668, 669, 670, 671, 672, 673, 674, 675,676, 677, 678, 679, 680, 681, 682, 683, 684, 685, 686, 687,688, 689, 690, 691, 692, 693, 694, 695, 696, 697, 698-862: n = A,T,C or G
agnccgttatngacntactntatggctnattggagctccaccgcggtggcggccgcccgggcaggtacctggctggggaggccaggctgacggtggtgccagtgtctgaggaggaggtgagggaggccctggtgcgtagtggctacaaggtccgggacctccgcacctatatcatgcctgcccaccttcagacaggcgtagatgatgtcaagggcgtcttcttcgcctgggctcagaaggttgggctgtgagggctgtacctcggccgctctagaactagtggatcccccgggctgcaggaattcgatatcaagcttatcgataccgtcgacctcgagggggggcccggtacccagcttttgttccctttagtgagggttaattgcgcgcttggcgtaatcatggtcatagctgttcctngnnnnnnnnnnnnnnnnnnnnnnnnnnnnnnnnnnnnnnnnnnnnnnnnnnnnnnnnnnnnnnnnnnnnnnnnnnnnnnnnnnnnnnnnnnnnnnnnnnnnnnnnnnnnnnnnnnnnnnnnnnnnnnnnnnnnnnnnnnnnnnnnnnnnnnnnnnnnnnnnnnnnnnnnnnnnnnnnnnnnnnnnnnnnnnnnnnnnnnnnnnnnnnnnnnnnnnnnnnnnnnnnnnnnnnnnnnnnnnnnnnnnnnnnnnnnnnnnnnnnnnnnnnnnnnnnnnnnnnnnnnnnnnnnnnnnnnnnnnnnnnnnnnnnnnnnnnnnnnnnnnnnnnnnnnnnnnnnnnnnnnnnnnnnnnnnnnnnnnnnnnnnnnnnnnnnnnnnnnnnnnnnnnnnnnnnnnnnnnnnnnnnnnnnnnnnnnnnnnnnnnnnnnnnnnnnnnnnnnnnn

SEQ ID NO: 9379 - DNA, 733 bp, Homo sapiens
  misc_feature 4, 5, 27, 33, 262, 304, 314, 329, 365, 417, 418, 419, 420,421, 422, 423, 424, 425, 426, 427, 428, 429, 430, 431, 432,433, 434, 436, 437, 438, 439, 440, 441, 442, 443, 444, 445,446, 447, 448, 449, 450, 451, 452, 453, 454, 455, 456: n = A,T,C or G
  misc_feature 457, 458, 460, 461, 462, 463, 464, 465, 466, 467, 468, 469,470, 471, 472, 473, 474, 475, 476, 477, 478, 479, 480, 481,482, 483, 484, 485, 486, 487, 488, 489, 490, 491, 492, 493,494, 495, 496, 497, 498, 499, 500, 501, 503, 504, 505: n = A,T,C or G
  misc_feature 506, 507, 508, 509, 510, 511, 512, 513, 514, 515, 516, 517,518, 519, 520, 521, 522, 523, 524, 526, 527, 528, 529, 530,531, 532, 533, 534, 535, 536, 537, 538, 539, 540, 541, 542,543, 544, 545, 546, 547, 548, 549, 550, 551, 552, 553: n = A,T,C or G
  misc_feature 554, 555, 556, 557, 558, 559, 560, 561, 562, 563, 564, 565,566, 567, 568, 569, 570, 571, 572, 573, 574, 575, 576, 577,578, 579, 580, 581, 582, 583, 584, 585, 586, 587, 588, 589,590, 591, 592, 593, 594, 595, 596, 597, 598, 599, 600: n = A,T,C or G
  misc_feature 601, 602, 603, 604, 605, 606, 607, 608, 609, 610, 611, 612,613, 614, 615, 616, 617, 618, 619, 620, 621, 622, 623, 624,625, 626, 627, 628, 629, 630, 631, 632, 633, 634, 635, 636,637, 638, 639, 640, 641, 642, 643, 644, 645, 646, 647: n = A,T,C or G
  misc_feature 648, 649, 650, 651, 652, 653, 654, 655, 656, 657, 658, 659,660, 661, 662, 663, 664, 665, 666, 667, 668, 669, 670, 671,672, 673, 674, 675, 676, 677, 678, 679, 680, 681, 682, 683,684, 685, 686, 687, 688, 689, 690, 691, 692, 693, 694-733: n = A,T,C or G
ccgnntcgcgttattcgacttactatngggctnattggagctccaccgcggtggcggccgaggtacggtgaggcaccatactgctgacagtaatacactgcaaaatcttcaggctccagtctgctgatggtgagagtgaagtctgtcccagacccactgccactgaacctgtctgggatgccagtggccctgctagatgcatcatagatgaggagcctgggcgccaggccaggtttctgctggtacctgcccgggcggccgntctagaactagtggatcccccgggctgcaggaattcgatatnaagcttatcnataccgtcgacctcnagggggggcccggtacccagcttttgttccctttantgagggttaattgcgcgcttggcgtaatcatggtcatagctgtttcctgggnnnnnnnnnnnnnnnnnnannnnnnnnnnnnnnnnnnnnnnncnnnnnnnnnnnnnnnnnnnnnnnnnnnnnnnnnnnnnnnnnntnnnnnnnnnnnnnnnnnnnnnncnnnnnnnnnnnnnnnnnnnnnnnnnnnnnnnnnnnnnnnnnnnnnnnnnnnnnnnnnnnnnnnnnnnnnnnnnnnnnnnnnnnnnnnnnnnnnnnnnnnnnnnnnnnnnnnnnnnnnnnnnnnnnnnnnnnnnnnnnnnnnnnnnnnnnnnnnnnnnnnnnnnnnnnnnnnnnnnnnnnnnnnnnnnnnnnnnnnnnnnnnnnnnnnn

SEQ ID NO: 9380 - DNA, 872 bp, Homo sapiens
  misc_feature 2, 569, 622, 676, 701, 737, 749, 778, 788, 789, 838, 839,845, 862, 863, 864, 872: n = A,T,C or G
angctaacgactactatagggcgaattggagctccaccgcggtggcggccgccgggcaggtactgagtcaaggacgtctttaacgtcatggacggctcctttacccacgctttctagatcttcgactgcatcttttcctagttttccgagtccccccacagctttttttgctccgtctaggcctttttccagaaggctggatctctgcttccttggctttggtgcctgtctggctaaccctgggtcttcacctgcattttccttttgagctgctgatgcttcatggcaagggttccccgatcctggggcagaggcggcctctggatcataggcacagaccagggctcctgccagagctgtcaggaagaggagagtcatgaacctcatgcttctgtgtgctggagtgggtatgccaccaaatccttggagatcttgggatctagggtgtcccccgcgtacctcggccgctctagaactagtggatcccccgggctgcaggaattcgatatcaaacttatcgataccgtcgacctcgagggggggcccggtacccacttttgttcctttantgaggggttaaatgcccccttggccgtaaacatgggcaatagctgttcctggngtgaaatggtatccgctacaattccccacaacataccagccgggagcataaagnggaaagcctggggtgcctaatgagngagctaactccattaaatggcgttggcgcttactgncccgttttcaanccgggaaacctggccgggccaacttggantaaatgaatnnggccacccccccggggagaaggggtttgcgaaatggggcgctttttccnnttcctngttaaatgacttcgttnnncttcggcn

SEQ ID NO: 9381 - DNA, 929 bp, Homo sapiens
  misc_feature 240, 241, 243, 296, 302, 352, 386, 394, 410, 415, 416, 463,496, 497, 503, 507, 515, 519, 522, 524, 538, 542, 546, 547,552, 555, 563, 570, 573, 574, 582, 583, 584, 592, 595, 601,607, 608, 612, 613, 623, 627, 635, 639, 647, 650, 652: n = A,T,C or G
  misc_feature 654, 662, 669, 671, 676, 677, 678, 683, 690, 692, 693, 694,696, 698, 701, 702, 705, 708, 710, 711, 713, 715, 716, 717,723, 727, 728, 729, 739, 744, 749, 750, 753, 757, 758, 776,782, 791, 798, 799, 800, 801, 805, 813, 815, 818, 819: n = A,T,C or G
  misc_feature 821, 823, 829, 834, 836, 837, 838, 843, 847, 858, 860, 863,864, 865, 866, 872, 873, 877, 881, 882, 883, 885, 889, 890,892, 896, 899, 900, 901, 903, 904, 906, 907, 908, 917, 919,920, 923, 926, 928: n = A,T,C or G
gattgtatacgactactatagggcgaattgggccctctagatgcatgctcgagcggccgccagtgtgatgggatatctgcagaattcgcccttagcgtggtcgcggcccgaggtacacggtattccttaggtcccttccattggtagtgatgctgcgagttattactggagaaaaggaattctagagcttaacttggcagattaaaagtacttttttttttttttttttttttttttggnngnttgtttgtttttggtgtagaaggggaatgttgtgaaagagaacagttggaaancccaanaatatacaaatcgacaaatacttagtttatgtctataaacaaagaaaaanccttttacttatctttagaaatgaaaagtataangcacaaanacaatttgatcaaatnattanntttgtggtcttctactggagagtttgacccatgttatttttaggttntacataaagaaaaaataatgggtgtaggtgatnncctaangttntccatgtntccnggnangaaaaaaggacctncccngggnngccgntcnaaaaggcnattttcntcnnaactggcnnnccttttcnagngggatncgaggnncggnnccaaagcagnggtnttaatcantggntcataggntgntntnagggaggngaaattngntatcnnntcacnaattacntnnnancntanngtnccngnnancnnnaaaatngtannntccttggggngcctntttanntgnactnncctcccttttattggttngtggcnatatcccgnttttcannnngganaaccgtantnccnncntnatttanaatantnnntcacncccntgttaaagtangnttnnnnaatggnnctantttnnntnaatnntntatnatnnntnnannnttcggtttntnntanagnang

SEQ ID NO: 9382 - DNA, 820 bp, Homo sapiens
  misc_feature 314, 586, 618, 689, 703, 720, 722, 723, 748, 752, 772, 782,794, 796, 806, 810, 811, 820: n = A,T,C or G
gactcctatagggcgaattggagctccccgcggtggcggccgaggtacaatctagttaaacaagcagaatagcactaggcagaataaaaaattgcacagacgtatgcaattttccaagatagcattctttaaattcagtattcagcttccaaagattggttgcccataatagacttaaacatataatgatggctaaaaaaaataagtatacgaaaatgtaaaaaaggaaatgtaagtccactctcaatctcataaaaggtgagagtaaggatgctaaagcaaaataaatgtaggttctttttttctatttccgnttatcatgcagtctgcttctttgatatgccttagggttacccatttaagttagaggttgtaatgcaatggtgggaatgaaaattgatcaaatatacaccttgtcatttcatttcaaattgcgactggaaacttccaaaaaaagggtaggcatgaagaaaaaaaaatcaaatcagaacctcttcaggggtttgtgttctgatatggcaggcaagatacaagtcccaccaggagatggagcaattcaaaataagggtaatgggctgacaaggtnttattgccagcatgggacagaatgagccacangctgaaaagttttggattatatagcacctaaagtctctgatgtaaggaattcttggttaggcaaacatccncttaactttccaangggaaaaatctttcaangnngcccaaaccttgctttttctagagnggtnaagttggctttgctaccggngaattttttngaaaaacaaacntngggttttgtncccnnggcccgttn

SEQ ID NO: 9383 - DNA, 833 bp, Homo sapiens
  misc_feature 631, 664, 708, 724, 730, 739, 759, 796, 829: n = A,T,C or G
actcactatagggcgaattggagctccccgcggtggcggccgaggtcatgggagtgcaaaaaaaccaaacacaacggcggggagggagggtctaccaatgagtgtcagtgtctagtgcttccgggagccaactgccaggctagggacactcaagtccctcaaactgtcatcagctcctgccagaccccactccagcatgtcgaggttcatatgagagtgtttgggccagactcctccaatcagtgcacgcgatgggcagaggaggctagggaatcctgagcccaaagctgtattggtccatccccctcaagaagttgttggagctttcagaacgttcctcttcttgtgtagacatgagataccgctgtaactttactccatcaccagaaacctgtgccttgagtctagtctctgctcagccctcgagagcatggttggattaaggaaatagtcaaaggcaagcaagacaaactccctaggttgtcttggtcatgcgtcttttaaaaagggaaagaagaaaaaccacccacaacagataaaagcaccgaggcctggcttgtgtcaggagccagagaggttgtccttccttgaaatggtttgtaaagtgactgatggcaaaaagcttgctctnctcttccgggtacctgccccggccggccggttntagaaactagtgggatcccccgggcttgcaaggaaattccatantcaagcttatcgattnccgtcnaccttttangggggggccccgttccccancctttttggttcccttaagtgagggggtaaattgccnccccttggccgtaattattgggcattagcttgnttcc

SEQ ID NO: 9384 - DNA, 823 bp, Homo sapiens
  misc_feature 548, 574, 600, 604, 665, 673, 703, 713, 741, 742, 759, 760,767, 786, 788, 791, 799, 816: n = A,T,C or G
ggagctccaccgcggtggcggccgaggtacggaggagttcctggaagccttcatggatctgagcctccggaatctccgtgaggttgaaattcaggccctccaggatttcatcgtgagtgtcagccttggtccccagggagagcattgcaaaggctgtagcgatgctcactggggagaagaagatattggtgctgttggactggtgtgccagctggcggtataggctgaaggcgaactcagccaggttgggggtgatcttgttgaaggttgggtgatcctgatcatggtgggatgtatctgtcttctgggcagcatctccctggggatcctcagccagggagacagggaccaggcagcacaggcctgccagcaggaggatgccccacgagacagaagacggcattgtcgattcactgtcccaggtcagttggtggtgccttgaagctgaggagacagggccctgtcctctccgtatttaagcagtggatccagaggggcaacgggggaggctgctggtgaatattaaccaaggtcaccccagttattcngaggagccaaaacaaggggctaaatnccacttggcttgggaatctgagtcgnccgnctacgctgccccggacgcttttgccttccccgcgtaccttgccccggccggccgcttctanaactaatnggatccccccgggcttgcaaaggaatttcnatattcaaanctttattcgatacccgtcccacccttcnnagggggggggcccccgnnaccccanatttttgttcccttttaantngangggttaanttgcgccccttggcgtnaatcatg

SEQ ID NO: 9385 - DNA, 639 bp, Homo sapiens
  misc_feature 5, 6, 8, 28, 29, 35, 37, 96, 102, 108, 111, 112, 113, 116,117, 118, 119, 125, 127, 128, 136, 143, 144, 145, 146, 147,150, 152, 155, 156, 158, 160, 161, 162, 165, 166, 170, 171,172, 173, 174, 176, 179, 184, 186, 190, 191, 192, 193: n = A,T,C or G
  misc_feature 198, 199, 204, 205, 206, 207, 209, 210, 211, 212, 213, 214,215, 216, 219, 222, 226, 227, 229, 230, 234, 235, 236, 237,238, 244, 245, 246, 247, 248, 254, 282, 283, 284, 285, 286,289, 292, 294, 298, 301, 307, 308, 309, 310, 311, 312: n = A,T,C or G
  misc_feature 313, 317, 321, 322, 323, 325, 334, 335, 336, 349, 350, 355,356, 357, 358, 360, 361, 368, 369, 374, 377, 378, 379, 383,389, 390, 400, 401, 402, 404, 405, 406, 407, 412, 413, 416,419, 423, 424, 425, 429, 437, 439, 440, 441, 442, 444: n = A,T,C or G
  misc_feature 447, 448, 451, 453, 454, 458, 463, 472, 474, 479, 480, 481,485, 488, 493, 495, 496, 506, 507, 510, 511, 514, 515, 518,519, 522, 524, 525, 531, 534, 535, 539, 561, 565, 572, 573,575, 591, 592, 593, 594, 600, 601, 603, 610, 612, 613: n = A,T,C or G
  misc_feature 623, 634, 635: n = A,T,C or G
cgatnntngtacttcactctgagggccnnattggnanctccaccgcggtggcggccgcccgggcaggtactttttttttttttttttttttttttnggggangggggnttnnnttnnnncccccnanngggggggnggggggnnnnnttnanttnntngnnnccnnaccnnnnngnttnaaaanantttnnnnttttnnccccnnnngnnnnnnnnaanaangggnntnncccnnnnncccccnnnnntttttntttttttttaaaaaaaaaaaaatttttnnnnnttnggncngggnggntaaaannnnnnncccnaaannnanccccccccnnngggcccccaaaannggggnnnnanngggggannccccnttnnngggnaaaaanntttttttttnnnannnnaaaannccnttnaaannntttnaaaaaaangnnnnanggnnttnannaacnttttnccaaaaaantnccccnnncccnttnaaaantnngggacccccnnggnnggnnaannttntnntaaaanttnntaanccccgccccctggggggggggncccngcccccnntntttttttcccttttannnngggaanncnccccctngnnaaaaaagggnattttttttcnncggc

SEQ ID NO: 9386 - DNA, 684 bp, Homo sapiens
  misc_feature 679: n = A,T,C or G
tcactatagggcgaattggagctccaccgcggtggcggccgcccgggcaggtacaaacccagtttgttttcaaaaaatcacagtagcaatgcaactcatcactctagaaaagcaagcttaggctacctgaaagattttcccttggaagtttagcgtatgtttgactaacaaaaattccctacatcagagactctaggtgctatataatccaaaaacttttcagcctgttgctcattctgtcccatgctggcaataataccttgtcagcccattacccttattttgaattgctccatctcctggtgggacttgtatcttgtctgccatatcagaacacaaacccctgaagaggttctgatttgatttttttttttcttcatgcctaccctttttttggaagtttccagccgcaatttgaaatgaaatgacaaggtgtatatttgatcaattttcattcccaccattgcattacaacctctaacttaaatgggtaaccctaaggcatatcaaagaagcagattgcatgataaacggaaacagaaaaaaagaacctacatttattttgctttagcatccttactctcaccttttatgagattgagagtggacttacatttccttttttacattttcgtatacttatttttttagccatcattatatgtttaagtctattatnggcac

SEQ ID NO: 9387 - DNA, 491 bp, Homo sapiens
  misc_feature 77, 216, 410: n = A,T,C or G
ttgggcgaattggagctccccgcggtggcggccgaggtaccaggtgaacaaagtttaccagaaagcagttgagacangaaaataagagctcaggatgagggaaaagaaaaagattgagagaatttgtgcccccaaccatttcctcagactctaagaaagaacacgctctctccaggcaggtctgaagctcaactctcttattgcctcacttcaggnatacctcactttacacaatagaattataactggaaagaagttggggacacatgtatttggtgattacattttaaacacattaggaaaagttgctatttgaactttttattgatttttggggggagtaaagaattattttgtgatgcaaataaatatcctttaattgatcgacttgccaaatttaagatttgtgngcatcaggctttcttttttttctttttttagagaagttcaatataagcttttcttttctttggggtctttctttctttatt

SEQ ID NO: 9388 - DNA, 884 bp, Homo sapiens
  misc_feature 475, 481, 497, 506, 544, 580, 605, 643, 645, 647, 673, 687,718, 723, 735, 779, 794, 805, 810, 815, 816, 827, 856, 858,863, 884: n = A,T,C or G
tggccgctatcactcctatagggcgaattggagctccccgcggtggcggccgggtacacaagagaggccagccattaagaattgttatcaatacaataaaagggaatacttggccagagatcctctagataagtagctaaaatgtgatcaaaaggagaaagaggaagaagcaaatacacaaacgttttatgggtattaataaaaataaagacatctctgaacaaatgataaaatcccttccctgaaaaatttcaaatgagattcacagaaatgcagaagcagaagaaactttagatttagaaacatctcatttgggctgggtgcagtggctcacgcctgtaatcctagcactttgggaggcccgaggcaaatgaatcacctgaggacaggaattcaagaccggcctgggcaacatggtaaaaccccatctctactaaaaatacaaaaaaaaaaaaaaaaaaaaagttcctgcccnggcggnccgctctaaaactagnggatccccnggcttgcaggaattcgattttaagcttatcgatacccntcgaccttgggggggggccccgggcccactttttgntccctttaatgaggggtaaattgcncccttggcgtaaatcatgggcatagcttggtttctggngngnaaattggtattcccgttcacaatttnccaacaacaaaccnagcccgggggccataaaaggggaaaagcctnggggnggcctaatgagngggcctaacctcccattaattggcgttggccttacttggccccnttttcaaggcggggnaaccttttggngccantttgnnttaaatgaaangggccaccccccggggaaaggcgggttgncntattnggccccctttccctttcttcn

SEQ ID NO: 9389 - DNA, 636 bp, Homo sapiens
  misc_feature 1, 2, 3, 4, 26, 28, 589: n = A,T,C or G
nnnnactcactatagggcgaattggnanctccaccgcggtggcggccgaggtacactaaagtatatcattttgtcaattgtaaatttagatttatattcattttatttatattcatctaggcacttattaagataaacacataatttgagtctaatatgctcagtgcaaaaactagtttcatgaaagatgctagaattgtgacataatcagaaccaaagcagggaggggagattttgtatggttctctgctgtccagaataaagtctacattcctgtcattggcccaacaggcctccaacatctggcaccaagccaggaactatcacttctgatactgacttgaattacactcatctgacattccatataatattccattcctgctttccttttcataaggatatgttttcactctccaaatagactgcaggatccttaggagcagggaaaaatatagtgggaaggccgtgaggaagggagcaggattgtaatgccagtggggtcacaaccagcctcacacagagggtgttatttgaaagaagtgaggcagcaacacttaaatctagaagctgagttgcccacacaaanggaactgtcaatatatagtccctgaaagatacatacttacagcaagt

SEQ ID NO: 9390 - DNA, 628 bp, Homo sapiens
  misc_feature 8, 24, 28, 52, 56, 184, 187, 190, 196, 198, 199, 203, 214,215, 219, 223, 224, 230, 235, 236, 237, 240, 241, 242, 243,247, 251, 253, 260, 263, 270, 272, 281, 282, 286, 287, 288,301, 305, 308, 310, 314, 317, 323, 324, 325, 326, 329: n = A,T,C or G
  misc_feature 330, 333, 334, 335, 343, 344, 346, 349, 353, 354, 356, 357,364, 369, 374, 375, 376, 377, 388, 389, 390, 391, 392, 393,400, 405, 414, 417, 418, 421, 425, 427, 429, 433, 436, 441,442, 443, 444, 445, 446, 447, 448, 450, 451, 452, 454: n = A,T,C or G
  misc_feature 456, 458, 463, 471, 472, 476, 481, 482, 483, 487, 493, 494,495, 496, 498, 499, 509, 511, 512, 514, 520, 529, 535, 536,537, 543, 554, 555, 564, 580, 586, 597, 601, 602, 605, 615,618, 619: n = A,T,C or G
agcttttnctttgcactatatgtncgtntgtacataaaaacttttatttttncatnccatgtgtataataaaaacaaagtttattctatatataaaaaaaaaaaaaaaaaaaaaaaaaaaaaaaaaaaaaaaaaaaaaaaaaaaaaaaaaaaaaaaaaaaaaaaaaaaaaaaaaaaaaaggggnggnccnttgacntnntttnaaaaaaaaccnncccncccnncccctngaccnnnaannnnaaanggangncattggnggnggtaacntngtttttggnncttnnnaggggtcccaaanaagncantncctnccnaatttnnnnaannaannntttttttnncnggntttnnanngggggtnggccnaaccnnnnaagggtttttnnnnnngtggggnccccngggccccgnccnnaantaantncntttnccntttcnnnnnnnntnnncncntngcccngggccttnnggtnggggnnngggntttaannnncnnaaaggggggnanncnggtttnccccaaatncggggnnnaccccnggaaaaacctnngggccaaanggcccccaaaggcccnggaccngaaaaagggcnggtnnggnggggtttttnccnnaggcccccc

SEQ ID NO: 9391 - DNA, 853 bp, Homo sapiens
  misc_feature 415, 460, 471, 475, 481, 483, 487, 489, 491, 499, 507, 549,581, 638, 644, 650, 658, 660, 665, 673, 681, 692, 694, 697,699, 717, 721, 738, 749, 750, 756, 757, 763, 766, 769, 770,771, 772, 780, 783, 789, 792, 793, 803, 805, 816, 821: n = A,T,C or G
  misc_feature 826, 837, 848, 849: n = A,T,C or G
gggcgaattggagctccaccgcggtggcggccgcccgggcaggttgtctgatttgtgactggcaggctggaaaattctatcttaagaatgctgtgagggccgggcacggtggctcacgcctataatcccagcactttgggaggctgatatcacaggcatgagccaccatgcccatctgcaaatccagtgttcaaacaattccacactgtaaatacagctctcaagattgaaggtgtcttaagcagcagagtctttattataatacaaacaagggaaataggcggcaggcaggctgtctgatttgtgactggcaggctggaaaattctatcttaagaatgctgtgagggccgggcacggtggctcacgcctataatcccagcactttgggaggctgaggcaggtggatcacgaggncaggagatcgagaccatcctggccaacacagtgaaaccccatctntactgaaaatncccnaaattncnttanantnaaaagganggttcctngggcgctctagaactagtggatcccccgggctgcaggaattnaatatcaagcttatcgatacccgtcaacctcnagggggggcccggtacccaccttttgtttcccttttaggggaggggttaaattgccncgcctnggcctnaattcatngngcatngctttttncccggggngaaaatgggtntncgntncacaatttcccacaaacntacnaccccgggggcataaantggtaaagccnngggggnnccctanttnggnnnngcttaacnccntttaanttnncgtttggccncncctggcccggnttttncagtngggaaaacccntgtttggcccnncctc

SEQ ID NO: 9392 - DNA, 793 bp, Homo sapiens
  misc_feature 604, 641, 656, 690, 749, 760, 762, 764, 781: n = A,T,C or G
gggcgaattggagctccaccgcggtggcggccgaggtacacacaaaggaactgatgtcaaggccctttctatgacccttcccattctagcaagacctcccaccccagtcatcttgggatctacagccacatgaaatacagacacatcgttcccccaagtcaggccagttttaggccattgagttatggggaaatgattaatgggatgaatgaaaaacaaataaaataaataaataaataaatacactaaagccttattagccaggcgtgatcacatgcccaacactcccctccatcccagcactatgcacagttcacggctcatatgcaaagtggaagacacgtgggacaagagcaaagcacaagtgacacatggtccctctctaacacctcggcacaccaaccctgacgctcccatcacagatgctgatcattcttccacggacccccttttataataatcctcattcacatttctagtttctgagggaagagagaaagagaaaggaagaagtggaaagtgcggaaccccaatgagtagggcacagaaaggagggcgagcagagacagcaagaggtcaggtaagccaaggagcagcggagcangtcaatcagggaagttctgggcaccctggggcttcangggatctcaaggggngaactatccagatcaggcagcaaggttccaggangtgagacagaggttcccgtttcaggcaggcggaggattacaagcccactgggaattacngaaggtatgtncngnaaaagcgaagctttatncccagtttttct

SEQ ID NO: 9393 - DNA, 894 bp, Homo sapiens
  misc_feature 19, 512, 555, 591, 594, 630, 633, 637, 639, 666, 680, 687,693, 718, 725, 727, 728, 735, 739, 751, 755, 762, 767, 793,851, 862: n = A,T,C or G
tcctatagggagtcgaccncgcgtccggctgaaacttaaaggaattgacggaagggcaccaccaggagtggagcctgcggcttaatttgacccaacacgggaaaccccacccgtcggcagagcaaccccacctccaggcattatggctcctccacctggtatgagaccacccatgggcccaccaattgggcttcccctgtcgagggacgccaataggcatgccgcctccgggaatgagaccccctccaccaggcattagaggtccacctcccccaggaatgcgtccaccaagaccttagcatactgttgatccatctcagtcactttttcccctgcaatgcgtcttgtgaaattgtgtagagtgtttgtgagctttttgttccctcattctgcattaataatagctaataataaatgcatagagcaattaaactgtgaaaaaaaaaaaaaaaaaagggcggccgctagactagtctagagaaaaaacctccacaccttccccttgaacctgnaacataaaatgaatgcaattggtggtggtaacttggttattgnagcttataatgggtaccaataaagcaatagcttccnaanttacaaataagcatttttttaatggattctaattgnggntggncnaacttatcaaaggattttataatggtntggatccccgggtnccggctnggaatnaattcctttttcggtttctttggtnaattgantnnttggctngggncgtttgggttgngggnagggggnttagnttactttaaaggggggaataccggtnttcccaaaattagggggtaacccccggaaaaaaatttgagccaaaaggcccccaaaanggcccgaaccngaaaaagggccggttggtggggttttcataag

SEQ ID NO: 9394 - DNA, 620 bp, Homo sapiens
  misc_feature 3, 5, 9, 10, 14, 28, 35, 37, 45, 47, 86, 609: n = A,T,C or G
atntnaggnntcgnccacgcgtccgggntaactgnanaaacaagnanaccattctctgtctaactgtgataaaaacaagctcaggnactttattctatagagcaaacttgctgtggagggccatgctctccttggacccagttaactgcaaacgtgcattggagccctatttgctgccgctgccattctagtgacctttccacagagctgcgccttcctcacgtgtgtgaaaggttttccccttcagccctcaggtagatggaagctgcatctgcccacgatggcagtgcagtcatcatcttcaggatgtttcttcaggacttcctcagctgacaaggaattttggtccctgcctaggaccgggtcatctgcagaggacagagagatggtaagcagctgtatgaatgctgattttaaaaccaggtcatgggagaagagcctggagattctttcctgaacactgactgcacttaccagtctgattttatcgtcaaacaccaagccaggctagcatgctcatggcaatctgtttggggctgttttgttgtggcactagccaaacataaaggggcttaagtcagcctgcatacagaggatcggggagagaangggcctgtgtt

SEQ ID NO: 9395 - DNA, 886 bp, Homo sapiens
  misc_feature 5, 6, 7, 10, 27, 73, 108, 395, 433, 453, 477, 497, 521, 522,534, 535, 536, 537, 538, 539, 540, 541, 543, 544, 545, 546,547, 548, 549, 550, 551, 552, 553, 556, 557, 559, 560, 561,562, 563, 564, 565, 566, 567, 568, 569, 570, 571: n = A,T,C or G
  misc_feature 572, 573, 574, 603, 617, 640, 678, 726, 732, 744, 755, 756,773, 777, 794, 801, 810, 817, 823, 828, 841, 853, 856, 857,874, 879: n = A,T,C or G
agggnnnatntggggtcgccccgcgtncggaatacctccttccgtaaaataccttcccccttactacacaatnaaagacgccctcggcttacttctcttcattctctncttaatgacattaacactattctcaccagacctcctaggcgacccagacaattataccctagccaaccccttaaacacccctcccacatcaagcccgaatgatatttcctattcgcctacacaattctccgatccgccctaacaagctaggaggcgtccttgccctattactatccatcctcatcctagcaataatccccatcctccatatatccaaacaacaaagcataatatttcgcccactaagccaatcactttattgactcctaagccgcaggacctcttantttaacctggaatcggggggacaccaggaaggtacccntttaccatcattggacaagnagcatcgtctatacttacacaatnctaatctaatacccactatnttcctaattggaaacaaaatactnnaatggggcctannnnnnnnannnnnnnnnnnggnngnnnnnnnnnnnnnnnnggggggggcggttagactaggttaagaanaaaaaacttcccanaacttccctggacctggaacatnaaaagaaggcaatgggggggggtaacttggttattggngcttataagggtacaaataagggaataggcttcccaaatttcccaaanaaaggnatttttttcacngggatttaagnnggggggtgggccaaccncaanaagggtttttttaaggntgggganccccggggnccgggcncggaanaaatnctttttcgggttntgggtaaatganttnnttggggttggggggttngggtnggggggg

SEQ ID NO: 9396 - DNA, 651 bp, Homo sapiens
  misc_feature 593, 613: n = A,T,C or G
ggcgaattggagctccaccgcggtggcggccgccacgctggttttgcatcttcaggagacgctcgtagccctcgcgcttctcctcggccaattccccgcgtacctgcccgggcggccgctctagaactagtggatcccccgggctgcaggaattcgatatcaagcttatcgataccgtcgacctcgagggggggcccggtacccagcttttgttccctttagtgagggttaattgcgcgcttggcgtaatcatggtcatagctgtttcctgtgtgaaattgttatccgctcacaattccacacaacatacgagccgggagcataaagtgtaaagcctggggtgcctaatgagtgagctaactcacattaattgcgttgcgctcactgcccgctttccagtcgggaaacctgtcgtgccagctgcattaatgaatcggccaacgcgcggggagaggcggtttgcgtattgggcgctcttccgcttcctcgctcactgactcgctgcgctcggtcgttcggctgcggcgagccggtatcagctcactcaaaggcggtaatacggttatccacaagaatcaggggataacgcaggnaaagaacatgtgagcaaaangccagccaaaaggccaggaaccgtaaaaaggccgcgtt

SEQ ID NO: 9397 - DNA, 862 bp, Homo sapiens
  misc_feature 5, 35, 39, 44, 49, 50, 52, 59, 65, 128, 134, 167, 310, 331,342, 370, 390, 400, 418, 427, 428, 433, 445, 490, 499, 507,519, 538, 542, 544, 554, 560, 565, 568, 578, 579, 585, 605,624, 627, 629, 632, 644, 650, 653, 673, 696, 697, 703: n = A,T,C or G
  misc_feature 717, 720, 727, 737, 754, 758, 759, 761, 762, 767, 768, 779,783, 796, 801, 808, 810, 813, 815, 816, 817, 818, 819, 830,835, 836, 841, 842, 843, 846, 847, 849, 851, 853, 861: n = A,T,C or G
taggncgaattgggccctctagatgcatgctcganccgnccgcnagggnnanggatatntgcagnaattcgcccttagcgtggtcgcggccgaggtactttttttttttttttttttttttttttttnggcaangaaaataaatgttttttattaggcagaatccanatgctcaaggcccttcataatatcccccagtttagtagttggacttagggaacaaaggaacctttaatagaaattggacagcaagaaagcgagcttagtgatacttgtgggccagggcattagccacaccagccaccactttntgataggcagcctgcactggnggggtgaattntttgccaaagtgatgggccagcacacanaccagcacgttgcccaggancctgaagttntcaggatccacgtgcagnttgtcacanntgcanctcactcagtgnggcaaaggtgcccttgaggtttgtccaggtgagccaggccatttntaaagggcnccggagcnctttttttgccnatgagccttcacctttaangggntngcccccattnaacaancattnagngaagtggggnncaagantccccccaaaaggggacttnaaaaagaaacccttttggngtncnaanggggtaggaccnccaaanaanccttgcccaaggggcccttnaccacccaaacttttaattccanngttttnacctttgccccccnaanggggcantaaccgggcnagacctttttccttcanggannannaaatnncccatgggggncttntttttaaaggatncttanggaaacnanaantnnnnntaaaaaaacanaatanntcccnnnttnncntncncccgggcng

SEQ ID NO: 9398 - DNA, 1411 bp, Homo sapiens
  misc_feature 2, 3, 43, 81, 84, 88, 94, 95, 123, 125, 150, 159, 163, 171,176, 181, 203, 218, 226, 231, 233, 238, 239, 246, 247, 272,273, 276, 289, 298, 315, 354, 438, 542, 543, 553, 573, 584,591, 643, 649, 719, 751, 752, 753, 754, 776, 841, 847: n = A,T,C or G
  misc_feature 889, 896, 902, 914, 951, 976, 988, 1008, 1019, 1022, 1045,1067, 1069, 1070, 1072, 1075, 1095, 1097, 1114, 1131, 1142,1152, 1163, 1181, 1194, 1203, 1209, 1212, 1244, 1270, 1273,1288, 1291, 1310, 1327, 1328, 1329, 1338, 1340, 1353: n = A,T,C or G
  misc_feature 1365, 1368, 1385, 1394, 1398, 1399, 1405: n = A,T,C or G
gnngaccgcgtaatacgaactcactattagggggccgaaattnggggtacccggggccccccccctttgaggggtcgaccnggnattnccaatnnaagcttgggttatttccaaaattccctngncaacccccgggggggggatcccacnttaattttnttangaacgggnccgangggtnttcccctttggttctttaaaancggtaaccaaacaantaaaaaanctggntngtttnntgaaaanntggtgccgaaaacgttgttgttgtnnccnggggaatggttcngcttgtggntttcccccccccaaccntttttgccccctttggcaagggtttggcccccgctttgnaagttgccttttgcctgggccgttggccgctttgtggcgtttgccgccaacccggttcttaagtttcaatgggtttttaaccgnaagccttgttaaaaattacccaattttttttattaacctccccaccaccggaaggaagaaccccttaattggtggaatttttggtacccctggccccccggggnncgggcccggncccaacccgccggggtgggnggaagccttcnccaaggnctttttttggtttccccctttttaaaattggaaggggggtttaaaatttttnggccgnccgccttttggggccggttaaaattccaattggggttccaattaagaccttgggtttttccccttgggtnggttggaaaaaaattttggttttaatttcccnnnntttcaaccaaaattttccccanccaaccaaaaccaattaaccgggaaagccccgggggaaaaggccaatttaaaaaagggtgggttnaaaaangccccttgggggggggttggcccctttaaaattggaagggtnggaaagnccttanaaccttccaacnaatttttaaaattttggccggttttggccggcctttnaaacttgggccccgtcttttttttncaaaattccggngggaaaaaaacccttgttcngttggcccaangcnttgccattttaaattggaaattnggggcccaaaacccccccccgngnngnaanaaagggccggggttttttgncnattattttggggggccngcctttttttcccggcnttttcctttcngcttttaaanttggaactttnggctttgcggccttcggntccgttttccagngacttggcngggccnaancccgggtttttcaaacttcaatttccaaaaangggggggggtaaaattaccgggtttnttnccaccaaggaaattnaanggggggattaaacggccantgggaaaaaaaaaacannnttggaaccnanaaaagggcccagncaaaaaaagggnccncaggaaaaccccgtaanaaaaagggncccnntttttntttggg

SEQ ID NO: 9399 - DNA, 619 bp, Homo sapiens
  misc_feature 300, 338, 350, 380, 390, 473, 482, 490, 495, 533, 573, 582,585: n = A,T,C or G
ccacgcgtccgtctcaaactcctgaccgtatgatctgcccacctcgacctcccaaagtgctgggattgattacgggtgtgagccactacgcccagccccccatggagctatttttatttaaaacacatacattataactctattgatctgattacaaaagtgcctattttgttaaaatgttttattgtgataaaaattcaaaaattattaatgttagccaacaaaattcaagcaaaacataaatgtgtaaagtaaaaagtgaaagatttttccttagtccctctcaccactcccattctncaagaataacttaatttggtgtgtgtcttcccagatgntggtctgtttgngttttatatattaatatacacatatatacntatatgaatncccacacatttgtatataggttttttttaaatgaaatgggatattatatgtactgttttgcaacttttttcactttgcattgnatttctggnccccctcntgctntaatacatggaaatttacctcatttaaaaaagactgcntaacatttctgggatgggtggattccaatttaatgattcncctatttgngcnaatttgtctccaatcttcactattataaaaaatg

SEQ ID NO: 9400 - DNA, 925 bp, Homo sapiens
  misc_feature 91, 143, 153, 168, 173, 212, 214, 269, 297, 300, 305, 400,401, 416, 430, 451, 458, 486, 492, 493, 523, 526, 530, 538,541, 553, 554, 556, 571, 572, 575, 576, 579, 585, 590, 592,593, 603, 608, 617, 622, 627, 641, 645, 654, 655, 663: n = A,T,C or G
  misc_feature 664, 667, 670, 678, 679, 684, 685, 690, 691, 693, 696, 708,710, 715, 721, 729, 731, 736, 742, 751, 755, 761, 763, 765,767, 768, 772, 775, 779, 787, 794, 796, 799, 803, 804, 805,812, 813, 821, 822, 827, 829, 832, 834, 843, 847, 848: n = A,T,C or G
  misc_feature 851, 860, 863, 867, 868, 875, 877, 882, 892, 895, 896, 900,906, 908, 909, 912, 913, 914, 915, 917, 922, 923, 924: n = A,T,C or G
ggcgaattggagctccaccgcggtggcggccgaggtaccaggtgaacaaagtttaccagaaagcagttgagacaagaaaataagagctcangatgagggaaaagaaaaagattgagagaatttgtgcccccaaccatttcctnagactctaanaaagaacacgctctntccangcaggtctgaagctcaactctcttattgcctcacttcangnatacctcactttacacaatagaattataactggaaagaagttggggacacatgtntttggtgattacattttaaacacattanganaaaanttgctatttgaactttttattgatttttggggggagtaaagaattattttgtgatgcaaataaatatcctttaattgatcgacttgccaaatttnnatttgtgtgcatcangctttctttttttntctttttttttagaagaaagntccaatnttaaagcctcttcttttcttttgggttncctttnntttctttatttttggaagaatgggaggtcnttngctnttgtccgnccnatgcttgggaanncnccaaattggccgccnnatnntcnggcttnaactngnnaacccttccnccttncctgggggngttcnaagcngaatttcttttttnggcntttaaaccnntcccaagnnagnttngggaactnncaggnnggggnngnccnccttcccccggncnaattnttgggntttttttngnaaaanaaaagnggggttcancccntttttngnananngggnggntttntaaaaatnttcttgntnccntggnnnaattttnncccccccnnggggntnttncnaaaaaaacncccnnccnggggggggnggntttnnaaaaaantnggttncccccccggnctnngggnatttgntnnccnnnncnttttnnnt

SEQ ID NO: 9401 - DNA, 570 bp, Homo sapiens
  misc_feature 3, 6, 7, 9, 11, 13, 16, 41, 88, 196, 208, 341, 343, 463,467, 507, 526: n = A,T,C or G
ggntgnntngncnatnccatcccgcgtccgacggagccttngggctgcccatcaccgtggcccatgtggatggccaaacccacatgtnatttggctctgaccggatggagctgctggcgcacctgctgggagagaagtggatgggccctatacctccagccgtgaatgccagactttaagattgcccggaggaagnaaactcttcgtntaaaaaaagcaggccatctgcttaacccttggctccaccataaggcactgggactcggatttctctatctgatagaggtattttctgtggccctgggagctgtctgtctttcccctacccccaaggatgccantnttacgtccaccattagccatgtggcaacctttacttctatgcctcacaagtgcctttcagagagccccaattctgctttcccacaaaataaacctaatgccatcaggcaaaaaaaaaaanaaanaaaaaaaaaaaaaaagggcggccgctagactagtctaganaaaaaaccttccacacctncccctgaacctgaaacataaaatgaatgcaattgttggtgttaa

SEQ ID NO: 9402 - DNA, 495 bp, Homo sapiens
  misc_feature 2, 3: n = A,T,C or G
gnngtgcctttaacaactacttagggcgaattggagctccaccgcggtggcggccgaggtacccgaatttcatccgagtggtcatcacagtccccgaggtgatgatgctggaggcgtgcagccggatccaggagttctgtgagcagcactaccattgtgctgaaggcagccaggaggagtgtgataaataggcctgcatccattctcctgagggatgtgtcccatctagggaaggctggactaggccttgcggctcctcagggactcaggtggccctactgggagaggggcctcaaatgcaccatgtcaagggttcaagattgttcctgcttttccccaagtacctgcccgggcggccgctctagaactagtggatcccccgggctgcaggaattcgatatcaagcttatcgataccgtcgacctcgagggggggcccggtacccagctttttgttccctttagtgagggttaattgcgcgcttggcgtaatcat

SEQ ID NO: 9403 - DNA, 568 bp, Homo sapiens
  misc_feature 22, 153, 433, 484, 503, 504, 552, 568: n = A,T,C or G
gaggagggcacgcgtccggccnagcgtctgcgggggccgcttcaccctgagcggatgataatctcaagacaccttccgagcgtcagctcactccccttccaccctcagctccaccctcagcagatgataatatcaagacacctgccgagcgtntgcgggggccgcttccaccctcagcagatgataatctcaagacaccttccgagcgtcagctcactccccttccaccctcagctccaccctcagcagatgataatatcaagacacctgccgagcgtctgcgggggccgcttccaccctcagcggatgataatctcaagacaccttccgagcgtcagctcactccccttccaccctcagctccaccctcagcagatgataatatcaagacacctgccgagcgtctgcggggagcttctgcgggggccgcttncacccttcagcggatgataatctcaaagacaccttccgagccgttaggctnactcccctttcaccttagnngcacccttaagcagatgataatatcaagacacctgcccgagcgtttgngggggggccgtttcan

SEQ ID NO: 9404 - DNA, 890 bp, Homo sapiens
  misc_feature 515, 565, 609, 617, 623, 633, 637, 648, 658, 659, 703, 709,719, 723, 727, 742, 749, 753, 755, 757, 763, 767, 768, 770,774, 778, 779, 781, 782, 783, 786, 790, 792, 799, 802, 806,814, 815, 819, 825, 829, 836, 838, 849, 850, 858, 865: n = A,T,C or G
  misc_feature 868, 873, 874, 877, 878, 879, 881, 885, 887, 889, 890: n = A,T,C or G
ggcgaattggagctccaccgcggtggcggccgaggtacgcggggggcggtggttgggtggtaagatggcggctgtgagtctgcggctcggcgacttggtgtgggggaaactcggccgctctagaactagtggatcccccgggctgcaggaattcgatatcaagcttatcgataccgtcgacctcgagggggggcccggtacccagcttttgttccctttagtgagggttaattgcgcgcttggcgtaatcatggtcatagctgtttcctgtgtgaaattgttatccgctcacaattccacacaacatacgagccgggagcataaagttgtaaagcctggggtgcctaatgagtgagctaactcacattaattgcgttgcgctcactgcccgctttccagtcgggaaacctgtcgtgccagctgcattaatgaatcggccaacgcgcggggagaggcggtttgcgtattgggcgctcttccgcttcctcgctcactgactcgcttgcgctcggtcngtccggctgcggcgagcggtttcaagcttcacttcaaaaggcgggtaatnacggttattccacagaaattagggggaaaaaccccaaggaaaanaaacattntgtagncaaaaaaggncagnaaaaagggccnaggaacccgnnaaaaaagggcccccggttgctttggcgtttttttccaataagcnttccgnccccccttgncgangcantacaaaaaaatttgnccccttnaaantncnaaaggntggnncnaaancccnnannnggnactntnaaaaaanccntggngttttccnncctnggaaancttncttttgnancctcttttctnntttctcanccttggnccnttatnncgnnnancccngnann

SEQ ID NO: 9405 - DNA, 612 bp, Homo sapiens
  misc_feature 2, 24, 29, 593: n = A,T,C or G
gnccccgcgtccggccgggcaagnatagnaccctgtctctacaaaaatttttttctaaattaaccgggcatggtggtgcctgcctgtagtcccacctgtgtgggagaatcacttgagcctgggaggtcaaggctgcagtgagccatgattgcacccctgcactccagcctgggtgacagagtgagaccctggctcaataagagggggaaaaaaaattgttaggagctgggtgcggatgcagcctgcaatcccagctacttgagaggctgaggccggaggattgcttaaacccaagaatttgagcgtagcctgggcaacacagcaagaccccatctaagaaaaaaatgttttttaaatcagcttagcccaaaggggttgtgaatggggaggtataaaaagcaaatattattttttggctactaagccaagaacttacagggattttttttttcagtcccagaacctacagataccctgctacttgcttcacgtggatgctcagtgcccagcagccatcttaatacattaaaccagttttaaaaaataccttccatgtggagaaaaacatgtctttttctcgcctcaactttatncacatgaaatgtgtgccca

SEQ ID NO: 9406 - DNA, 888 bp, Homo sapiens
  misc_feature 2, 3, 6, 7, 8, 657, 683, 693, 750, 801, 815, 841, 858: n = A,T,C or G
gnnagnnngacgcgcgtaatacgactactatagggcgaattggagctccaccgcggtggcggccgcccgggcaggtacccccaaacccccaatatttttggactggcagactcaaggggctggaatctcatgattccatgcccgagtccgcccatccctgaccatggttttggctctcccaccccgccgttccctgcgcttcatctcatgaggatttctttatgaggcaaatttatattttttaatatcggggggtggaccacgccgccctccatccgtgctgcatgaaaaacattccacgtgccccttgtcgcgcgtctcccatcctgatcccagacccattccttagctatttatccctttcctggtttccgaaaggcaattatatctattatgtataagtaaatatattatatatggatgcgtgtgtgtgcgtgcgcgtgagtgtgtgagcgcttctgcagcctcggcctaggtcacgttggccctcaaagcgagccgttgaattggaaactgcttctagaaactctggctcagcctgtctcgggctgacccttttctgatcgtctcggcccctctgattgttcccgatgggtctctctccctctgtcttttctcctcccgcctgtgtccatctgaccgtttttcacttgtctnctttctgactgtccctgccaatgctncagctgtcgnctgactttgggttcgttgggggacatgagattttattttttgtgaagtgagactgangggatcgtagatttttacaatctggtattttttgaacaatttcttgggttncccagtgttaaaantgttgaacaagggcttggtttccttngcccaaaccacaatttnaattgaaattcccgaaccccccttacccct

SEQ ID NO: 9407 - DNA, 530 bp, Homo sapiens
  misc_feature 5, 7, 8, 23, 28, 37, 88, 94, 96, 97, 102, 108, 112, 113,118, 119, 120, 136, 141, 142, 146, 149, 155, 158, 163, 167,168, 170, 175, 177, 181, 193, 194, 195, 196, 197, 205, 206,213, 229, 231, 253, 255, 260, 261, 262, 264, 265, 267: n = A,T,C or G
  misc_feature 271, 274, 281, 282, 283, 289, 292, 293, 297, 298, 299, 303,305, 308, 311, 312, 314, 318, 324, 330, 331, 335, 337, 338,340, 341, 345, 346, 349, 360, 365, 369, 374, 377, 380, 382,390, 391, 392, 394, 395, 399, 403, 404, 412, 418, 419: n = A,T,C or G
  misc_feature 420, 427, 431, 432, 433, 451, 464, 468, 469, 470, 471, 472,479, 481, 482, 493, 508, 510, 511, 514, 515, 516, 517, 518,522, 523, 524, 525, 526, 527, 528, 529, 530: n = A,T,C or G
gcgtncnncgtactcactttganggccnaattggaanctccaccgcggtggcggccgaggtacttttttttttttttttttttaaaanaaaccntnnttttncccccnaggnngaaannnaggggcccaatttaanttaanngaanccncccccnccnaggtnaaannanttttngncccnaacccccccaannnnngggaaaanngggcccnccccccccccccggtnanttttttttttttaaaaaaaaananggttnnncnntntggnccnggggggnnnaaaatnccnncccnnngggnanccnccnncntaancccccnaaaggnngggnannanngggnnaanccccccccccnggccntttnaaaanaanggnancccccggnnngnngaantttnntttaaacntttttnnnccccccncccnnnggggggggcccggccccnacttttttttccntttnnnnngggtaantnnccccctgggcnaaaaaaggggaaaantnnttnnnnngggnnnnnnnnn

SEQ ID NO: 9408 - DNA, 813 bp, Homo sapiens
  misc_feature 608, 612, 615, 616, 617, 618, 619, 620, 621, 622, 623, 624,625, 626, 627, 635, 650, 688, 704, 709, 733, 764, 773, 777: n = A,T,C or G
gactactatagggcgaattggagctccccgcggtggcggccgaggtacgcggggattccccagaccttctgcagattctgtggttatactcactcctcatcccaaagaatgaaatttaccactctcctcttcttggcagctgtagcaggggccctggtctatgctgaagatgcctcctctgactcgacgggtgctgatcctgcccaggaagctgggacctctaagcctaatgaagagatctcaggtccagcagaaccagcttcacccccagagacaaccacaacagcccaggagacttcggcggcagcagttcaggggacagccaaggtcacctcaagcaggcaggaactaaaccccctgaaatccatagtggagaaaagtatcttactaacagaacaagcccttgcaaaagcaggaaaaggaatgcacggaggcgtgccaggtggaaaacaattcatcgaaaatggaagtgaatttgcacaaaaattactgaagaaattcagtctattaaaaccatgggcatgagaagctgaaaagaatgggatcattggacttaaagccttaaatacccttgtagcccagagctattaaaacgaaagcatcctganaganaannnnnnnnnnnnnaaaaagtnctgccgggcggccgntctagaactagtggatcccccggctgcaggaattcgantttcaagcttattganaccgncgacctcgaggggggggcccggtnccccactttttgttccctttagtggggggtnaattggccncttnggccgtaatcatgggcatagctggtttcctgggggg

SEQ ID NO: 9409 - DNA, 613 bp, Homo sapiens
  misc_feature 3, 4, 5, 526, 583: n = A,T,C or G
ggnnngacgcgcgtaatacgactactatagggcgaattggagctccaccgcggtggcggccgaggtacttgaccccacagccatctgggatgagccgcttttcagccaccatgtcttcaaattcatcagcattgaacttggtgaagccccacttctttgagatgtggatcttctggcggccaggaaacttgaacttggccctgcgcagggcctcaatcacatgctccttgttctgcagcttggtgcggatggacatgataacttggccaatgtgaaccctggccacagtgccctggggctttccaaaggcacctcgcatgcctgtttggagcctcccgcgtacctgcccgggcggccgctctagaactagtggatcccccgggctgcaggaattcgatatcaagcttatcgataccgtcgacctcgagggggggcccggtacccagcttttgttccctttagtgagggttaattgcgcgcttggcgtaatcatggtcatagctgtttcctgtgtgaaattgttatncgctcacaattccacacaacatacgagccgggagcataaagtgtaaaagcctggggngcctaatgagtgaagctaacttacaattaa

SEQ ID NO: 9410 - DNA, 1038 bp, Homo sapiens
  misc_feature 6, 11, 18, 19, 22, 27, 35, 39, 240, 312, 315, 317, 319, 320,321, 322, 328, 329, 332, 337, 346, 357, 359, 366, 367, 368,375, 380, 381, 384, 388, 391, 405, 406, 409, 413, 415, 416,419, 420, 421, 423, 444, 445, 449, 450, 454, 456: n = A,T,C or G
  misc_feature 457, 476, 484, 485, 486, 487, 488, 489, 493, 494, 496, 499,501, 505, 510, 513, 515, 516, 529, 530, 532, 534, 535, 536,546, 548, 550, 551, 559, 561, 563, 564, 567, 570, 580, 582,586, 591, 593, 596, 605, 608, 609, 611, 619, 622, 627: n = A,T,C or G
  misc_feature 629, 632, 638, 641, 643, 644, 650, 652, 653, 654, 656, 659,662, 665, 671, 675, 676, 677, 680, 684, 688, 694, 697, 702,705, 709, 719, 721, 724, 725, 730, 734, 735, 740, 745, 746,756, 759, 761, 762, 769, 772, 776, 781, 782, 783, 787: n = A,T,C or G
  misc_feature 789, 791, 793, 795, 796, 797, 799, 803, 811, 812, 813, 815,829, 832, 844, 845, 847, 849, 851, 853, 855, 858, 859, 862,870, 871, 872, 873, 876, 877, 882, 890, 900, 912, 913, 914,917, 921, 932, 934, 937, 939, 940, 943, 948, 952, 954: n = A,T,C or G
  misc_feature 956, 962, 965, 968, 972, 977, 979, 982, 989, 991, 994, 995,997, 998, 1004, 1007, 1009, 1011, 1012, 1017, 1019, 1024,1025, 1026, 1029, 1038: n = A,T,C or G
gttganccgancgcgcgnnatncgacntactatanggcnaattggagctccaccgcggtggcggccgagtttcccccacaccaagtcgccgagccgcagactcacaaccgccatcttaccacccaaccaccgccccccgcgtacctcggccgctctagaactagtggatcccccgggctgcaggaattcgatatcaagcttatcgataccgtcgacctcgagggggggcccggtacccancttttgttccctttagtgagggttaattgcgcgcttggcgtaatcatggtcataagctgtttcctgagaacnccnanannnnaaattnnaanattcntggggaaanggaaaaagctnancaaaagnnntatttgnaattnntgnatangcncaaattaaatttannacnaaangnnatnnntnaccgcaatcaaaaattttaanntttnngttncnnggggggggctctttttttnacaagggnnnnnncttnntnttncnattnacaanaangnnaacgtttttttanntnannntgcctaaatntntnnttttttantnanntgnttnatagattaancnaaanatttntngcncttattttntanntnttagaacntgnttaantnaanattaanttnannattttntnnntncanaanaanttcaantttnnnaantttntaanatcttnttngggtntanatantaataaacgntnttnntcgtngggnnacgtnaaaanncacacaaaangantnngtctaanctntttnaatannntggncntngnannnantaancgttgtgnnntnatttttattatatnttnaatggaaaaatnntntngngngngtnnaanaaaatttnnnntcnnaaatntttttaantttttgcgcntgagtccttaannnttntaantttcgtgtggncncanannaanttttngtgntnanaatttnctntanaccntggananccncggggcntnttnntnnaaaacntgngnanntcccnantgggnnnaanaaaaaattn

SEQ ID NO: 9411 - DNA, 859 bp, Homo sapiens
  misc_feature 8, 715, 780, 790, 798, 819, 830, 849: n = A,T,C or G
tatcactncttagggcgaattggagctccccgcggtggcggccgcccgggcaggtacgcggggaggcattgaggcagccagcgcaggggcttctgctgagggggcaggcggagcttgaggaaaccgcagataagtttttttctctttgaaagatagagattaatacaactacttaaaaaatatagtcaataggttactaagatattgcttagcgttaagtttttaacgtaattttaatagcttaagattttaagagaaaatatgaagacttagaagagtagcatgaggaaggaaaagataaaaggtttctaaaacatgacggaggttgagatgaagcttcttcatggagtaaaaaatgtatttaaaagaaaattgagagaaaggactacagagccccgaattaataccaatagaagggcaatgcttttagattaaaatgaaggtgacttaaacagcttaaagtttagtttaaaagttgtaggtgattaaaataatttgaaggcgatcttttaaaaagagattaaaccgaaggtgattaaaagaccttgaaatccatgacgcagggagaattgcgtcatttaaagcctagttaacgcatttactaaacgcagacgaaaatggaaagattaattgggagtggtaggatgaaacaatttggagaagatagaagtttgaagtggaaaactggaagacagaagtacctcggccgctctanaactagtggatcccccgggctgcaggaattcgatatcaagcttatcgatacccgtcgacctcganggggggcccngtacccancttttggtcccttttagtgangggtaattgcncgcttggcgtaatcatggncatagctgtt

SEQ ID NO: 9412 - DNA, 901 bp, Homo sapiens
  misc_feature 2, 3, 6, 11, 12, 16, 17, 18, 19, 20, 21, 22, 23, 24, 25,26, 29, 30, 31, 32, 36, 38, 43, 392, 438, 447, 448, 457,459, 460, 461, 462, 463, 464, 465, 474, 607, 638, 643, 698,700, 718, 726, 738, 750, 769, 773, 793, 803, 821, 835, 839: n = A,T,C or G
  misc_feature 842, 848, 853, 867, 878, 890, 892: n = A,T,C or G
gnntgngtgtnncccnnnnnnnnnnnttnnnncccncntgtcnccccgcgtccgaaaaaatcttcaagaaaatttggcaaatcaaaaccagcaatatgtaaaaaggataatgcattatgaaagtaggttttatcccaaaaattcaaggttgttttaatcttcagaatgaatcaatgcaattcaccatatcagtaaattaaatgaatgggaggctaagacaggcagatcacttcaggttaggagtttgagacagaccagcctggccaaagtggtgaaatcctgtctctactgaaaaaacaaataaaaaaattagccaggtgcggtggcacacacctgtaatcccagctactctggggcatgttgaggcccaagaatctcttgacccaggaggnggagggtgtgccattgcacttcagcctgggcgacagaatgagactntgtcttccnnaaaaaaaanannnnnnnaagggaaangaaaaggaaaaaagaaaaaaaaaaaaaaagggcgggccgtttgactagtttaaaaaaaaaccttccacaccttccccttgacctggaacattaaatgaatgccattggtggtggtaaccttgttattgcagcnttttatgggttccaataaagccattgcctcncaaanttccaaataaagcatttttttcctgcattttaatggggttggccaacccatcaangnttcttatcatggttgganccccggtnccggctcgaatnatttcttttccntttctcgttacttgactcnttgncctcgggccgttcgggttgngggagcggtnttaagttacctcaaaggnggggataccggttnttcnccnaaatcnggggntacccccggaaaanaaccatttggnccaaaaggcccncnaaaaggcct

SEQ ID NO: 9413 - DNA, 519 bp, Homo sapiens
  misc_feature 5, 6, 10, 77, 279, 372, 439, 440, 442, 469, 472, 479, 486,494, 498, 499, 511, 519: n = A,T,C or G
gtttnngccnctatacactactatagggcgaattggagctccaccgcggtggcggccgcagaaggtcccggcagcangcaggaagaagacggaccccgcgatgagggcggcggcaaggagcaccttcatgttgcgttcggagaggcgcagcatccacaggcggaggcgaaagcagcccggacagcttaccccgcgtacctcggccgcttctagaactagtggatcccccgggctgcaggaattcgatatcaaagcttatcgatacccgtcgaccttgangggggggccccggtacccagcttttgttccctttagtgaggggttaaattgcgccgcttggcgtaaatcatggtcataagctgttttcctgtntggaaaattggttatcccgcttcacaatttccacacaacattaccaagcccggggagccataaaatnntnaaaaccctggggggggcccttattggnggngggcttnacttcanaatttaanttgnntttgggcccttnatttcccn

SEQ ID NO: 9414 - DNA, 696 bp, Homo sapiens
  misc_feature 12, 27, 41, 549, 558, 585, 618, 636, 641, 657, 660, 668,671, 683: n = A,T,C or G
aaagtctgcggnaattcggcacgaggnagctttataactgncagcaactttaatatacgctattggagctggaattaccgcggctgctggcaccagacttgccctccaatgggatcctcgttaaagggatttaaagtgggactcattccaattacagggcctcgaaaggagtcctgtattgttatttttcgtcactacctccccgggtcgggagtgggtaatttgcgcgcctgctgccttccttggatgtggtagccgtttctcaggctccctctccgggaatcgaaccctgattccccgtcacccgtggtcaccatggtaggcacggcgactaccatcgaaagttgatagggcagacgttcgaatgggtcgtcgccgccacggggggcgtggcgatcggcccgaggttatctaaagtcaccaaagccgccggcgcccgccccccggccggggccggagaggggctgaccgggttggttttgatctgataaatgcacgcatcccccccccgaaggggttaacgcccgtcgcatgtattaactctagaantaccacagntattccagtaggagaggagcgagcganccaaggaaccataactgatttaatgagccattncagtttactgtaccggcnggcgncttaaacatgcatggnttnaattttgnctngccccaattcgnacaacttttttct

SEQ ID NO: 9415 - DNA, 844 bp, Homo sapiens
  misc_feature 2, 3, 4, 5, 6, 7, 10, 15, 18, 24, 243, 336, 471, 491, 514,528, 577, 629, 643, 651, 678, 685, 701, 712, 732, 735, 761,776, 781, 805, 806, 809, 817, 822, 823, 831, 838: n = A,T,C or G
gnnnnnnctnaccgnggnggcggncgaggtaccttatgatgtgtgggccagcaactacgtagatctgatcacagaacaggccgatatcgcattgacccggggagctgaggtgaagggccgctgtggccacagccagtcggagctgcaagtgttctgggtggatcgcgcatatgcactcaaaatgctctttgtaaaggaaagccacaacatgtccaagggacctgaggcgacttggaggctgancaaagtgcagtttgtctacgactcctcggagaaaacccacttcaaagacgcagtcagtgctgggaagcacacagccaactcgcaccacctctntgcttggtcacccccgctgggaagtcctatgagtgtcaagctcaacaaaccatttcactggcctctagtgatccgcagaagacggtcaccatgatcctgtctgcggccacatccaaccttttgacattatctcanattttgtcttcagtgaagancataaatgcccaatggatgagcnggagcaactggaanaaaccttgcccctgattttggggctcatcttgggcctcgtcatcatggnaacactcgcgaattaccccgttcaccccaaaatgactggcaaccaggtgcanatccctcgggacanatccaatntaaacacaatgggcttaaaggccttanggaagcnccccctattctggttncccaactgggntaaggtgaaaaaacaaaaanccntttttcattttggaccttgcccgggnggggggtttttaaantaatnggatcccccgggctggggggattnnatnttaagctnttttnntccccccnccctcangggggg

SEQ ID NO: 9416 - DNA, 956 bp, Homo sapiens
  misc_feature 4, 5, 6, 7, 8, 9, 10, 11, 12, 13, 14, 15, 16, 17, 18, 19,20, 21, 22, 23, 24, 25, 26, 27, 28, 29, 30, 31, 32, 33,34, 35, 36, 37, 38, 39, 40, 41, 42, 43, 44, 45, 46, 47,48, 49, 50, 51, 52, 53, 54, 55, 56, 57, 58, 59, 60, 61,62, 63: n = A,T,C or G
  misc_feature 64, 65, 66, 67, 68, 69, 70, 71, 72, 73, 74, 75, 76, 77, 78,79, 80, 81, 82, 83, 84, 85, 86, 87, 89, 90, 91, 92, 93,94, 95, 96, 97, 98, 99, 100, 101, 102, 103, 104, 105, 106,107, 108, 109, 110, 111, 112, 113, 114, 115, 116, 117, 118: n = A,T,C or G
  misc_feature 119, 120, 121, 122, 123, 124, 125, 126, 127, 128, 129, 130,131, 132, 134, 135, 136, 138, 139, 140, 141, 142, 143, 144,145, 146, 147, 148, 149, 150, 151, 152, 154, 155, 156, 157,158, 159, 160, 161, 162, 163, 164, 165, 166, 167, 168: n = A,T,C or G
  misc_feature 169, 170, 171, 172, 173, 175, 176, 177, 178, 179, 183, 184,186, 187, 189, 190, 191, 192, 193, 196, 197, 198, 201, 202,204, 205, 206, 207, 208, 209, 210, 211, 212, 213, 216, 217,218, 219, 220, 221, 222, 224, 226, 227, 229, 230, 231: n = A,T,C or G
  misc_feature 234, 235, 236, 237, 238, 241, 242, 243, 244, 245, 246, 247,248, 249, 250, 251, 252, 253, 254, 255, 257, 258, 259, 260,261, 263, 264, 265, 267, 268, 269, 270, 271, 272, 273, 274,275, 276, 277, 278, 279, 280, 281, 282, 285, 288, 289: n = A,T,C or G
  misc_feature 290, 291, 292, 293, 294, 295, 296, 297, 298, 299, 300, 301,302, 303, 304, 305, 306, 307, 315, 316, 348, 356, 363, 368,389, 396, 399, 420, 432, 433, 436, 439, 442, 451, 457, 473,475, 477, 482, 494, 506, 513, 514, 526, 535, 541, 561, 564, 575: n = A,T,C or G
  misc_feature 577, 579, 592, 601, 619, 629, 667, 677, 681, 693, 695, 734,739, 742, 758, 780-781, 796, 812, 832-833, 840, 845, 859-861,884-888, 891-893, 908, 911, 914, 916-921, 924-926, 928-929,938-941, 944, 953, 955: n = A,T,C or G
actnnnnnnnnnnnnnnnnnnnnnnnnnnnnnnnnnnnnnnnnnnnnnnnnnnnnnnnnnnnnnnnnnnnnnnnnnnnnnnnnnnnntnnnnnnnnnnnnnnnnnnnnnnnnnnnnnnnnnnnnnnnnnnnntnnntnnnnnnnnnnnnnnntnnnnnnnnnnnnnnnnnnnntnnnnntttnntnntnnnnnatnnnttnntnnnnnnnnnnttnnnnnnngntnntnnnttnnnnnttnnnnnnnnnnnnnnntnnnnntnnntnnnnnnnnnnnnnnnnatnttnnnnnnnnnnnnnnnnnnnnattttttnntatttttttttttttttattttttttattttntttttttnttttttnttttnattttatatattttttttttnatttttnttntttttttttattttttttttnttttattatttnntanctntanttttttttntctaanttttttaaaaaatttntnangttgnattcttggtganaaataaaaaaanaagaacnnaaaccccccccnaaatttccnttttanccccccggcccccctttccnggnaaaaccaaaanantntggtttccttttnaggcccccnaggggtttggtttttccnaaccgggttnggcctttcttggccaaacccctggggggcccattttgnttggccttgntggnccctttcgtttncnacggtttcttgtttccaacttggttggggaaaattgggnaaccnaangggcccttgaaaaaangttggggcccaaaaaaaaaaannttgggcaacccccgnaaaaaccccttgggtnttaaaaaaaacccggggaannaattttnccttnaaaccccccccaannnaagaaaagttttttttttttaannnnnccnnncacccccccccctanttnggnannnnnncannntnntttgaaaannnnaanatttttttntnt

SEQ ID NO: 9417 - DNA, 878 bp, Homo sapiens
  misc_feature 2, 8, 11, 15, 17, 19, 28, 31, 35, 556, 641, 642, 646, 647,648, 649, 650, 652, 653, 654, 655, 656, 658, 659, 661, 665,667, 671, 674, 675, 676, 677, 678, 680, 685, 688, 689, 690,695, 697, 699, 700, 701, 704, 705, 707, 711, 713, 714: n = A,T,C or G
  misc_feature 716, 717, 718, 720, 724, 725, 727, 733, 735, 737, 738, 741,747, 748, 749, 753, 756, 757, 758, 760, 763, 764, 768, 771,772, 775, 780, 781, 782, 783, 784, 786, 787, 789, 790, 792,793, 794, 796, 797, 799, 803, 804, 805, 811, 813, 815: n = A,T,C or G
  misc_feature 816, 818, 819, 821, 825, 827, 828, 829, 830, 831, 832, 838,840, 841, 842, 843, 848, 850, 851, 855, 856, 859, 863, 866,868, 870, 871, 874, 876: n = A,T,C or G
gnatagtnganccgnantntggacatanttnttgnctgattggagctccaccgcggtggcggccgaggtacgcggggggtggggcctttgtctctggcggcagccggagcttctggtgtagtcttcactgctctgtgtcttctgctcctagaggcccagcttctgtggcctcgttacctgcaggtattgggagatccacagctaagacgccaggacccactggaagcctagaaatgttgcaggaattgtgccttggatccatccatccagtcagctgaaaccagcagcccaggacaagtgggccagccaacaggacctagaccatgcaacccagctgatcctacgatggaaccaaggtgccagtgagatgacaacagccctgctctggtcactccggaagctgaccagtccacgcacggctgaagcttgaggagacaacagccctgctctagtcaccccagaagctgactagtctatgcacggccgctctagaactagtggatcccccgggctgcaggaattcgatatcaagcttatcgataccgtcgacctcganggggggcccggtacccacttttgttccctttagtgaagggttaattgcgcccttggcgtaaatcaatggtcatagctgttttctnnaaannnnnannnnntnntntaantntggnaannnnnantatanttnnnaaatntntnnnaanntntttnannannntntttnnantatttngntnnaanattttnnnaatntannnanacnntttntgnnaanatttnnnnnanntnntnnnannantttnnntaattntntnnanntntttncnnnnnnataatntnnnnataanannttanntantttnttntntnnttncncc

SEQ ID NO: 9418 - DNA, 692 bp, Homo sapiens
  misc_feature 638, 682, 692: n = A,T,C or G
tatagggcgaattggagctccaccgcggtggcggccgccccgggcaggtacgcggggattccccagaccttctgcagattctgtggttatactcactcctcatcccaaagaatgaaatttaccactctcctcttcttggcagctgtagcaggggccctggtctatgctgaagatgcctcctctgactcgacgggtgctgatcctgcccaggaagctgggacctctaagcctaatgaagagatctcaggtccagcagaaccagcttcacccccagagacaaccacaacagcccaggagacttcggcggcagcagttcaggggacagccaaggtcacctcaagcaggcaggaactaaaccccctgaaatccatagtggagaaaagtatcttactaacagaacaagcccttgcaaaagcaggaaaaggaatgcacggaggcgtgccaggtggaaaacaattcatcgaaaatggaagtgaatttgcacaaaaattactgaagaaattcagtctattaaaacctgggcatgagaagctgaaaagaatgggatcattggacttaaagccttaaatacccttgtagcccagagctattaaaacgaaagccaaaaaaaaaaaaaaaaaaaagtacctcggccgctnttaaaaactagtggatccccccggctgcaggaattcgatattcnagccttatcn

SEQ ID NO: 9419 - DNA, 630 bp, Homo sapiens
  misc_feature 1, 420, 486, 519, 550, 561, 592, 619: n = A,T,C or G
ncgcgtccggcacctcctccttcccctgcccggcagggcacttcaacggcttccgcacggtcatccgccccttctacctgaccaactcctcaggtgtggactagacggcgtggcccaagggtggtgagaaccggagaaccccaggacgccctcactgcaggctcccctcctcggcttccttcctctctgcaatgaccttcaacaaccggccaccagatgtcgccctactcacctgagcgctcagcttcaagaaattactggaaggcttccactagggtccaccaggagttctcccaccacctcaccagtttccaggtggtaagcaccaggacgccctcgaggttgctctgggatccccccactgcccctggtcagtctgcccttgtcactggtctgaggtcattaaaattacattgaggntcctaaaaaaaaaaaaaaaaagggcggcccgctagactagtctagagaaaaaacctcccacacctncccctgaacctgaaaacataaaatgaatggcanttggttgttgtttaacttggtttattgcaanttataaatggntacaaataaaagcaatagcatcacaaatttnaacaaataaaacattttttttcactgnattctagttgg

SEQ ID NO: 9420 - DNA, 509 bp, Homo sapiens
  misc_feature 1, 3, 9: n = A,T,C or G
ntnctatanggcgaattgggccctctagatgcatgctcgagcggccgccagtgtgatggatatctgcagaattcgccctttcgagcggccgcccgggcaggtaccctccaacacaaccaaaggctttgccaagtgttccagaaatgatgtccatttttggcatgactccatcccgatccccaatccctccgcctcgagccccataaagccccactgcgtggacctcatccacgaaggtgattgctccaaactcatgggccacatcacacagctcttccagtgggcacaccgccccatccattgaatggacagtttcaaatgccacaatcttggggactgaggggtcagatctttgcagcagttctctgaggtggctgacatcattgtggcggaagatgtacctcggccgcgaccacgctaagggcgaattccagcacactggcggccgttactagtggatccgagctcggtaccaagcttggcgtaatcatggtcatagctggttctgg

SEQ ID NO: 9421 - DNA, 851 bp, Homo sapiens
  misc_feature 554, 561, 566, 620, 624, 633, 656, 695, 708, 711, 720, 724,730, 738, 744, 754, 761, 763, 764, 766, 770, 775, 780, 787,796, 800, 803, 815: n = A,T,C or G
gactactatagggcgaattggagctccaccgcggtggcggccgaggtactgggataaatgaagaagaaggcataaggacaataaacatggaactccactgcaaatggattttatgcagctgaggaaagtttgggcttattagtatttgctccagcgaacctccaagttttctccattgcggacaacgtaactaccagctccttggctcagtggttcgcctccactcagaagttcccagtaggttctgtcattattgttggcacataggccctgaatacaggtgatatagggcccccatgagcgctcctccattgtgaaaccaaatatagtatcattcattttctgggctttctccatcacactgaggaagacagaaccatttagcacagtgacattggtgaaatatgtttcattgattctcacagagtaattgacggagatatatgattgtgagtcaggaggtgtcacagttataggctcatcagcggagatgttgaagttacctgaagcagagacgcaagaagagtctttgttaatatccaagaaggtctttnccatcanggcanggtaagacctgggctgcagcgtttggattgcttgaatgctccctgagaaatttnccgngagcactgnattcaagagtttggtggcaattnccagtcattttcattataataagtctgatgataccaaanaagggcctgcatngcntcttcctgngctnaaatgnggtttccnaagganaacatttttnttttttntnnanacanaatcnttttntaccagngacctttgnattnaanacctgatggtcntttaaaatggccttcatttgggcttggaactggccc

SEQ ID NO: 9422 - DNA, 507 bp, Homo sapiens
actactatagggcgaattggagctccaccgcggtggcggccgcccgggcaggtacgcgggggggtgtccagttggttgccgcggcagtctctccgagcagcgcatttgtcttctaggctgcttggttcgtgcctccgagaaaggggtctcctgctgccagctaagtgtgggagaacttgtgcacgtatctcccctccgaatcccaacgatgggtaacgccagcattggctccaaggaacagaagctgctgaagcggttgcggcttctgcccgccctgcttatcctccgcgccttcaagccccacaggaagatcagagattaccgcgtcgtggtagtcggcaccgctggtgtggggaaaagtacctcggccgctctagaactagtggatcccccgggctgcaggaattcgatatcaagcttatcgataccgtcgacctcgagggggggcccggtacccagcttttgttccctttagtgagggttaattgcgcgcttggcgtaatcatg

SEQ ID NO: 9423 - DNA, 356 bp, Homo sapiens
  misc_feature 2, 14, 32, 39, 40, 41, 45, 47, 99, 114, 115, 121, 122, 123,124, 128, 129, 133, 135, 136, 137, 138, 143, 144, 147, 149,150, 153, 155, 157, 159, 160, 162, 170, 174, 178, 179, 184,188, 193, 194, 197, 198, 200, 210, 211, 214, 219, 220: n = A,T,C or G
  misc_feature 221, 222, 223, 226, 227, 228, 231, 235, 237, 244, 248, 256,257, 262, 272, 279, 280, 281, 286, 287, 292, 295, 296, 297,299, 310, 314, 317, 333, 342, 346, 355, 356: n = A,T,C or G
gnataccgtcgatnctgggtacatcactctgntggcctnnntggnanctccaccgcggtggcggccgaggtactttttttttttttttttttttttttnaaaaaaaaaattttnntttttnnnngggnnggangnnnnggggnnaantnnggntnantnnancccccccntttngggnnaaaanaaanccccnnccnnanccccccaaannggngggannnnnggnnnaancccncnaccccantttntttttttnnttttnaaaaaaaaangggtttnnnttttnnggccnggnnnantttaaaccccnaaanttngggggccccccccccntggcccccnaaanggggggggnn

SEQ ID NO: 9424 - DNA, 611 bp, Homo sapiens
  misc_feature 4: n = A,T,C or G
tcgncccacgcgtccggcggcccagttcccttttccggtcggcgtggtcttgcgagtggagtgtccgctgtgcccgggcctgcaccatgagcgtcccggccttcatcgacatcagtgaagaagatcaggctgctgagcttcgtgcttatctgaaatctaaaggagctgagatttcagaagagaactcggaaggtggacttcatgttgatttagctcaaattattgaagcctgtgatgtgtgtctgaaggaggatgataaagatgttgaaagtgtgatgaacagtgtggtatccctactcttgatcctggaaccagacaagcaagaagctttgattgaaagcctatgtgaaaagctggtcaaatttcgcgaaggtgaacgcccgtctctgagactgcagttgttaagcaaccttttccacgggatggataagaatactcctgtaagatacacagtgtattgcagccttattaaagtggcagcatcttgtggggccatccagtacatcccaactgagctggatcaagttagaaaatggatttctgactgggaatctcaccactgaaaaaaagcacacccttttaagactactttatgaggcacttgtggattg

SEQ ID NO: 9425 - DNA, 542 bp, Homo sapiens
  misc_feature 187, 237, 337, 387, 432, 436, 442, 457, 458, 477, 491, 493,495, 496, 506, 518, 526, 532, 536, 537, 541: n = A,T,C or G
ggcgaattggagctccccgcggtggcacgcggccgcccgggcaggtacgcgggatctcatctgagacaaacctgaaatgccaaaccaaactgagttagcccctctctgtctgttgtatatattggagtaataacctatttgtcttgataaagggattgcatgcttgaattgcaaaaacctttatttnttttgggttgcccaatgtgcaagactaagagctattttgataaatttctnaccaggctgactgtctctctgtggggtcgggggagttttcagggtctcacgtattgcagggaaggtttggttgtgagatcgagaataacagaaagcagcnggagcattctggaaatattacttatgatggaaaggactacattgaatttnaacaaaagaaatttccagccttgggtttccccttttgaccccaanccanccccanaataaacccagggcnncaaagtttggggaaggggnaagaaaacccagtntnannttgccaactngggcccaaaggnttttaccnttgggngggnnggang

SEQ ID NO: 9426 - DNA, 630 bp, Homo sapiens
  misc_feature 9, 18, 28, 629: n = A,T,C or G
gggatcgantgtaagccntgcttctggntggcggcaagggaaagggacgatggagaaggcacggctgcttcttacctgccttgctcttaactgacacacatcactcctgctcacgtcctcttggccactggtagtcatgtggccccacctggatgcagaggaggccaggatgtgcagtctccacatagtggcttcccagcaacaacttttgacttagatggggggtatgtattatggtgagaggttagccttcctggcacatcttcccttaaaacttctaacttgcccctcctagtccaagtcacctctcagatgaagtcttttttgaccccctttcagccactgggtcccttagtgctgtgtatgtgactgctgtagcattccactgcacctgctgcatacagcttacattggagatgtgtatgtcaaacgcatttttctttattgcaaagagagtctattatagaaggaaagaagtggaggcctgctgtgtggatcccttcttcttcctagctttcaagtttccttatctgcaaagtggaaggtcagaccagatgatgctctggtactccacaagtgctcacctgtatcactgcagggctttctgcactggaaagtggaagcagaang

SEQ ID NO: 9427 - DNA, 822 bp, Homo sapiens
  misc_feature 636, 661, 665, 701, 713, 723, 729, 738, 744, 745, 748, 750,762, 777, 778, 785, 792, 794, 817: n = A,T,C or G
gaattggagctccaccgcggtggcggccgagtttcccccacaccaagtcgccgagccgcagactcacagccgccatcttaccacccaaccaccgccccccgcgtacctcggccgctctagaactagtggatcccccgggctgcaggaattcgatatcaagcttatcgataccgtcgacctcgagggggggcccggtacccagcttttgttccctttagtgagggttaattgcgcgcttggcgtaatcatggtcatagctgtttcctgtgtgaaattgttatccgctcacaattccacacaacatacgagccgggagcataaagtgtaaagcctggggtgcctaatgagtgagctaactcacattaattgcgttgcgctcactgcccgctttccagtcgggaaacctgtcgtgccagctgcattaatgaatcggccaacgcgcggggagaggcggtttgcgtattgggcgctcttccgcttcctcgctcactgactcgctgcgctcggtcgttcggctgcggcgagcggtatcagctcactcaaaggcggtaatacggttatccacagaatcaggggataacgcaggaaagaacatgtgagcaaaaggccagcaaaaagccagggaaccgtaaaaangccgccgttgctgggcgttttttcnatangcttccgcccccctgggcgagcctttacaaaaaatnggacccttcaantttaaaaggngggggnaaacccccnccgggnnttntnaaaaaaaacccnggcggttttcccccnnggaaagnttccttngnggcccttttcttttcccaccctnccccc

SEQ ID NO: 9428 - DNA, 683 bp, Homo sapiens
  misc_feature 609, 642, 682: n = A,T,C or G
ggcgaattggagctccaccgcggtggcggccgaggtacagaaactaggactgtttgcagtgaggttgttgaggagccaaaggccctcagggagcagactgggctgtttctggaaaaagaactgcagaaggataaataaggctgccacaacacgctcatctctgagctgcatttgccctcccacagtctccactgctgcctcagttagcaggttgcttagacatcgaagcacggggcatgccagcagctccagtcctgcatcctcgcttttctggacagccccagccaagtccaacagcagcaaccccagagtagacagagccccatggccaatgagcagaggattgctggcctggctgcagatgatgtaatgaaggcaccaggcaaaccccgcgtacctgcccgggcggccgctctagaactagtggatcccccgggctgcaggaattcgatatcaagcttatcgataccgtcgacctcgagggggggcccggtacccagcttttgttccctttagtgagggttaattgcgcgcttggcgtaatcatgggtcatagctgtttcctgtgtgaaatttggtatcccgtcacaattccacacaacatacganccggggagcattaaagtgtaaaagccctggggngcctaatgagtgagctaacttcacatttaattggcgttgnc

SEQ ID NO: 9429 - DNA, 893 bp, Homo sapiens
  misc_feature 204, 470, 471, 499, 512, 543, 546, 564, 574, 580, 601, 628,630, 635, 660, 661, 678, 681, 711, 732, 749, 755, 763, 765,767, 776, 779, 783, 792, 795, 809, 812, 815, 816, 818, 819,820, 821, 836, 841, 846, 854, 856, 858, 859, 861, 871: n = A,T,C or G
  misc_feature 873, 878, 879, 880, 890: n = A,T,C or G
ggagctccaccgcggtggcggccgcccgggcaggtaccaggtgaacaaagtttaccagaaagcagttgagacaagaaaataagagctcaggatgagggaaaagaaaaagattgagagaatttgtgcccccaaccatttcctcagactctaagaaagaacacgctctctccaggcaggtctgaagctcaactctcttattgcctnacttcaggtatacctcactttacacaatagaattataactggaaagaagttggggacacatgtatttggtgattacattttaaacacattaggaaaagttgctatttgaactttttattgatttttggggggagtaaagaattattttgtgatgcaaaataaatatcctttaattgatcgacttgccaaatttagatttgtgtgcatcaggctttctttttttttctttttttagagaagtcaatataagctgttcttttctttgnntctttctttctttaattttggagatggngttcttgctctgncggcccatgctggagtgcaattggcgcgatntcnggctcactgcaaccctcncaccctcctnggttcnaagccgattcctcttgccctnaaccctccccaagccagtttggggacntnccaangcgtggagcccaaccaatggccccnnggctaaatttttggtanttntttaagtaagaagacaggggttttaacccnttgtttatgccaaggcttggnctttaaaactcctttanccttanggccattntngncccccctangtnttcntaaaagttnccnttggggcccgtctntanaannannnngggatcccccccggnctggncgggnaattcgantntnnancctttatcgnanccccnnntgaccttcgnggg

SEQ ID NO: 9430 - DNA, 916 bp, Homo sapiens
  misc_feature 524, 531, 537, 562, 567, 581, 586, 591, 594, 596, 598, 600,601, 607, 638, 647, 650, 651, 677, 678, 685, 692, 719, 721,735, 737, 746, 750, 755, 761, 765, 774, 781, 789, 796, 804,821, 822, 831, 847, 852, 865, 872, 878, 892, 894, 905: n = A,T,C or G
  misc_feature 913, 914: n = A,T,C or G
gcgcgtaatacgactcactatagggcgaattggagctccaccgcggtggcggccgaggtaccaggtgaacaaagtttaccagaaagcagttgagacaagaaaataagagctcaggatgagggaaaagaaaaagattgagagaatttgtgcccccaaccatttcctcagactctctaagaaagaacacgctctctccaggcaggtctgaagctcaactctcttattgcctcacttcaggtatacctcactttacacaatagaattataactggaaagaagttggggacacatgtatttggtgattacattttaaacacattaggaaaagttgctatttgaactttttattgatttttggggggagtaaagaattattttgtgatgcaaataaatatcctttaattgatcgacttgccaaatttagatttgtgtgcatcaggctttcttttttttctttttttagagaagttcaatataagcttttcttttctttgtttctttctttctttattttgagatggagncttgctntgtcgnccatgcttgttccctttcaatcganctcgngtgactgcaacccnaaaantaccnttnantntnntttagnaaagcccaagacgaattttaccaaggggggnctattaggngannactttccagtttccccgggttttccnnccggttngccgccnattttttcccaaaaaaagggcccgggncntcctttttttcctngntccctccantccnaaggncccccnaaanaattttttncccccgnaatttaancggggangaacttcnggggtttttccaaaaannacatttttnatttttttacacggtnccttngggccggttttanaaacttngggggncccccccgggcttngnagggaatttcnttttcaannct

SEQ ID NO: 9431 - DNA, 655 bp, Homo sapiens
  misc_feature 579, 648, 654: n = A,T,C or G
cctcactaaaggaacaaaagctgggtaccgggccccccctcgggtcgacggtatcgataagcttgatatcgaattcctgcagcccgggggatccactagttctagagcggccgcccgggcaggtacgctgcccaggcaaagcgtccgggcaacgtaggcgggcgactcagatcccagccagtggacttagcccctgtttgctcctccgataactggggtgaccttggttaatattcaccagcagcctcccccgttgcccctctggatccactgcttaaatacggacgaggacagggccctgtctcctcagcttcaggcaccaccactgacctgggacagtgaatcgacaatgccgtcttctgtctcgtggggcatcctcctgctggcaggcctgtgctgcctggtccctgtctccctggctgaggatccccagggagatgctgcccagaagacagatacatcccaccatgatcaggatcacccaaccttcaacaagatcacccccaacctggctgagttcgccttcagcctataccggcagctggcacaccagtccaacagcaccaatatcttcttctncccagtgagcatcgctacagcctttgcaatgctcttcctgggaccaaggctgacactcacgatgaaatnctggang

SEQ ID NO: 9432 - DNA, 922 bp, Homo sapiens
  misc_feature 3, 4, 8, 592, 646, 656, 668, 679, 693, 726, 751, 761, 784,801, 841, 844, 846, 854, 857, 864, 878, 880, 885, 888, 901,902, 904, 909, 915: n = A,T,C or G
ggnngacnttcgtaatacttctactatagggcgaattggagctccaccgcggtggcggccgaggtacccaacagaggtagcatcagcagcaggccggcgcccaggaggggcagcagcctcacgcggggctttctggtctcggccgctctagaactagtggatcccccgggctgcaggaattcgatatcaagcttatcgataccgtcgacctcgagggggggcccggtacccagcttttgttccctttagtgagggttaattgcgcgcttggcgtaatcatggtcatagctgtttcctgtgtgaaattgttatccgctcacaattccacacaacatacgagccgggagcataaagtgtaaagcctggggtgcctaatgagtgagctaactcacattaattgcgttgccgctcactgcccgctttccagtcgggaaacctgtcgtgccagctgcattaatgaatcggccaacgcgcggggagaggcggtttgcgtattgggcgctcttccgcttcctcgctcactgactcgctgcgctcggtcgttcggctgcggcgagccggtattcagcttcactcaaaggcggtaataccngtttattcacagaatcaaggggaataaccgcaaggaaaaagaacattgtgaagncaaaaagggncagcaaaaaggnccagggaaccngtaaaaaaaggccncgtttgcttgggcgtttttttccataaggcttnccgccccccttgacgaagcatttancaaaaaaatngacgcttaaagtttaaaaaggtngccgaaaacccccgacnagggactttttaaagaatacccaggccttttccccccttnganancttccttnggngcggctntttcttgttttcgnanccttnccngttttaaccggannancttgncccccnttttttt

SEQ ID NO: 9433 - DNA, 811 bp, Homo sapiens
  misc_feature 484, 552, 555, 588, 602, 609, 611, 614, 617, 630, 664, 665,666, 667, 668, 669, 670, 671, 672, 673, 674, 675, 676, 677,678, 679, 680, 681, 682, 683, 684, 706, 712, 715, 747, 757,764, 778, 779, 792, 800, 802, 808, 811: n = A,T,C or G
tacactcactatagggcgaattggagctccccgcggtggcggccgaggtacagagcatagtgaagcatgatgggtggtagtattaggagaaaaacatcagtcaaattaaatttagcagagtttatttgagcaaagaagtgactcatgaatcggacaactccctaaaccaggagagacaccacacggcagtatgggcaagcagtattcacaggcagaaaaaggaggtgacatacagaaacagcctggctggccacagatcacagcttgccttacttggtcacagtctgaggagctagcagcctgtggtggactgaaagcccagctgctctgattagccaacatttggctacttgtcgcaagaatctattcatctgggccgggtgcagtggctcacgcctgtaatcccagcactttgggaggccaaggcggtggatcacctgaggtcgggagtttgagaccagcctcgccatcatggggaaactgngtctctattaaaaatacaaaaattaagctgggcatggtgggtgtgtgcctgtaatcccagctacccangangctgaggcaggagaatcactttgaatccaggangccaaaggttgcantgagcananatnggngcccctgcacttncagctgggggacagagcaagagtcctctcgaaannnnnnnnnnnnnnnnnnnnngttcctgcccggcggcgtttanactagnggntcccccgcctgaggaattcatttcaacttttngatacccgcnacctcgnggggggggcccggnncccacctttgttncctttagngnggggtnatn

SEQ ID NO: 9434 - DNA, 595 bp, Homo sapiens
  misc_feature 2, 16, 20, 48, 52, 85, 576: n = A,T,C or G
gncccacgcgtccgancagnagctcatctttgcaggcaagcagctggnaagnatggccgtactctttctgactacaacatccagnaaggagtcgaccctgcacctggtcctgcgtctgagaggtggtatgcagatcttcgtgaagaccctgaccggcaagaccatcaccctggaagtggagcccagtgacaccatcgaaaatgtgaaggccaagatccaggataaagaaggcatccctcccgaccagcagaggctcatctttgcaggcaagcagctggaagatggccgcactctttctgactacaacatccagaaggagtcgaccctgcacctggtcctgcgtctgagaggtggtatgcagatcttcgtgaagaccctgaccggcaagaccatcactctggaggtggagcccagtgacaccatcgaaaatgtgaaggccaagatccaagataaagaaggcatcccccccgaccagcagaggctcatctttgcaggcaagcagctggaagatggccgcactctttctgactacaacatccagaaagagtcgaccctgcacctggtcctgcgcctgangggtggctgttaattcttc

SEQ ID NO: 9435 - DNA, 704 bp, Homo sapiens
  misc_feature 3, 4, 5, 6, 7, 8, 9, 11, 15, 16, 20, 22, 34, 39, 178, 209,522, 603, 625, 627, 636, 656, 659, 681, 690, 701, 703: n = A,T,C or G
agnnnnnnngnactnntaangnacttcctttacngagtncctgtttagaaacaacagtctatgatacgtataatcctctcttttttgtacacagagtaaagaggacaaataggtgaaagaataaatgaaaggctggaatcccacttcccccgctgtcccagggcattggatattgacngataggaggcagcaaaccactcacagagccnggaagaaatgaatgcgttggtattgccaggaggggaagccggcccggctgaaatacgctatgaccatagccaggagatactgatggagagaaaggaacacagagagggagaggtcacatcttggaagaggaagattgtggagagggggaatgagggtctggggaggggctgcccatcagagaagggacctcagtgttggggtgactactcatttggaaattgcgggatggaggggtattcgaaggtcggatgcaaatccgagaagccagaggaagggttttgggtgatgctcccaggatggtgggctccgatnggatctttggagggggtgtgtctaggtcgctggtgtcaagaaggtcttttgtgtgccagcaaagaactgtccccaaagctnaaagtaaagggccaggaacttnanggctgcggncagactgtggccaaactcanatnccaaagacccattgaaaagcangggccctcnttactttgaanana

SEQ ID NO: 9436 - DNA, 605 bp, Homo sapiens
  misc_feature 3, 5, 7: n = A,T,C or G
ccncntncggtgatccacccaccttggcctcccaagtgctgagattacagcatgagacaccatgcccagctgtgagcctgtatcttaatcaaagtcctgagaataaccttgaagaagactcccttgcaatgagcaacaacagaagaagcaagggacctggaatctggcagacctgggtttgaattctggctctgtcactttctggtgaagtgacttgagtaatgaacatgagcctttctgggtagcgtttacagcacaaagcaatttgaggaataaatgaaagagcacgtgtctagtgcctagcaatgcgctggacacagtgccggtgctcagccatcatgtcacaccagcactgaccggtgagcataaaccctggggatgcccagagctggtacagccaggagctccagaagcgtgggattctcagagggaagtggagctcactgctctacaggtcctattcaagttagaaagtaagacacaatgcacacaaagccaaattgtcatcattcagctcctattacaggggaactaagagctgcattgaaaattatttgcaaagcttgtaagtggttctgccacttattagccatgtgaaccttagc

SEQ ID NO: 9437 - DNA, 383 bp, Homo sapiens
  misc_feature 379: n = A,T,C or G
ggagctccaccgcggtggcggccgcccgggcaggtacgcggggggcggcggcggagagagctggctcagggcgtccgctaggctcggacgacctgctgagcctcccaaaccgcttccataaggctttgcctttccaacttcagctacagtgttagctaagtttggaaagaaggaaaaaagaaaatccctgggccccttttcttttgttctttgccaaagtcgtcgttgtagtctttttgcccaaggctgttgtgtttttagaggtgctatctccagttccttgcactcctgttaacaagcacctcagctgagagcagcagcagcgatagcagccgcagaagagccagcggggtcgcctaagtgtcatgaccagggcggnagat

SEQ ID NO: 9438 - DNA, 539 bp, Homo sapiens
  misc_feature 279, 299, 300, 308, 310, 315, 317, 328, 339, 349, 356, 362,368, 371, 376, 378, 381, 383, 391, 392, 397, 401, 405, 410,414, 420, 429, 432, 434, 438, 441, 442, 443, 448, 449, 450,453, 456, 464, 471, 478, 483, 485, 486, 490, 491, 495: n = A,T,C or G
  misc_feature 501, 506, 513, 539: n = A,T,C or G
gcaccccgcgtccgaggtttgaacccaggttagtggtacaaagtcacagtccttgtgccttcagaaaacccagaggccccaaatacgagtgggaagagagttgggaaaaactgaaccagactcttccaatggccattaaagagaaaattcagcaacgcttgcctttgtctttgaccctgagaagttaagggacacagattgtggcgccgtgatggaacatggagggaaggcatggtgtgcttcctgcagagatgcctctggagtccctgtggccacggnatctcactggcccccttttnnggcccttnanggggntnaatgggggccngccccaagggngggaattttnaaaaaancttttnccgggnttngtccnanaananattttggnnaccantttnaaangggcncttnttttgnccccccccnatngngggngannnccctnnnaanttnccccccangggaggnttttttnatttnannacannaaantctttnttttncctaaanggagttcctgttggggggttcccacn

SEQ ID NO: 9439 - DNA, 579 bp, Homo sapiens
  misc_feature 2, 3, 4, 5, 8, 14, 17, 20, 552: n = A,T,C or G
gnnnnagnggagantgntcncggttccgaccacgcgtccgctggctcttcagcttttgtgtcccgccccaccctcagggttcaagcctggtcattccaaagcagttaagtttccccaagcatgctttcaagttttgacaattgctgttacctttgcctgagataccccttcttggttacttgaacttttacttgtccttcaaagccctccaagtacctcctcctccaggaagccttcccaacccaccctctgagctttttattggagcactgatgatcctgggtcaataatgcctgatacacatttgtcttccccatgagactgagccccatgggaacaaaggctatgtctgattcattctgtgttcccagttcccagcacccagcacagggcttggcacaaagaaagggaggccccagggaggccagcggattaggcctgaacagggatcatccagcccatcctcccattcctcttccctggctgattctgtaactttccctaaagggaaaattggcttctgagataacctggctgcgggaagcagaaggnttgtcgtgagcagaagattgtgccatt

SEQ ID NO: 9440 - DNA, 1261 bp, Homo sapiens
  misc_feature 3, 7, 9, 11, 12, 14, 21, 32, 34, 35, 44, 45, 48, 50, 51,53, 57, 58, 59, 66, 67, 76, 86, 90, 100, 101, 104, 105,106, 111, 115, 118, 121, 128, 157, 174, 376, 417, 431, 458,462, 477, 488, 501, 506, 523, 529, 531, 532, 551, 559, 566: n = A,T,C or G
  misc_feature 569, 571, 576, 583, 594, 597, 618, 619, 632, 635, 644, 648,653, 657, 658, 670, 685, 704, 708, 719, 734, 747, 748, 758,760, 761, 775, 793, 799, 807, 824, 825, 829, 832, 835, 839,841, 861, 869, 871, 875, 880, 886, 890, 894, 904, 911: n = A,T,C or G
  misc_feature 915, 916, 928, 933, 937, 940, 948, 950, 961, 969, 971, 983,988, 994, 1017, 1021, 1022, 1027, 1039, 1044, 1048, 1049,1052, 1056, 1067, 1069, 1073, 1084, 1085, 1089, 1095, 1099,1103, 1126, 1130, 1132, 1133, 1140, 1141, 1143, 1150: n = A,T,C or G
  misc_feature 1151, 1156, 1164, 1170, 1178, 1179, 1192, 1193, 1197, 1201,1209, 1212, 1215, 1217, 1222, 1229, 1237, 1240, 1241, 1247,1256, 1257, 1258, 1259, 1261: n = A,T,C or G
tcntacntnanntnaaatatncataatacgtnanntgcattgcnngtntnntnactnnntgtgtgnnatataacanatatttgatnttcntatttatatnnttnnngagtnagtncgnttnttgattnactatagggcgaattggagctccacccgnggtggcggccgcccggncaggtacagtttagtcaggaagcagacattaaacacacatatacactcacaatgctaaaataaaataaagctgttaatttgatcaatgccaagaagaaaaagaatggggcttataagagaatacaacaagcggtgcaacttaaatgagggggcaggggagtatctgagaagccctctgtgagtgagtgactttttttttttnttttctttgagatggtgtcacactttgcctccaggctgaantggcagaaggtgcngatccagcctcactgcaaatatccatncctncaaagcaatttcccnctgccctcaanccctccccgaggntaacntgggggaccttttaggncagcantnnccacccacatcccttgggnttaaaaanttttttnttngntattntttttanaataacaaatnacngggggggtttttaaccccatnnttttgggcccaanganatgggggtncttnggatncttnntttggacccttngtgggttacccaacnttggcccttaggggcgttncccnaaaaaagtggnttgggggaattttanccggggcccatgnnagcccaaccngnngccccagggcccgnaggggggagttggaccanttttanattcttcnaaaaccttaaaattaanncttngcnaantttnangccccagggaaaaaaaaaanttttgggnanaagnagtgnttgccncaanaaanaaagaagaanattgccntttnnggggtttttggngaacncccnccnaatgagananagaagcacaanaaaaaatngnttttgaaggggnccccnactatnccctttggggcccgatttttaanaaanntaagngggatccccccncgggntttnnggngaanatttcgatttntnaacncttatttcaanntccncttccnaccntttnggggggggggggcccccgggaancccnanntttttgnntnccctttnnatggngggggtgntaaatnggcccccnntggggggaaaaanngggnacanaaactggnttnacntngtggnaaatttnttatcccnttnnaaattncccataaannnnan

SEQ ID NO: 9441 - DNA, 508 bp, Homo sapiens
  misc_feature 3, 5, 200, 209, 292, 306, 328, 329, 343, 349, 362, 371, 378,388, 455, 468, 471, 477: n = A,T,C or G
ggnancgcgaaacactactatagggcgaattggagctccccgcggtggcggccgaggtaccttcaatacctttagttgtctcccacacacgcgtgtgtgtgtgaaatcttctacaatatcttcccttttttagaccatgttcactgtcaaaaaggtgctttaagagcagtctttggctgggcacggtggctcacacccgnaatcccagnaccctgggaggccgaggcaggcggatcaccgaggtcaggagatcaagaccatcttggctaacaggatggtcttaagggacagngaaaccctgtcttnaacttaaaatacaaaaaattanntgggcgtggtgggnaccgcncctgtaatcccanctactcaangaggctnaaggcaggantaatcactttgaacctgggaggtagaggcttgcagttgagccaagattgcacccactgcactttcantcctgggccgaanaanagccanggactttcatttttaaaaaaaaaaaaaaaag

SEQ ID NO: 9442 - DNA, 831 bp, Homo sapiens
  misc_feature 518, 543, 567, 667, 685, 689, 695, 698, 700, 709, 710, 755,771, 777, 778, 791, 798, 800, 815, 820, 825, 826, 829: n = A,T,C or G
atagggcgaattggagctccaccgcggtggcggccgcccgggcaggtacgcggggaattcgcagtgatgtgaaactggcctcccaagccctgataagtaagttaaataagagtaggagccaggagggaggttctttactcttgaattaagagaaggggagttggaggtggctcaggtagagtgcgtaggtttgcagaactgggcctgtgtgtgtaaagtggctaaggcaaaggagtggaagtttgggagaagtttaagagaagaaatggacatgattgcctaaatcagccaaatacagggtctctacaggagaagacgagatcgccccgatagtttgagagtaaatgggttaccagaggaagagctaagcaacatggccaacgccctggccagcgccacttgcgagcgctgcaagggcggctttgcgcccgctgagaagatcgtgaacagtaatggggagctgtaccttggccgctctagaactagtggatcccccgggctgcaggaattcgatatcnaagcttatcgatacccgtccacctncgaggggggggcccggtaccccanctttttgtttccctttaggtgaggggtttaaattgcgccgctttggccgttaatcattggtccataagctggtttccctggtggtgaaaattggttattnccccttcacaaaatttcncacnaacatnccnanccccggggnngcattaaaagtgtaaaaacccttggggggccctaaatgaaggganccttactttaccattnatttgnngttggcgctttcnttgcccncntttttccaatcgggnaaccntgttnntgnct

SEQ ID NO: 9443 - DNA, 751 bp, Homo sapiens
  misc_feature 2, 3, 4, 5, 582, 644, 663, 671, 681, 719, 749, 750: n = A,T,C or G
gnnnngacgcgcgtaatacgactcactatagggcgaattggagctccaccgcggtggcggccgcccgggcaggtactttaggagacccaggcgggcagattgcctgaggtcaggagtttgagaccagcctggctaacatggtgaaaccctgtctctactaaaaatacaaaaattagccgggcatggtggctcacgcctgtagtcccaactgcttgggaggttgaggcaagagaatcgcttgaacccaggaggtggaggttgcagtgagccgagatcgcgccactgcactccagcatgggcgacagagcaagactccatctcaaaataaagaaagaaagaaacaaagaaaagaaaagcttatattgaacttctctaaaaaaagaaaaaaaagaaagcctgatgcacacaaatctaaatttggcaagtcgatcaattaaaggatatttatttgcatcacaaaataattctttactccccccaaaaatcaataaaaagttcaaatagcaacttttcctaatgtgtttaaaatgtaatcaccaaatacatgtgtccccaacttctttccagttataattctattgngtaaagtgaggtatacctgaagtgaggcaataaagagagttgagcttcaaacctgcctgganagagcgtgttcttttttanagtctgangaaatgggtnggggcccaaattctctcaatctttttcttttccctcancccgggctcttattttcttggctcaactgnnt

SEQ ID NO: 9444 - DNA, 622 bp, Homo sapiens
  misc_feature 17, 20, 23, 94, 482, 622: n = A,T,C or G
agtttaccccctttagnacnccncgtccgccctcgcgtccgaaaaacaaaaaaaacaccaaaaaacaaaaacaaacaaacaaaaaaacccacancccttatctggttctgaccagtgtgcgtgtaactttaaggtctgaggggaaaaatggcttttgggtttttgtttatttttttgataatgactggacatcggaagaggaaaaaactcaaaacaaaagcgagagagactattgccatatgaactcaaaagctaccatggtgttcactctacatatcaggttatggtgtctctagaatctgttgtttgtttcctataagatgctttgctgaacacatagcaaaattcatgtgacggatgataatattgattcgaaaagctggtcccccaggatctaatttcagaattcaacacccaaaccccgaacagatgggtttagggctggtgttatcagagctattggctttacttaacaatattgntcctgtccattcacccagccaaattgtgttaaagaagaaagccccacaaactaaaatagcctttcctgggaagaggaaggggaggtgggctggatctgtgactgattgaaatgcatgcaaataaaaaagacactattaan

SEQ ID NO: 9445 - DNA, 443 bp, Homo sapiens
  misc_feature 85, 95, 115, 138, 443: n = A,T,C or G
ggagctctcgtaataccactcactatagggcgaattggagctccaccgcggtggcggccgaggtacttcccagggctaccggcantcctggtgtngtccagagaggtgagattanatcttcttggttccctgtgaggnttcaggcactaaaactctatgtggggaagggaggggttactcctcctccaatgggactcaaggacttgacctccaggagtaggcccctggtcagaagtgccatctcaccagggggcttcattcttcctcattcatcctttatcatcctgtgttctgtttagttgcaacaatctcttgtgactaatgtcactcaaagcatcttgtaaatcctagggcttcctggaagttagttgccaaagtcatgcaagcatcacctgtcattcttgtgttggagttatagaattctacatcttataaaacctaan

SEQ ID NO: 9446 - DNA, 626 bp, Homo sapiens
  misc_feature 2, 344, 426, 507, 565, 626: n = A,T,C or G
gnccacgcgtccgcaaacagacaccatggtgcacctgtactcctgaaggaggaagtctgccgttactgccctgtggggcaaggtgaacgtggtatgaagttggtggtgaggccctgggcaggctgctggtggtctacccttggacccaggaggttctttgagtcctttggggatctgtccactcctgatgctgttatgggcaaccctaaggtgaaggctcatggcaagaaagtgctcggtgcctttagtgatggcctggctcacctggacaacctcaagggcacctttgccacactgagtgagctgcactgtgacaagctgcacgtggatcctgagaacttcangctcctgggcaacgtgctggtctgtgtgctggcccatcactttggcaaagaattcaccccaccagtgcaggctgcctatcanaaagtggtggctggtgtggctaatgccctggcccacaagtatcactaagctcgctttcttgctgtccaatttctattaaangttcctttgttccctaagtccaactactaaactgggggatattatgaaaggccttgancatctggattctgcctaataaaaaaacatttatttttattgcaaaaaaaaaaaaaaaaaan

SEQ ID NO: 9447 - DNA, 462 bp, Homo sapiens
  misc_feature 109, 116, 126, 130, 131, 138, 147, 223, 224, 236, 256, 406,432, 439, 446, 460, 461, 462: n = A,T,C or G
ctactatagggcgaattgggccctctagatgcatgctcgagcggccgccagtgtgatggatatctgcagaattcggcttatcagtggtcgcggccgaggtactcacagnggacggnggtttttggncccnnttctgancagcgcttnctttttgtccgacatcttgactgaggctgcggtgtctgctgctattctccgagcttcgcaatgccgcctaaggacnnacatggaagaangaaggacgctggaattgtcngccaagaaaggcaaagacccacttgaacaaatccgggggcaaggccaaaaagaacaagtggtccaaaggcaaagttcgggacaagctcaataacttagtctttgtttgacaaagctacctattgataaactctgtaaaggaaagttcccnactattaaacttataaccccacctgnggtcttntgaaganactgaaagattccnnn

SEQ ID NO: 9448 - DNA, 866 bp, Homo sapiens
  misc_feature 552, 557, 583, 584, 585, 586, 587, 588, 589, 590, 591, 592,593, 594, 595, 596, 597, 598, 599, 600, 601, 602, 603, 604,605, 606, 607, 608, 609, 610, 611, 612, 613, 614, 615, 616,617, 618, 619, 620, 621, 622, 623, 624, 625, 626, 627: n = A,T,C or G
  misc_feature 628, 629, 630, 631, 632, 633, 634, 635, 636, 637, 638, 639,640, 641, 642, 643, 644, 645, 646, 647, 648, 649, 650, 651,652, 653, 654, 655, 656, 657, 658, 659, 660, 661, 662, 663,664, 665, 666, 667, 668, 669, 670, 671, 672, 673, 674: n = A,T,C or G
  misc_feature 675, 676, 678, 679, 680, 681, 682, 683, 684, 685, 686, 687,688, 689, 690, 691, 692, 693, 694, 695, 696, 697, 699, 700,701, 702, 703, 704, 705, 706, 707, 708, 709, 710, 711, 712,713, 714, 715, 716, 717, 719, 720, 721, 722, 723, 724: n = A,T,C or G
  misc_feature 725, 726, 727, 728, 729, 730, 733, 734, 735, 736, 737, 738,739, 740, 741, 742, 743, 744, 745, 746, 747, 748, 749, 750,751, 752, 753, 754, 755, 756, 757, 758, 759, 760, 761, 762,763, 764, 765, 766, 767, 768, 769, 770, 771, 772, 773: n = A,T,C or G
  misc_feature 774, 775, 776, 777, 778, 779, 780, 781, 782, 783, 784, 785,786, 787, 788, 789, 790, 791, 792, 793, 794, 795, 796, 797,798, 799, 800, 801, 802, 803, 804, 805, 806, 807, 808, 809,810, 811, 812, 813, 814, 815, 816, 817, 818, 819, 821: n = A,T,C or G
  misc_feature 822, 823, 824, 825, 826, 827, 828, 829, 830, 831, 832, 833,835, 836, 837, 838, 839, 840, 841, 842, 843, 844, 845, 846,848, 849, 850, 851, 852, 853, 854, 856, 857, 858, 859, 860,861, 862, 863, 864, 865, 866: n = A,T,C or G
ggcgttatcactactatagggcgaattggagctccaccgcggtggcggccgaggtacgcgggggggtgaccttggttaatattcaccagcagcctcccccgttgcccctctggatccactgcttaaatacggacgaggacagggccctgtctcctcagcttcaggcaccaccactgacctgggacagtgaatcgacaatgccgtcttctgtctcgtggggcatcctcctgctggcaggcctgtgctgcctggtccctgtctccctggctgaggatccccagggagatgctgcccagaagacagatacatcccaccatgatcaggatcacccaaccttcaacaagatcacccccaacctggctgagttcgccttcagcctataccgccagctggcacaccagtccaacagcaccaatatcttcttctccccagtgagcatcgctacagcctttgcaatgctctccctggggaccaaggctgacactcacgatgaaatcctggagggcctgaatttcaacctcacggagattccggaggctcagatccatgaangcttncaggaactcctccgtccctcccgggnnnnnnnnnnnnnnnnnnnnnnnnnnnnnnnnnnnnnnnnnnnnnnnnnnnnnnnnnnnnnnnnnnnnnnnnnnnnnnnnnnnnnnnnnnnnnntnnnnnnnnnnnnnnnnnnnntnnnnnnnnnnnnnnnnnnnannnnnnnnnnnnatnnnnnnnnnnnnnnnnnnnnnnnnnnnnnnnnnnnnnnnnnnnnnnnnnnnnnnnnnnnnnnnnnnnnnnnnnnnnnnnnnnnnnnntnnnnnnnnnnnnnannnnnnnnnnnnannnnnnntnnnnnnnnnnn

SEQ ID NO: 9449 - DNA, 896 bp, Homo sapiens
  misc_feature 2, 3, 4, 5, 17, 571, 638, 644, 647, 668, 681, 698, 726, 743,747, 752, 755, 756, 760, 761, 782, 783, 795, 807, 813, 817,834, 857, 871, 874, 886: n = A,T,C or G
gnnnnatttttcacgantcactatagggcgaattgggccctctagatgcatgctcgagcggccgccagtgtgatggatatctgcagaattcgccctttcgagcggccgcccgggcaggtacgcgggggggcagtccagcagctaggcagctgagcagagcgcatctgcctggggccagtgaggagaatgcatctagacagagcttttcgtgctgctgagatctgttacctaaagcaataaaaaatggccagaggatcagtgtccgatgaggaaatgatggagctcagagaagcttttgccaaagttgatactgatggcaatggatacatcagcttcaatgagttgaatgacttgttcaaggctgcttgcttgcctttgcctgggtatagaagtacctcggcccgcgaccacgctaagggcgaattccagcacactggcggcccgttactagtggatccgagctcggtaccaagcttggcgtaatcatggtcataagctgtttcctgtggtgaaattggtatcccgctcaccaattccacacaacatacgagccggaaagcataaaatgttnaacctgggggtgcctaatgaagtgaacttactcacattaattgcgttgcgctcacttgccccttttncaatcnggnaacctgtcgtgccaacttcanttaatgaatcggnccaacccccccgggaanaggccgttttgccgtatttggggcgctntttcccctttccttggnttanttganttnncttnnccttcggtccgttcgggttgnnggggaagcggtntcaacttactcnaaaggngggntaataccggtttttccnaaaaattcaggggattaccccanggaaaaaaaatttnaancaaaaaggcccncaaaaggcct

SEQ ID NO: 9450 - DNA, 385 bp, Homo sapiens
  misc_feature 4, 11: n = A,T,C or G
actntagggcnaattggagctccaccgcggtggcggccgcccgggcaggtacagcacctgctctccaggaaccctgtgccagggattggtagaggggagtgccaggtgtggatgggggctttgccaaagggttcactgattggcttctcaatcgccgtgtctggcatttatgcttgattctgggagcatggacaatagccaagaagtctcttgccgccaggtatcccgggacagaaaggggaagaggcgggtggggtataggaaagttaggggtttcctgtgtgctcttgctacaacttgcaagatttcacctctcccctagagggagctgctagggaaacagcttgcagaaagtaaaatgggaagtctggcatggtggctcatg

SEQ ID NO: 9451 - DNA, 634 bp, Homo sapiens
  misc_feature 5, 409, 421, 442, 466, 479, 494, 507, 516, 566, 579, 580,608, 612, 613, 628: n = A,T,C or G
caatnaccctcactaaagggaacaaaagctgggtaccgggccccccctcgaggtcgacggtatcgataagcttgatatcgaattcctgcagcccgggggatccactagttctagagcggccgaggtacatccaaaaccataaggaaatattctgatgcccagatgatgaagactggggtgaattaagtccacacatttatttcaagttgttaaagagtttgtgggccacgcaatggtccctcgcatgcaagaagtcaaagagctcctccgtgcaatcctcttctgtatgtgatcgagaggatacaccctcatcacagagctctagcccctcccgggcctttacacatttctccaactgctcgcattgctttctcactgttgttaggggatccactaattcctcctcttnctctttctcctnctcaagatctccggattcggnaagcatcttttgctcgtcctccantcccatgtctggntaccggtttagattnaacacgagcaggnaacagcggngcctaaacccaatttaagatcaagaaagactttttaagggtcactcaacnggaaattcccccnngtacctggcccgggggggccgccacccncggnnggagctcccaatttncccttt

SEQ ID NO: 9452 - DNA, 614 bp, Homo sapiens
  misc_feature 2, 613: n = A,T,C or G
gnccccgcgtccggtccactccgacctttttctttgaacatgcatgctgctggaatatgtataaatcagaactagcagaagtagcagagtgatgggagcaaaataggcactgaattcgtcaactcttttttgtgagcctacttgtgaatattacctcagatacctgttgtcactcttcacaggttatttaagtttttgaagctgggaggaaaaagatggagtagcttggaaagattccagcactgagccgtgggccggtcatgagccacgataaaaaatgccagtttggcaaactcagcactcctgttccctgctcaggtatatgcgatctctactgagaagcaagcacaaaagtagacaaaagtattaatgagtatttcctttctccataagtgcaggactgttactcactactaaactctaccaagaatggaaacaaagaatattttctgaagatttttttgaagattaatttataccctataaaataaaacttgttagcttcgatgaagtcacttcatcttctctcctgccttatttttttaaataagtttttaggtcctgacactgacatcaaatacatgcacaccataaaggcatttccaccaccgtnc

SEQ ID NO: 9453 - DNA, 929 bp, Homo sapiens
  misc_feature 2, 3, 4, 5, 9, 11, 550, 575, 604, 612, 613, 625, 628, 630,631, 641, 642, 645, 653, 661, 667, 675, 679, 686, 701, 721,728, 744, 746, 747, 749, 763, 775, 778, 784, 798, 805, 807,811, 812, 819, 828, 841, 849, 869, 873, 874, 875, 877: n = A,T,C or G
  misc_feature 878, 881, 895, 906, 917, 920, 922, 928: n = A,T,C or G
gnnnnggcntngtaatacgtctactatagggcgaattggagctccaccgcggtggcggccgaggtacccaatagtggatgggaagctttccatccagtgctacttgcgggccttggatcgatgttacacatcataccgtaaaaaaatccagaatcagtggaagcaagctggcagcgatcgaccctccacccttgacgatttacagtacctgcccgggcggccgctctagaactagtggatcccccgggctgcaggaattcgatatcaagcttatcgataccgtcgacctcgagggggggcccggtacccagcttttgttccctttagtgagggttaattgcgcgcttggcgtaatcatggtcatagctgtttcctgtgtgaaattgttatccgctcacaattccacacaacatacgagccgggagcataaagtgtaaagcctggggtgcctaatgagtgagctaactcacattaattgcgttgcgctcactgcccgctttccagtcgggaaacctgtcgtgccagctgcattaatgaatcggccaacgcnccggggagaggcggtttgcgtattngggcgcttttccgctttcctttggttaanttgaattnngtttgggccttnggncnnttcgggtttnnggnaaagcggntttttaanttttantttaaaangggngggaaanaccggttttttcccnaaaaaaaaaagggggggatnccccccnggaaaaaaaaaatttngnncncaaaaagggccccnaaaaagggcccnggnaacccntaaaaaagggcccnttttttngngggnnttttttnaaaaggggnccccccccccctntggggggnttttaaaaaaaatttccccntttnnntnnaanggggggggggaaancccccccgggngttttttaaanaancnccccgnt

SEQ ID NO: 9454 - DNA, 597 bp, Homo sapiens
  misc_feature 4, 17, 104, 121, 127, 128, 129, 130, 131, 132, 136, 138,139, 140, 146, 147, 152, 156, 157, 158, 163, 165, 168, 169,170, 171, 180, 186, 188, 189, 191, 193, 194, 195, 196, 198,200, 201, 202, 203, 208, 212, 220, 221, 222, 228, 230: n = A,T,C or G
  misc_feature 233, 234, 235, 236, 237, 241, 242, 243, 251, 260, 266, 268,269, 270, 274, 278, 289, 290, 294, 300, 307, 309, 314, 318,320, 322, 323, 324, 329, 330, 331, 332, 334, 335, 338, 342,345, 346, 347, 349, 350, 352, 354, 357, 362, 365, 377: n = A,T,C or G
  misc_feature 378, 379, 380, 393, 400, 401, 405, 408, 409, 417, 418, 424,429, 431, 436, 440, 441, 453, 458, 459, 460, 463, 467, 468,469, 470, 471, 472, 473, 475, 481, 489, 490, 501, 502, 503,505, 507, 510, 514, 518, 519, 520, 523, 528, 529, 533: n = A,T,C or G
  misc_feature 534, 539, 540, 541, 542, 551, 554, 563, 564, 565, 566, 567,568, 572, 593, 596, 597: n = A,T,C or G
tcgncccacgcgtccgnttttttttttttttttttttttttttttttttttttttttttttttttttttttttttttttttttttttttttttttaaaaaaaanaggggtttttttttttnaaaaannnnnntttntnnncccccnnggggnaaannnctttnanttnnnntttttttanaaaaantnngntnnnnancnnnntaaancccnaaaaaaannngggggncnttnnnnnaaannntttttccnttttttttncccccntnnncccnaaanaaaaaaatttnntttncccccnttttttnanccccntttncntnnnaaaannnngnnggncccnttnnnannancnaanttaanccntttttttttttnnnnggggggggggggnccccccnngggnttnnttttaaanntttttnttttncnaaaantttnnttttttgggggnttttnnnggntttnnnnnnntntttttnaaaccccnnaaaaaaaaaannntncnaangggnaaannnggnccccnngggnnccccnnnnttaaaaaanggncccctttcnnnnnntttnaaaaaaattttttttttaaanggnn

SEQ ID NO: 9455 - DNA, 1246 bp, Homo sapiens
  misc_feature 23, 28, 34, 64, 68, 83, 287, 295, 303, 307, 309, 315, 318,319, 324, 328, 335, 336, 343, 349, 351, 360, 364, 370, 371,372, 374, 378, 382, 384, 392, 401, 402, 410, 412, 416, 419,422, 423, 439, 445, 451, 466, 469, 473, 478, 479, 481: n = A,T,C or G
  misc_feature 486, 493, 496, 497, 502, 504, 509, 512, 513, 515, 520, 525,526, 529, 537, 539, 542, 543, 551, 559, 560, 562, 564, 570,573, 574, 577, 581, 584, 588, 596, 609, 610, 616, 618, 619,620, 627, 628, 629, 630, 635, 636, 637, 638, 646, 647: n = A,T,C or G
  misc_feature 648, 649, 653, 660, 663, 669, 670, 671, 672, 679, 680, 682,683, 685, 688, 692, 700, 701, 702, 707, 709, 711, 713, 717,718, 721, 722, 725, 727, 729, 730, 731, 732, 735, 737, 739,740, 741, 744, 745, 748, 750, 753, 755, 757, 758, 761: n = A,T,C or G
  misc_feature 763, 764, 766, 771, 777, 781, 788, 790, 800, 802, 804, 807,809, 810, 812, 816, 824, 825, 826, 828, 829, 831, 833, 835,842, 843, 845, 847, 850, 854, 859, 865, 866, 867, 868, 870,873, 875, 877, 878, 879, 880, 883, 889, 890, 894, 900: n = A,T,C or G
  misc_feature 901, 902, 903, 904, 906, 908, 909, 910, 912, 913, 914, 915,920, 923, 925, 926, 927, 928, 929, 931, 932, 933, 937, 938,944, 946, 948, 949, 959, 966, 967, 968, 969, 970, 971, 973,975, 976, 978, 980, 988, 989, 990, 991, 992, 995, 996: n = A,T,C or G
  misc_feature 998, 999, 1002, 1008, 1009, 1010, 1011, 1012, 1013, 1017,1019, 1024, 1026, 1028, 1033, 1037, 1038, 1039, 1040, 1042,1043, 1048, 1050, 1052, 1053, 1054, 1057, 1058, 1059, 1062,1063, 1064, 1065, 1068, 1075, 1076, 1078, 1079, 1084, 1090: n = A,T,C or G
  misc_feature 1094-1095, 1097, 1100, 1108-1109, 1111, 1113, 1115,1120-1121, 1125-1126, 1128, 1130, 1133, 1135, 1137-1141,1146-1147, 1149-1150, 1153-1154, 1158, 1160, 1164-1165, 1168,1174-1175, 1177-1178, 1186-1187, 1189, 1191, 1194-1197, 1200: n = A,T,C or G
  misc_feature 1203, 1206-1207, 1210, 1212-1216, 1222-1223, 1225, 1228,1230-1235, 1241, 1246: n = A,T,C or G
ggggtatacatactcactaatangggcncttgtntcaaactttatgcatgctcgagccgccgcnagtntgatggatatctgcngaattcggctttcgagcggccgcccgggcaggtacctgactagtgttttatttgaaagggaaaaataaagaccaccccatgcattgtccatcccatgaggcagggctgggccatgccaagacaatctcaaggaatggaggtccctgagcctgggaagacatttgaactcagatgtatcgcctgatgctaggaagaggggctcantatggctnatctggangctntnccctangcnncgcangganacatgcnngacctancccgtncntcctccgcnccanccctannncnaatnccancnctctggcngtcgttctnntggatccnanctcngtncanncttggcgttttcttgntcattnctgttncctgttgtcaacttnttntccnctcannantcccnccttccnttnnacccngnaaccnttnntntccancctgnngtncccttctnanttnnctcaactncccctttnntncntttccnctnnttntccnttncccntccggganacctgtctcgccnnttcctntnnncaatccnnnnccccnnnnggaaaagnnnntttncgtttcnggncccttnnnngtcctcnncnntntanctcntctccccnnntcctncncngnttgnnccnnttncncnnnngcngncnnnttnnttncntcncntnnccntnntnccccnaccttntttnccccctntnccgctccctntncnctncnncngttncctttgtnnncnntngntnttcccgnncntnttntccntcgtngccccnnnntntcntnannnntcnctcggnnctcncttccnnnnntntnnntnnnnttttntcntnnnnncnnnttcnncccccntntnnccctttttcncccctcnnnnnntncnncntntccctccnnnnnctnncnnttntccccnnnnnntccntnccccncntnttttnattnnnntnntctcntncnnnccnnntcnnnntcncgctccnntnngtccncctctntccnntnccntctttccnntntntngctcnnctcnntntnccntntnnnnntcccnngnnttnncccncncccnnctncctccnncnnctttctcnntncnctnnnnctntcntgnnccngnnnnntccctnncnccntnnnnnnctcctntcttn

SEQ ID NO: 9456 - DNA, 613 bp, Homo sapiens
  misc_feature 2, 3, 16, 32, 38, 47, 545, 581, 601, 612: n = A,T,C or G
gnnccacgcgtccggnaacgggcagtgccggnacaggnatgtgcagnacacaactacgagctgggcgggcccatgaccctgcagcgccgagtccagcctagggtgaatgtttccccctccaagaaggggcccttgcagcaccacaacctgcttgtctgccacgtgacggatttctacccaggcagcattcaagtccgatggttcctgaatggacaggaggaaacagctggggtcgtgtccaccaacctgatccgtaatggagactggaccttccagatcctggtgatgctggaaatgaccccccagcagggagatgtctacacctgccaagtggagcacaccagcctggatagtcctgtcaccgtggagtggaaggcacagtctgattctgcccggagtaagacattgacgggagctgggggcttcgtgctggggctcatcatctgtggagtgggcatcttcatgcacaggaggagcaagaaagttcaacgaggatctgcataaacagggttcctgagctcactgaaaagactattgtgccttangaaaagcatttgctgtgtttcgttagcatctggctncaggacagaccttcaacttncaaattggatnt

SEQ ID NO: 9457 - DNA, 637 bp, Homo sapiens
  misc_feature 2, 3, 4, 5, 6, 7, 10, 11, 24, 32, 48, 73, 371, 376, 377,410, 548, 560, 561, 633, 636, 637: n = A,T,C or G
gnnnnnnggnnatgtgcctgctcnattattanagcttttacccaaaantcctcccatatatcctgttggcaanggtccccaaataccagtgggaatcttggtgggtttgtctcctcccactaacgttacctgttctctgactgggagatcgaatcctgagcttccaggtgttcctggggagagggaatcaatgtgcctccgggaacctatccctgagatggggctgtgggctggacagggaatgcctccattgtttatagggcccgggtccaggcccccttctcgtttcccgacacgggggtgccattctgatgaaattttgagtggcattgactagcccagttatttcctatattgcaatgagggcaaantcctnncattttttctggggtggggggctgcattataanatcccttctgcccaaaggtctgacggtattcttttttgaagtgtccgatttttccacaattataacattttcccattttaagatttgctccttggccgtttttaaatttgtccactactaaattaccttgcctttgancccaacattgtnnaacaatgaattcagttcccacatcttgacaaactttgaaaaaatttcccgaatttttttgtacatctcacanaann

SEQ ID NO: 9458 - DNA, 519 bp, Homo sapiens
  misc_feature 2, 3, 4, 5, 6, 7, 8, 10, 21: n = A,T,C or G
gnnnnnnnanaactactattnggcgaatggggccctctagatgcatgctcgagcggccgccagtgtgatggatatctgcagaattcgccctttcgagcggccgcccgggcaggtaccacatccctgtcattcaacaacttccccttccaagagggtgctgatcacagactttttactgtaatggggccaagaagagacagttacttaaactaatagagttctttttataacaagagactgcagatatcgctacagaaagaataccggttgtatgtttcctgaattattactaaaaacatttgtttaaatgtctcatatataaaggtgatggccttatctctgacaatgaattagggcctaaggagaaagcaaattggaacactgttaacattaaaaagtcagctagtctttgaaatactattataatactaccttggaagatacagcaactcaaatcttgttcacccaccagataagaaacaaagtagagggagcctcagctcttagggccaggctgcc

SEQ ID NO: 9459 - DNA, 650 bp, Homo sapiens
  misc_feature 12, 23, 30, 45, 46, 56, 57, 58: n = A,T,C or G
ttttttatacgnactacactctnagggttnaattgggccctctanngcatgctcgnnncggccgccagtgtgatggatatctgcagaattcggcttagcgtggtcgcggccgaggtcgcggcttgggggtcgaaggtccgggcggcgccgggtgcattccttccctaggtctctggcggctacgtatccgatcctgtcctgcgagcagggccctcgggcggccttgaccaaggcgacagtgaacacagtctgaagttccggcccaagacctgggcttgctggcaggagtcagctctgggcatctttggctttacggatttttaagtggccctttctccttgctctctgcagaaatgggcaagttcatgaaacctgggaaggtggtgcttgtcctggctggacgctactccggacgcaaagctgtcatcgtgaagaacattgatgatggcacctcagatcgcccctacagccatgctctggtggctggaattgaccgctacccccgcaaagtgacagctgccatgggcaagaagaagatcgccaagagatcaaagataaaatcttttgtgaaagtgtataactacaatcacctaatgcccacaaggtacctgcccgggcggccgctcgaaagccgaattccagcacactgg

SEQ ID NO: 9460 - DNA, 410 bp, Homo sapiens
  misc_feature 3: n = A,T,C or G
gcnattggagctccaccgcggtggcggccgaggtacgcgggggctgtagtggcttcgtcttcggtttttctcttccttcgctaacgcctcccggctctcgtcagcctcccgccggccgctctagaactagtggatcccccgggctgcaggaattcgatatcaagcttatcgatacccgtcgacctcgagggggggcccggtacccagcttttgttccctttagtgagggttaattgcgcgcttggcgtaatcatggtcatagctgtttcctgtgtgaaattgttatccgctcacaattccacacaacatacgagccgggagcataaagtgtaaagcctggggtgcctaatgagtgagctaactcacattaattgcgttgcgctcactgcccgctttccagtcgggaaacc

SEQ ID NO: 9461 - DNA, 439 bp, Homo sapiens
  misc_feature 439: n = A,T,C or G
ggattgtaatacgactcactatagggcgaattgggccctctagtatgcatgctcgagcggccgccagtgtgatggatatctgcagaattcggctttcgagcggccgcccgggcaggtccgagctctactgactcccaaaagagcgcccaagaagaaaatggccataagtggagtccctgtgctaggatttttcatcatagctgtgctgatgagcgctcaggaatcatgggctatcaaagaagaacatgtgatcatccaggccgagttctatctgaatcctgaccaatcaggcgagtttatgtttgactttgatggtgatgagattttccatgtggatatggcaaagaaggagacggtctggcggcttgaagaatttggacgatttgccagctttgaggctcaaggtgcattggccaacatagctgtggacaaagccaan

SEQ ID NO: 9462 - DNA, 634 bp, Homo sapiens
  misc_feature 605: n = A,T,C or G
ggagaccgcggcccggcaggacagctccagaatgaaaatgcggttcttggggttggtggtctgtttggttctctggaccctgcattctgaggggtctagagggaaactgacagctgtggatcctgaaacaaacatgaatgtgagtgaaattatctcttactggggattccctagtgaggaatacctagttgagacagaagatggatatattctgtgccttaaccgaattcctcatgggaggaagaaccattctgacaaaggtcccaaaccagttgtcttcctgcaacatggcttgctggcagattctagtaactgggtcacaaaccttgccaacagcagcctgggcttcattcttgctgatgctggttttgacgtgtggatgggcaacagcagaggaaatacctggtctcggaaacataagacactctcagtttctcaggatgaattctgggctttcagttatgatgagatggcaaaatatgacctaccagcttccattaacttcattctgaataaaactggccaagaacaagtgtattatgtgggtcattctcaaggcaccactataggttttatagcattttcacagatccctgagctggctnaaaggattaaaatgttttttgccctgggg

SEQ ID NO: 9463 - DNA, 884 bp, Homo sapiens
  misc_feature 5, 411, 503, 530, 559, 569, 579, 610, 625, 633, 666, 675,687, 691, 700, 721, 725, 744, 768, 773, 790, 809, 817, 833,849, 868, 872, 880, 883: n = A,T,C or G
ttttngtatcgcctcactatagggcgttttgggtaccggccccccctcgaggtcgacggtatcgataagcttgatatcgaattcctgcagcccgggggatccactagttctagagcggccgcccgggcaggtacaaggcagaccaggtatctttttatgctgtttttcctttactaagaaaagtattgcatcttgaaacaaaccatttcccagagtaagtgataaaaaataacactaaaaaaactttaaaggtgagtcacttacatcaccttgatgaagtaaaaaaataaaaagcagttggcactaagatagctaattccaaatatctgtgtctaaacaattttaaaaactgtttatttattttgtaagaatgtacctcggccgccaccgcggtggagctccagcttttgntccctttagtgagggttaattgcgcgcttggcgtaatcatggtcatagctggttcctgtgtgaaattggtatccgctcacaattccacacancatacgagcccggaagcataaagtgtnaaagcctggggtgcctaatgagtgagctnactcacattnattgcgttgngctcactggccgcttttcaagtcggggaaanctgccgggccactgnattaatgnatcggccaccccccgggagaggcgggttgggtntgggcgctntttcgctttctnggtnaatgactcnttggcttcggccgtccggttngggnagccggattaacttacttnaagggggtattccggtttccccanatcangggttacccccggaaanaccttgggccaaggccccnaaaggccnggacccgtaaaaggcnggttgtggggttttcntaggtccgcccctggcagntttnaaaatggnccna

SEQ ID NO: 9464 - DNA, 858 bp, Homo sapiens
  misc_feature 1, 4, 140, 495, 571, 578, 579, 585, 626, 630, 649, 652, 678,681, 688, 691, 732, 734, 746, 755, 759, 765, 783, 784, 802,803, 808, 815, 817, 819, 830, 838, 845: n = A,T,C or G
nagncgctaatcgactactatagggcgaattggagctccacccgcggtggcggccgcccgggcaggtacaagcagctcttcttagggggtgtggatcggcataagcagttctggcgctactttgctggtaacctggcgtncggtggggccgctggggccacctccctttgctttgtctacccgctggactttgctaggaccaggttggctgctgatgtgggcaagggcgccgcccagcgtgagttccatggtctgggcgactgtatcatcaagatcttcaagtctgatggcctgagggggctctaccagggtttcaacgtctctgtccaaggcatcattatctatagagctgcctacttcggagtctatgatactgccaaggggatgctgcctgaccccaagaacgtgcacatttttgtgagctggatgattgcccagagtgtgacggcagtcgcaaggctggtgtcctacccctttgacactgttcgtcgtaanaatgatgatgcagtccggcccctctagaactagtggatccccccggctgcaggaaattcgatatcaagcttatcgntaccgtnnacctcnaagggggggccccggtcccaacttttgttccctttaatgangggntaaattgcccccttggccnaancatggcaaaagtgttttcctgtgtgnaantggtatncgnttaaaaattcccacaaacatacgacccggaaacttaaaagngnaaagcctggggnggcctaatngagngactancttacaattaatgcgttnngctacttcccgttttcannccggnaaacttncntngcccctccttnatgaattngcccacncccggggaaggcg

SEQ ID NO: 9465 - DNA, 813 bp, Homo sapiens
  misc_feature 1, 2, 5, 6, 7, 8, 9, 694, 778: n = A,T,C or G
nnagnnnnntgattcgccagcgcgcaattaaccctcactaaagggaacaaaagctgggtaccgggccccccctcgagagtacttctagaattaattaaggcggggaaatatatttgtaaaagatgaaggctgtatctatttttttttctttttaaactggttcacttaaattcttttgaggatgggatgtatttttcttgctgttcagtgctttttccttttcatctgttgttctgtggtcacagtgaccttagctacatagcagactttcccaaatgtattgattacaaataaacagttgttacttagcaagacctgaaaatatgtctgcaggtttctccttgaagcaaatgtgtgggatcattgcatttccagaaatctgcctccttcaccctccgttgacagtatatgtcatgcctcactttcttctagctgagctttaaatcattagagcttaaattgtcagatcgttcattgcctttccagggttatttagtaaagtttgttgaaaacaaaaacgccttttcttggttcttttttcagttattttgaaggtccagcatcctgattaaatgtctgacacattaatgaatgaccagcagcagctttcagctcttaaaaagacacttatattttgattttacatgctgggtacctgttccattggtggcaaaatgcccactctccatcaganggggtcctccatttcttatccacaaaggactcctcacttttcaatttggcatgttactaaatggggtaccattaaaagccctgnggttagtgtcaaaaaaaaaaaaaaaaaaaaaaaaa

SEQ ID NO: 9466 - DNA, 878 bp, Homo sapiens
  misc_feature 3, 4, 8, 14, 18, 32, 45, 82, 109, 114, 540, 590, 639, 661,681, 701, 706, 724, 737, 755, 763, 766, 782, 794, 808, 833,840, 844, 845, 876: n = A,T,C or G
gtnnaatnaaaatntcanttttcaaactaccnggcgaattggagntccccgcggtggcggccgaggtacgcggggattgttnatcgaaattaacaccaggtggtgaatntagcnttttctaaggttgctcaggataaatcatttattaaataggtctgcttatcaggaggggcgtgaaggctcccaaaaggaaatgctggcactgggcccagaagccagggcctctaactcctggggttgatttcttcagtgaagttgcaccctacaaagggaatatggccaaagcggcactcaactgaaggctgatatcaggcgattagacagccatgcattctgcgtttgtctggaatggattgtagagagatggacttatatgaggactaccagtccccgtttgattttgatgcaagagtgaacaaaagctatctctacttgtctcctagtggaaattcatctccacccggatcacctactcttcagaaatttggtctgctgagaacagacccggtccctgaggaaggagaagatgttgctgccacnaatcagtgccacagagaccctctcggaaagaggagcaggaaagagctaanaagagaacttgcaaaggtagaaaaagaaatccagactctgtcttaagtngtagcagcaaaagagaagcatntagcagaaaatcaagccggnaaccttggaatcaaattttntaccnggacctaaaacagaacanttggccaaagggngggaaagacgttgaccancaaccatntgntttacaagaagacatnttgaaccttatnccaggctggacaanaaggcctaactctttttcggctggnggctcancatnnccaaaagctggaagaaggaaaaaactcccanct

SEQ ID NO: 9467 - DNA, 495 bp, Homo sapiens
  misc_feature 2, 10, 14, 289, 340, 457, 470, 483, 485, 495: n = A,T,C or G
gntttttgtngaancactactatagggcgaattgggccctctagatgcatgctcgagcggccgccagtgtgatggatatctgcagaattcggcttcgagcggccgcccgggcaggtacgagcaggagctcagtgatgacttgcatgtggagcgctaccgacagttctggaccaggaccaagaagtgaccgtggctccagccaccccgggacattgctaagatgggagggctgttcttaaatcactcgttcttgaagctgcaaaaaaaaaaaaaaaaaaaaaagcacctnggccgcgaccacgctaagccgaattccagcacactggcggccgttactagnggatccgagctcggtaccaagcttggcgtaatcatggtcatagctgtttcctgtgtgaaattgttatccgcttcacaattccacacaacatacgagcccgggaagcataaaagtgtnaaaccccgggggnggcttattgaggngngcctacctcn

SEQ ID NO: 9468 - DNA, 365 bp, Homo sapiens
cgtatacgactcactatagggcgaattggagctccaccgcggtggcggccgaggtacgcggggggaggcgaagaacgcaaagctgagaacatggacgttaatatcgccccactccgcgcctgggacgatttcttcccgggttccgatcgctttgcccggccgctctagaactagtggatcccccgggctgcaggaattcgatatcaagcttatcgataccgtcgacctcgagggggggcccggtacccagcttttgttccctttagtgagggttaattgcgcgcttggcgtaatcatggtcatagctgtttcctgtgtgaaattgttatccgctcacaattccacacaacatacgagccgggagc

SEQ ID NO: 9469 - DNA, 769 bp, Homo sapiens
  misc_feature 5, 6, 13, 14, 17, 18, 19, 43, 53, 122, 171, 240, 312, 328,372, 388, 554, 726, 732, 737, 746, 769: n = A,T,C or G
ttganncttgttnnccnnncttggtccgggctcggatccctantaacggccgncagtgtgctggaattcgcccttatactttcgggtgccatccacaaacttcatggatttagccctctgtnctcggagtttcccagacaccacaacctcgcagcctttggccccactctncatgatgaaccgcagcacaccatagcaggccctccgcacagcaagccctcctaggagtttgtaacgcanagactctgcctgggcaatggcacacagacctctagtggccaccttttcagcataaagctctacactgccctntggaaagccaaacctnttctgaactacagcagtcagttcccgaatccgccggcccttctnaccaagaacattctgngttctggtggctaagataatgatttctgtcctggttggtgtaactcgcacctcaactccagagtagccatcttcagccagctcccgagtaagaaactcattcagttcagctttgaagatgccatcaagcgacaaacttcctcttcttggatatttgcactggcatnttgacagcgaccgtaagggcgaattctgcagaaattcattacactggcgggcggtcgagcatgcatttaaagggcccaattcgccctataggtgaggcgtattacaattcactgggcggcggtttacaacgtctgactgggaaaaccctggcgttacccaacttaatcggcntggagnacatncccttttgncaggtggggtaatacgaaaaggn

SEQ ID NO: 9470 - DNA, 626 bp, Homo sapiens
  misc_feature 15, 16, 17, 18, 28, 47, 96, 566, 624: n = A,T,C or G
cgggccccccctcgnnnntacttctagnaattaattaacgcgggggnaagggaggagtggcaacatggcgtcttcgggagctggtgaccctctggnattctaagcgtggagaggccccgttcgctcagcgtatcgacccgactcgggagaagctgacacccgagcaactgcattccatgcggcaggcggagcttgcccagtggcagaaggtcctaccacggcggcgaacccggaacatcgtgaccggcctaggcatcggggccctggtgttggctatttatggttacaccttctactcgatttcccaggagcgtttcctagatgagctagaagacgaggccaaagctgcccgagcccgagctctggcaagggcgtcagggtcctaatctggatgggtattgatcatgtccaacctgctggagccccttcacatggtggatgatgccccatgaccctgtagaaattgaatcctgctcacaacattgttggccttcttactaaccttggaccgtgattgagcccaagaaaccagggacttacgcatttggccaatgtcaaaagaacanaactttgcccactgcacacttgctgtgtacaatgactgagccctttcttgtagtttgntt

SEQ ID NO: 9471 - DNA, 386 bp, Homo sapiens
gattgtaatacgactcactatagggcgaattgggccctctagatgcatgctcgagcggccgccagtgtgatggatatctgcagaattcgccctttcgagcggccgcccgggcaggtacgcgggggcaggcgcacttcctgaagctgaaggtcagcatagacaaagggcctcagaatcgcgcaggcgcaattgtgccctggttcgccaagatgtcgttcccaaagtataagccgtcgagcctgcgcactctgcctgagaccctcgacccagccgaatacaacatatctccggaaacccggcgggcgcaagccgagcggttggccataagagcccagctgaaacgagagtacgagacccgggctgttgagctgttcactgagtgttac

SEQ ID NO: 9472 - DNA, 470 bp, Homo sapiens
  misc_feature 16: n = A,T,C or G
tactatagggcgaatngggccctctagatgcatgctcgagcggccgccagtgtgatggatatctgcagaattcggcttagcgtggtcgcggccgaggtactggttagcccagcaagctgccaaggctatggcccccaccagcccccagatctaaatctactctccctccaaggcagcaaagcagaatcgggagcagtggagcagaaatgtgcaagcaccctgatctcactcccagctctgaccaaatacagaattttagagaacatctgaagacatcagactgcactgcgtatacatgttgaattcttcatttttgccatctttaactgtcatcactggggcagggaagtcctgttccagaagtacctgcccgggcggccgctcgaaagccgaattccagcacactggcggccgttactagtggatccgagctcggtaccaagcttggcgtaatcatggtcatagctgtt

SEQ ID NO: 9473 - DNA, 563 bp, Homo sapiens
  misc_feature 2, 4, 439, 454, 484, 551, 556: n = A,T,C or G
ancnttgagctccccgcggtggcggccgaggctaacaaggaaagcccctggagctcctgtaataagaatgtggttggaagatgcaaactgtggatgatcatcacctccattttcctaggtgtcattacagtgatcatcataggcttatgtcttgctgcagtaacttatgttgatgaagatgaaaatgaaatacttgaattatcatcaaacaaaacattcttcatcatgctgaagattccagaggagtgtgttgctgaagaggaattgcctcacctgctcaccgaaaggctcacagatgtgtacctcggccgctctagaactagtggatcccccgggctgcagggaattcgatatcaagcttatcgataccgtcgacctcgagggggggcccggtacccagctttttgttccctttaatggaggggttaattgccgcttngccgtaaatcatggncataagctggtttcctggtggggaaaaatngttattccgctcaccaattcccccacaacattaccgagcccgggagcataaaaagtggtaaagcccnggggnggcctaa

SEQ ID NO: 9474 - DNA, 946 bp, Homo sapiens
  misc_feature 444, 473, 491, 497, 501, 518, 546, 554, 557, 578, 579, 585,591, 594, 604, 610, 614, 616, 617, 618, 619, 623, 632, 638,641, 643, 644, 645, 648, 651, 653, 658, 663, 668, 669, 673,693, 697, 698, 700, 702, 706, 707, 712, 717, 718, 721: n = A,T,C or G
  misc_feature 722, 723, 724, 725, 729, 739, 740, 746, 747, 749, 750, 752,756, 759, 767, 768, 770, 774, 780, 784, 791, 795, 796, 802,803, 813, 818, 819, 820, 823, 824, 825, 826, 828, 832, 833,834, 836, 845, 851, 852, 853, 854, 867, 869, 870, 872: n = A,T,C or G
  misc_feature 875, 877, 882, 883, 886, 898, 901, 903, 904, 909, 912, 919,922, 923, 925, 928, 933, 935, 938, 945: n = A,T,C or G
ctatagggcgaattggagctccaccgcggtggcggccgcccgggcaggtaccacgatgtatagagcaacactggggtaaggtcactgtgggatggttgcctgctgagacctgtgcaaacgtaacacatgccaccatgccaaggatgtggcggaacaagcagccctaccaaggctgggcccccatggactttgtgcctgctgggagtttataggtctgtggggacataggatggccatatctgccagccaactagactggacattgtacctcggccgctctagaactagtggatcccccgggctgcaggaattcgatatcaagcttatcgataccgtcgacctcgagggggggcccggtacccagcttttgttccctttagtgaggggttaattgcgcgcttggcgtaatcatggtcatagcctggttcctgtgtgaaattgttntccgctcacaatttccacaccaacatacnagcccggggagcataaangcgttnaaangccctgggggttgcctnaaatgtagttgaagcctaactcacatgnaaattggncgntgggcgcctcaattgcccccnntttttncaattncgngaaaaccctngtcggngccnannnngttntttaaatgnaatttnggncnnncgnccncnggggnaaaanggcgnntttnggcgttaattggggcccctntttnncngntttnnattgnttcannttnnnnngcgnttggggcttnngaaccnnanncngcantgngtggcatnngngagnttcatncgtntctttcnttanngtctgnnatttctcggnttagnnncannnntntatnnngnggttgaccnccagannnnaaaaattttgacntnncnttntnttagnntgnattacgcgatcncanannatagngtntgtattnttnngnganttatntnttntgattgng

SEQ ID NO: 9475 - DNA, 745 bp, Homo sapiens
  misc_feature 3, 12, 18, 610, 664, 675, 696, 708, 709, 717, 718, 727: n = A,T,C or G
gtntcgagcctngtcccncacgcccgacggaagtgtaggttacggtctgagacatcaccgccaagctgggcatcggggagatggccgagactgaccccaagaccgtgcaggacctcacctcggtggtgcagacactcctgcagcagatgcaagataaatttcagaccatgtctgaccagatcattgggagaattgatgatatgagtagtcgcattgatgatctggaaaagaatatcgcggacctcatgacacaggctggggtggaagaactggaaagtgaaaacaagatacctgccacgcaaaagagttgaaggttgctaataatttatactggaatctggcatttttccaagccaagagaagatcgaatggctttttgcagctaactactatgtgtagacaggttttatattataaagtatgcattcttatcacctagtatatagttagtttgtagagtgatttccccccagtttcttgaacatggtatcttcacatcttggaccttggtcagttgtgctattcattattaaacactaaaactttggcggttcttgcataacattgtcagattttttagtgtattgctgtgaagtcatttttttcttgncattccttttgtagtagttgctggttggataaaagttgatgtgtgattttttantaaaccaaatngtaacccttcaatatagttangcttggtgaaannagatgttnnagactttanagtctttaattcttggcc

SEQ ID NO: 9476 - DNA, 522 bp, Homo sapiens
  misc_feature 2, 6, 10, 43: n = A,T,C or G
gntgangccncgcgtccggtttttccttttgtatctgcaatantgggatggtattgttttcatgagcttctagaaatttcacttgcaagtttatttttgcttcctgtgttactgccattcctatttacagtatatttgagtgaatgattatatttttaaaaagttacatggggcttttttggttgtcctaaacttacaaacattccactcattctgtttgtaactgtgattataatttttgtgataatttctggcctgattgaaggaaatttgagaggtctgcatttatatattttaaatagatttgataggtttttaaattgctttttttcataaggtatttataaagttatttggggttgtctgggattgtgtgaaagaaaattagaaccaccgctgtatttacatttaccttgggtagtttatttgtggatggcagttttctgtagttttggggactgtggtagctcttggattgttttgcaaattacagctgaaatctgtgtcatggattaaactggc

SEQ ID NO: 9477 - DNA, 828 bp, Homo sapiens
  misc_feature 527, 599, 604, 606, 610, 629, 632, 642, 666, 673, 685, 691,695, 698, 759, 771, 784, 790, 798: n = A,T,C or G
ggcgaattggagctccaccgcggtggcggccgaggtacgcgggagagtgttcaaagcaggcccgagccgcctggataccgcagctaggaataatggaataggaccgcggttctattttgttggttttcggaactgaggccatgattaagagggacggccgctctagaactagtggatcccccgggctgcaggaattcgatatcaagcttatcgataccgtcgacctcgagggggggcccggtacccagcttttgttccctttagtgagggttaattgcgcgcttggcgtaatcatggtcatagctgtttcctgtgtgaaattgttatccgctcacaattccacacaacatacgagccgggagcataaagtgtaaagcctggggtgcctaatgagtgagctaactcacattaattgcgttgcgctcactgcccgctttccagtcgggaaacctgtcgtgccagctgcattaatgaatcggccaacgcgcggggagaggcggtttgcgtattgggcgctcttccgcttnctcgctcacttgactcgctgcgctcggtccgttcggctgcggcgagcggtatcaactcactcaaaggcggtnatacngntatncacagaatcagggggattnacnccaggaaaanaacatgtgagccaaaaggccaccnaaaaggncaggaacccgtnaaaaangccncgnttgctggcgttttttccataaggcttccgccccctggccgaacattacaaaaaaatcgacncctcaagtcaanaggggggcgaaanccccgncaggactnttaaagaaacccagggcgttttcccctggg

SEQ ID NO: 9478 - DNA, 476 bp, Homo sapiens
gtaatacgactcactatagggcgaattggagctccccgcggtggcggccgaggtactgtgcgttgtatttcttcattctctggcaggctgggagtccaaggtcagtctaggcaggagggctgcttggcctaagcagtcacacaattttcaccgtcttgagcatatctgacaagacatacgtgtcatcccaacccctcccaggcttcctcagggtccgctccaaagcctgggctgtttctaggagctctggtgtggcaagtttttgctcagggtgcagctgacagaacaggatctcattcacttcaccctcaattcgccggacatataggagggggaacactgccttgagcccagccagcactgagtcttttagccccaagtctcggcacacaaggttgagaataaaaacaccttcaggagtcaagatgcttttaaccttctgtagaaaagattgctccacaaatgctgggggcgga

SEQ ID NO: 9479 - DNA, 877 bp, Homo sapiens
  misc_feature 545, 581, 585, 590, 674, 679, 680, 681, 685, 688, 720, 724,728, 734, 737, 738, 741, 746, 747, 752, 756, 766, 771, 778,782, 793, 794, 795, 807, 811, 812, 818, 823, 825, 840, 841,849, 858, 860, 871: n = A,T,C or G
cgtaatacgactactatagggcgaattggagctccaccgcggtggcggccgaggtactcaggggaggccaggaaggccttgagcttgggccgggcgctgaggcgccccacatatgctgagagcagggggaacgcatccaggcagccaggggctaggacctcatggatcagcagcaagtccagcaggttgtagtcagcgaaggagatctggtctcccacaatgaaggtcttgcctccctggttctgggacagcagggtctcaaaaggcttcagttgcccgggcagtgccttcacatagtcatccttgcccgcctcatagttggtgtagatgagggagacgtatttgcagcggaggtcctccacgccgtcattcaccatgtccaccagggctgcctcctgctggtccttcccatagagcccaagggtgcggcccaggtgacgcaggatggtattggactggtacctgcccgggcggccgctctagaactagtggatcccccgggctgcaggaattcgatatcaagcttatcgataccgtccacctcnagggggggcccggtacccaacttttggttcctttantganggttnaattgccgcttggcgtaaatcatgggcatagctgttttccttgtggggaaaattttttttccttcacaaatttccaccacaaanaatannnaaanccngggagccattaaaaaggtaaaagccccggggnggcnttanttgaanggnngcntaccnnccccntttntttggggttngggcnccacttncccnccttttttaannngggaaaaaaacncttnncccccnttttntnttaaaaaaacccccnnaccccccngggaaaaangnttttttttttnttggcc

SEQ ID NO: 9480 - DNA, 496 bp, Homo sapiens
  misc_feature 1, 6, 392, 459: n = A,T,C or G
ngggcnaattggagctccccgcggtggcggccgaggtacgcgggggcagctgccaagcactccctccctggcttcagggtcagagtgcccagcgtttatcagaggcagcatccaagcccagagccagtgtcgactcttcggctggtgcctttcctctgaggggctatcaatgtgtagataaagccctgagtaggcaagagcagtgagatccactgctatggtcttgatacatcctcaaactttcccttcccagcacagaggaatattggctggcatgcaacctgcaaaagaaaaatgccgaagcggccgctctagaactagtggatcccccgggctgcaggaattcgatatcaagcttatcgataccgtcgacctcgagggggggcccggtncccagcttttgttccctttagtgaggggttaattgcgcgcttggccgtaatcatggtcatagctgtntcctgtgtgaaatttgttatcccgctcacaattccac

SEQ ID NO: 9481 - DNA, 639 bp, Homo sapiens
  misc_feature 2, 11, 36, 541, 549, 550, 583, 638: n = A,T,C or G
gnagttttatncagtcccacgcgtccggaagagtcnccttgcgaccgtatccgctagcgcggcctgggatgcgcttgggctccctgttcgttcccacatgcagggcagcacaaggagaatgggcgtcatgactgatgtccaccggcgcttcctccagttgctgatgacccatggcgtgctagaggaatgggacgtgaagcgcttgcagacgcactgctacaaggtccatgaccgcaatgccaccgtagataagttggaggacttcatcaacaacattaacagtgtcttggagtccttgtatattgagataaagagaggagtcacggaagatgatgggagacccatttatgcgttggtgaatcttgctacaacttcaatttccaaaatggctacggattttgcagagaatgaactggatttgtttagaaaggctctggaactgattattgactcagaaaccggctttgcgtcttccacaaacatattgaacctggttgatcaacttaaaggcaagaagatgaggaagaaggaagcggaacangtgctcannaagttttgttcaaaacaagtggcttgattgaanaaggagggggagtttacccttcaccgggcggccatcctggagatggaacaatacnt

SEQ ID NO: 9482 - DNA, 416 bp, Homo sapiens
  misc_feature 8, 160, 170, 184, 186, 225, 230, 311, 326, 410: n = A,T,C or G
agccctanatacttagggcaattggagctccccgcggtggcggccgaggtactttttttttttttttttttttttttttgttttttaaaaccagaacatttattgcatgactaatcgttgacattcttaagatgaactggatgctgcaacagctgccctnttgggtttangtgttgttccttcnanggaatccatgcctgaatctgcggtatacaatttttaggngcctnattcgaccagttccggtggtatttcgtcttttagccttggcactccagttatactttctcttgcgcttggcagggtagccncatttgccacaggtncgacttctgaaggtggtaggccttagagccacagcggcggcacaacgtgtgcgttttattgcgacgctttccaaacgatgaccnttccct

SEQ ID NO: 9483 - DNA, 632 bp, Homo sapiens
  misc_feature 542, 558, 559, 563, 564, 584, 586, 588, 605, 606, 623, 625,628, 629: n = A,T,C or G
gcaatacgactactatagggcgaattggagctccaccgcggtggcggccgcccgggcaggtaccctgagcatcagcagagatgccgagatgaaatcagggaactcctaggggatgggtcttctattacctgggaacacctgagccagatgccttacaccacgatgtgcatcaaggaatgcctccgcctctacgcaccggtagtaaacatatcccggttactcgacaaacccattacttttccagatggacgctccttacctgcaggaataactgtgtttatcaatatttgggctcttcaccacaacccctatttctgggaagaccctcaggtctttaaccccttgagattctccagggaaaattctgaaaaaatacatccctatgccttcataccattctcagctggattaaggaactgcattgggcagcattttgccataattgagtgtaaagtggcagtggcattaactctgctccgcttcaagctggctccagaccactcaaggcctccccagcctgttcgtcaagttggcctcaagtncaagaatgggaatccnntgtnnttgcaaaaaaaaggtttggntnanttttaagacccccttcnngtttaggaaattttatngnggnnccc

SEQ ID NO: 9484 - DNA, 831 bp, Homo sapiens
  misc_feature 604, 803, 830: n = A,T,C or G
gactcactatagggcgaattggagctccccgcggtggccgagcggccgcccgggcaggtacgcggggacacaagcaaacaaaataaatatctgtgcaatatatctgctttatgcactcaagcagagaagaaatccacaaagactcacagtctgctggtgggcagagaagacagaaacgacatgagcacagcaggaaaagtaatcaaatgcaaagcagctgtgctatgggaggtaaagaagcccttttccattgaggatgtggaggttgcacctcctaaggcttatgaagttcgcattaagatggtggctgtaggaatctgtcgcacagatgaccacgtggttagtggcaacctggtgaccccccttcctgtgattttaggccatgaggcagccggcatcgtggagagtgttggagaaggggtgactacagtcaaaccaggtgataaagccatcccgctctttactcctcagtgtggaaaatgcagagtttgtaaaaacccggagagcaactactgcttgaaaaatgatctaggcaatcctcgggggaccctgcaggatggcaccaggaggttcacctgcagggggaaagcccattcaccacttncttggcaccagcaccttctcccagtacctcggccgctctagaactagtggatcccccgggctgcaggaattcgatatcaagcttatcgataccgtccgaccctcgagggggggccccggtaccccaactttttgttccctttaagtgaggggttaattgcgccgcttggcgtaatcaatggtcattactggtttcctgngtgaaattggttatccgctcccaattnt

SEQ ID NO: 9485 - DNA, 541 bp, Homo sapiens
  misc_feature 1, 15, 201, 202, 203, 205, 206, 209, 215, 221, 231, 232,233, 234, 237, 238, 240, 242, 243, 244, 248, 250, 252, 253,261, 262, 268, 273, 281, 282, 288, 289, 300, 301, 303, 314,315, 316, 324, 325, 327, 330, 334, 335, 336, 339, 344: n = A,T,C or G
  misc_feature 353, 354, 355, 362, 365, 366, 373, 375, 382, 383, 384, 385,389, 390, 394, 395, 401, 407, 412, 420, 428, 435, 456, 467,469, 470, 477, 481, 486, 487, 488, 492, 503, 535, 539, 540,541: n = A,T,C or G
natcttagggagtcncccacgcgtccgggacgcgtgggtgcgtcggcctcggagggtgaaatggagtgtgggcaggagctgaaggaggaagggggcccgtgcttgttcccgggctcagacagttggcaagaaaaccccgaggagccctgttccaaagcctcctggaccgtccaagaaagcaaaaaaaaaaaaaaaaaaagnnngnnccntttatntttttnaaaaaaaaannnnccnncncnnncccntnanntttaaaannaaaaanaaacncagtgggnntgaaannttttttttttnnanttttttggggnnnaaaaaaannanttntttnnnaantttanaaaaaaaannnttttttnccnnggttttnanggggggnnnngccnncctnnaaaggntttttnaaagnggggggancccggggnccccacntaaaaaaaattttttttccgnttttttgcccnannacccccncccntcggnnntttngtttggggggngggggtttcttttttttaaagggggggttttntttnnn

SEQ ID NO: 9486 - DNA, 416 bp, Homo sapiens
  misc_feature 5: n = A,T,C or G
gagcnccccgtaatacgactcactatagggcgaattggagctccaccgcggtggcggccgtttgagaagccagcgctcacccacccggggtctctgtgcattgacctttgggtgctgacttggagaaaagcacaaacacgaccagtcccatcctggctcccgtggggcttcttctatctacgcattgtatcgactgcattagttggactaagatgatgactcagttaaaggaggagacaaatgctgactgtctaagcaagaatggcccaagctggcaagaaaaagcacactgcatacataggatacagaagggcagagcttctgcctgcggatctgcaacattcccgcgtacctgcccgggcggccgcgctctagaactagtggatcccccgggctgcaggaattcgatatcaagc

SEQ ID NO: 9487 - DNA, 629 bp, Homo sapiens
  misc_feature 31, 47, 543, 613, 620: n = A,T,C or G
gtcgcccagcgtccgcccacgcgtccgcggncgcgtgggcttccagnaccctggtgatgctagaaacagttcctcggtagtggagaggtttacacctgccaagtggagcacccaagcgtaacgagccctctcacagtggaatggagtgcacggtctgaatctgcacagagcaagatgctgagtggagtcgggggctttgtgctgggcctgctcttccttggggccgggctgttcatctacttcaggaatcagaaaggacactctggacttcagccaacaggattcctgagctgaagtgcagatgacaatttaaggaagaatcttcttccccagctttgcaggatgaaaagctttcccgcctggctgttattcttccacgagagagggctttctcaggacctagttgctactggttcagcaactgcagaaaatgtcctcccttgtggcttcctcagttcctgcccttggcctgaagtcccagcattgatggcagcgcctcatcttcaacttttgtgctcccctttgcctaaaccctatggcctnctgtgcatctgtactcaccctgtaccacaaacacattacattattaaatgttttctcaaagatggagttnaaaaaanaaaaaaaac

SEQ ID NO: 9488 - DNA, 453 bp, Homo sapiens
  misc_feature 2, 3, 4, 5, 6, 9, 10, 11, 13, 14: n = A,T,C or G
gnnnnnggnnngnnggcgcgctatacgactactatagggcgaattggagctccaccgcggtggcggccggggaaggtcagcgccgtaatggcgttcttggcgtcgggaccctacctgacccatcagcaaaaggtgttgcggctttataagcgggcgctacgccacctcgagtcgtggtgcgtccagagagacaaataccgatactttgcttgtttgatgagagcccggtttgaagaacataagaatgaaaaggatatggcgaaggccacccagctgctgaaggaggccgaggaagaattctggtacctcggccgctctagaactagtggatcccccgggctgcaggaattcgatatcaagcttattcgataccgtcgacctcgagggggggcccggtacccagcttttgttccctttagtgagggttaattgcgcgcttggccgtaatcatgg

SEQ ID NO: 9489 - DNA, 809 bp, Homo sapiens
  misc_feature 3, 4, 8, 24, 656, 770, 775: n = A,T,C or G
ganngtcnctttgggtgtcgaccncgcgtccgcaactgtgttactagcaacctcaaacagacaccatggtgcacctgactcctgaggagaagtctgccgttactgccctgtggggcaaggtgaacgtggatgaagttggtggtgaggccctgggcaggctgctggtggtctacccttggacccagaggttctttgagtcctttggggatctgtccactcctgatgctgttatgggcaaccctaaggtgaaggctcatggcaagaaagtgctcggtgcctttagtgatggcctggctcacctggacaacctcaagggcacctttgccacactgagtgagctgcactgtgacaagctgcacgtggatcctgagaacttcaggctcctgggcaacgtgctggtctgtgtgctggcccatcactttggcaaagaattcaccccaccagtgcaggctgcctatcagaaagtggtggctggtgtggctaatgccctggcccacaagtatcactaagctcgctttcttgctgtccaatttctattaaaggttctttgttccctaagtccaactactaaactgggggatattatgaagggccttgagcatctggattctgctaataaaaaacatttattttcattgcaaaaaaaaaaaaaaaanggcgggccgtagactagtctagaagaaaaaacttccaaaccttccccttgaaccttgaaacataaaatgaatgcaattggtggtggtaacttggttaattggaacttaataatnggttncaaataaagcaatagcattccaaatttcacaaat

SEQ ID NO: 9490 - DNA, 683 bp, Homo sapiens
  misc_feature 519, 578, 610, 615, 650, 670: n = A,T,C or G
ggcgaattggagctccaccgcggtggcggccgaggtacgcgggatttatcacatagccccttagccagttgtatattattcttgtggtttgtgacccaattaagtcctactttacatatgctttaagaatcgatgggggatgcttcatgtgaacgcgggagtcagccgcatcttcttttgcgtcgccagccgagccacatcgctcagacaccatggggaaggtgaaggtcggagtcaacggatttggtcgtattgggcgcctggtcaccagggctgcttttaactctggtaaagtggatattgttgccatcaatgaccccttcattgacctcaactacatggtttacatgttccaatatgattccacccatggcaaattccatggcaccgtcaaggcttgagaacgggaagcttgtcatcaatggaaatcccatcaccatcttccaggagcgagatccctccaaaatcaagtggggcgatgctggcgctgagtacgtcgtggagtccactggcgtcttnaccaccatgggagaaggctggggctcatttgcaggggggagccaaaagggtcaatcatntctgccccctctgctgatgcccccatgttcgntcatngggtgtgaaccatgagaagtattgaacaaacaagncctccaaggaatcatcaagnattgcctttctgc

SEQ ID NO: 9491 - DNA, 405 bp, Homo sapiens
  misc_feature 5, 405: n = A,T,C or G
gagcnctccgtaatacgactcactatagggcgaattggagctccaccgcggtggcggccgaggtaccctatgctgggctctgtgctgagagaccccagtttcttctccaacccccaggacttcaatccccagcacttcctgaatgagaaggggcagtttaagaagagtgatgcttttgtgcccttttccatcggtaagagaccactgtttgctgccaggccacggctcacaccagcaggggcctccctcaccctcctcccctctctgcggtgtagcctggtatttctccagcttggaagttcctgttagaatctacccttgagccagcagctgatacttccttaactaccaagcacccagtacctgcccgggcggccgctctagaactagtggatcccccgggcn

SEQ ID NO: 9492 - DNA, 451 bp, Homo sapiens
  misc_feature 414: n = A,T,C or G
ggagctccacccgcggtggcggccgtgcatagactagtcagcttctggggtgactagagcagggctgttgtctccacaagcttcagccgtgcgtggactggtcagcttccggagtgaccagagcagggctgttgtcatctcactggcaccttggttccatcgtaggatcagctgggttgcatggtctaggtcctgttggctggtccacttgtcctgggctgctggtttcagctgactggatggatggatccaaggcacaattcctgcaacatttctaggcttccagtgggtcctggcgtcttagctgtggatctcccaatacctgcaggtaacgaggccacagaagctgggcctctaggagcagaagacacagagcagtgaagactacaccagaagctccggctgccgccaganacaaaggccccgccccccgcgtacctcggccgctcta

SEQ ID NO: 9493 - DNA, 587 bp, Homo sapiens
  misc_feature 13, 14, 41, 83, 91: n = A,T,C or G
ccccgcgtccganntgatgagatgaatgtgaaggtgctggnactttgagcactttctgcccatgctgcagacagtggccaagnaacaaggnaccagggcacctatgaggattatgtcgaaggacttcgggtgtttgacaaggaaggaaatggcaccgtcatgggtgctgaaatccggcatgttcttgtcacactgggtgagaagatgacagaggaagaagtagagatgctggtggcagggcatgaggacagcaatggttgtatcaactatgaagcgtttgtgaggcatatcctgtcggggtgacgggcccatggggcggagctcgtccgcatggtgctgaatggctgaggaccttcccagtctccccagagtccgtgcctttccctgtgtgaattttgtatctagcctaaagtttccctaggctttcttgtctcagcaactttcccatcttgtctctcttggatgatgtttgccgtcagcattcaccaaataaacttgctctctgggaaaaaaaaaaaaaaaaaaaaaagggcggccgctagactagtctagagaaaaaacctcccacaccttcccctgaacctgaa

SEQ ID NO: 9494 - DNA, 605 bp, Homo sapiens
  misc_feature 7, 121, 124, 125, 321, 387, 395, 512, 519, 568, 572, 583: n = A,T,C or G
gtcgttncgggtcgccccgcgtccgctctagggtgataccgtgggtgagaaaggtcctggtccgcgccagagcccagcgcgcctcgtcgccatgcctcggaaaattgaggaaatcaagganctnnctgctcacagcccgacgaaaggatgccaaatctgtcaagatcaagaaaaataaggacaaccgtgaagtttaaagttcgatgcagcagatacctttacaccctggtcatcactgacaaagagaaggcagagaaactgaagcagtccctgccccccggtttggcagtgaaggaactgaaatgaaccagacacacttgnttggaactgtattatattaaaatactaaaaatcctaaaaaaaaaaaaaaaaagggcggccgttaanactagttntagagaaaaaacctcccacacttcccctttgaacctgaaacataaattgaatgcatttgttgttgttaacttgttttattggcagcttataaggggttacaaataaagcaattagcntcacaantttcacaaataaaagcatttttttcactggcttctagttgggggtttgnccanctcatcaatgnatcttatcatggttgggatccc

SEQ ID NO: 9495 - DNA, 866 bp, Homo sapiens
  misc_feature 6, 545, 641, 665, 681, 689, 752, 758, 790, 822, 838, 842,844, 845, 850: n = A,T,C or G
gttgtntacgactcactatagggcgaattgggccctctagatgcatgctcgagcggccgccagtgtgatggatatctgcagaattcgcccttagcgtggtcgcggccgaggtacgcgggtgagtcacgcttcctgattcctcggcgcaaaggagacgtttatcctttcaaattcctgccttccccctccttttgcgcacacaccaggtttaatagatcctggcctcagggtctcctttctttctcacttctgtcttgaaggaagcatttctaaaatgtatcccctttcggtccaacaacaggaaacctgactggggcagtgaaggaagggatggcatagcgttatgtgtaaaaaacaagtatctgtatgacaacccgggatcgtttgcaagtaactgaatccattgcgacattgtgaaggcttaaatgagtttagatgggaaatagcgttgttatcgccttgggtttaaattatttgatgagttccacttgtatcatggcctacccgaggagaagaggagtttgttaactgggcctatgtagtancctcatttaccatcgtttgtattactgaccacatatgcttgtcactgggaaagaagcctgtttcagctgcctgaacgcagtttggatgtctttgangacagacattggccggaaactcantctatttattcttcancttgcccntactggcactgatattggtaatggtcttttttgaaaaatgtttgtacctgcccgggcggccgntcgaanggcgaattccagacactggcggccggtctaantggatccgaactcggtccaaacttggcgtaancatggcatagctgttnctgngnnaaatngtatccgtccaattcc

SEQ ID NO: 9496 - DNA, 616 bp, Homo sapiens
  misc_feature 12, 603: n = A,T,C or G
actactataggncgaattggagctccaccgcggtggcggccgaggtacttatgtggtattcggcggagggaccaagctgaccgtcctgggtcagcccaaggctgccccctcggtcactctgttcccgccctcctctgaggagcttcaagccaacaaggccacactggtgtgtctcataagtgacttctacccgggagccgtgacagtggcctggaaggcagatagcagccccgtcaaggcgggagtggagaccaccacaccctccaaacaaagcaacaacaagtacctgcccgggcggccgctctagaactagtggatcccccgggctgcaggaattcgatatcaagcttatcgataccgtcgacctcgagggggggcccggtacccagcttttgttccctttagtgagggttaattgcgcgcttggcgtaatcatggtcatagctgtttcctgtgtgaaattgttatccgctcacaattccacacaacatacgagccgggagcataaagtgtaaagcctggggtgcctaatgagtgagctaactcacattaattgcgttgcgctcactgcccgctttccagtcgggaaacctgtcgtgccanctgcattaatgaa

SEQ ID NO: 9497 - DNA, 410 bp, Homo sapiens
tacgactactatagggcgaattgggccctctagatgcatgctcgagcggccgccagtgtgatggatatctgcagaattcgccctttcgagcggccgcccgggcaggtacgcgggggttctgaagcggcggccagagaagagtcaagggcacgagcatcggccatgcctttcttggacatccagaaaaggttcggccttaacatagatcgatggttgacaatccagagtggtgaacagccctacaagatggctggtcgatgccatgcttttgaaaaagaatggatagaatgtgcacatggaatcggttatactcgggcagagaaagagtgcaagatagaatatgatgatttcgtagagtgtttgcttcggcagaaaacgatgagacgtgcaggtacctcggccgcgaccac

SEQ ID NO: 9498 - DNA, 853 bp, Homo sapiens
  misc_feature 3, 4, 5, 6, 7, 8, 592, 642, 647, 660, 665, 675, 695, 709,725, 728, 744, 765, 778, 792, 807, 819, 831, 852: n = A,T,C or G
ggnnnnnngtatacgactcactatagggcgaattgggccctctagatgcatgctcgagcggcccgccagtgtgatggatatctgcagaattcggcttagcgtggtcgcggccgaggtacctgtcatttgcctttgagcattgtcaccgttctagtcagaagaacaaaaggatgattctgatctatttgcttccagtaaaaatgctattgggtcacatgcccactgtggagctcctgaaaaagtatcacctgatgcagtttgcggaagtaaccagagctgtgagcgagggcaacctgctgctgctgcacgaggcgctggcgaagcacgaggccttcttcattcgctgcggaatcttcctcatcctggagaagctgaagatcatcacctacaggaacctctttaagaaagtgtatttgttactgaaaacacaccagctgtctctggatgcttttctggttgccttgaagttcatgcaggtggaggacgtggacattgacgaagttcaatgtattctggctaacttgatatacatgggacacgtcaaaggctacatatcgcatcaagcatcagaagctggtggtcagcaaagcanaacccatttccttccctgtccacggtgtgttgaaagtaccttgccgggcnggcgntcgaaaaccgaanttcancacactggcnggccgtacttatggatcccnacctcggtaccaancttggcgtaaatcatnggncatagctggtttcctngggtgaaaattgttattccgntcacaaatttccncacaacattccaanccgggaaccataaangtggtaaaaccntgggggggcctnatgaagtgaacctaactccant

SEQ ID NO: 9499 - DNA, 617 bp, Homo sapiens
  misc_feature 2, 3, 6, 9, 614: n = A,T,C or G
gnngangcnctcactactatagggcgaattggagctccaccgcggtggcggccgcccgggcaggtactgccaccatctccgtttccaggagtcttctgcttgttctttctggtcttcctcacggatcctgaaggggggttctctgcagagcgaccaccccatcttcctgggagagctggttcaagatttttctgctgtggaccagctgtcttctttcctgaggaggcccctctcattttacttctctgcatgttgcttctagttggttttttgaagttctcttcttctgcagattgctgtccacgaggttgagaaccctgctttctggaactcattcaaccctgtttttattccaaccaacaatcttccttctttcccttccaagaactcctagtgatttcccagatgaaatcttatagatcttctgggatggtctagaagggttgaagtgggagatacaacatgtgccatgcactgtcctggtacctcggccgctctaaaactagtgggatcccccgggctgcaggaattcgatatcaagcttatcgataccgtcgacctcgagggggggcccggtacccaacttttgttccctttaatggagggtaaatgcncct

SEQ ID NO: 9500 - DNA, 614 bp, Homo sapiens
gcccagcgtccgcgctgctccgcccctctctgtcttctctgcagtgggagcagctctcctgccacagctcctcaccccctgaaaatgttcgcctgctccaagtttgtctccactccctccttggtcaagagcacctcacagctgctgagccgtccgctatctgcagtggtgctgaaacgaccggagatactgacagatgagagcctcagcagcttggcagtctcatgtccccttacctcacttgtctctagccgcagcttccaaaccagcgccatttcaagggacatcgacacagcagccaagttcattggagctggggctgccacagttggggtggctggttctggggctgggattggaactgtgtttgggagcctcatcattggttatgccaggaacccttctctgaagcaacagctcttctcctacgccattctgggctttgccctctcggaggccatggggctcttttgtctgatggtagcctttctcatcctctttgccatgtgaaggagccgtctccacctcccatagttctcccgcgtctggttggccccgtgtgttcctttttcctatacctccccaggcagcctggggaacgtggtttggctcag

SEQ ID NO: 9501 - DNA, 868 bp, Homo sapiens
  misc_feature 2, 3, 4, 7, 8, 9, 663, 684, 722, 728, 802, 808, 867: n = A,T,C or G
gnnnatnnntatctaggttagtcgacccacgcgtcccgggtaacagctcttgcacctgtttctcttgcacctgacgtgtagctgctcctacccacctctcctggctgagccttgcctgatacagcagcccggaggcaccacttgcttcccgagtctcaccctcccaggcagctcctacactcaactgcttctctaggaaaggtctcacctccagcctggagcagtcgggattacagaaagccccatccttggcttagggagcgccatgacgactgaaattggttggtggaagctgactttcctccggaaaaagaaatccactcccaaagtgctgtatgagatccctgacacctatgcccaaacagagggagatgcagaacccccgaggcctgacgctggaggccccaacagcgactttaacacccgcctggagaagattgtggacaagagcacaaagggcaagcacgtcaaggtctccaactcaggacgcttcaaggagaagaagaaagtgagagccacgctggcagagaaccctaacctctttgatgatcacgaggaaggacggtcatcaaagtgaagggctgaggaggggtgctagcacctcttggcttcctgccatcagccagatctgagacaggaccttgccacgctggcctttttggncatagctgaagcttgtggggncagttgatacctgctggcaggaaatggctggtttttanggttgnatttatgtgcccgcccttttgtaagggctgggagatcccagggtcctcaccttccctggccacatacaaagggnctttgnttaagagtgaaaaatttaaccaggaggaacacccttcttggagcaatggagggccccang

SEQ ID NO: 9502 - DNA, 466 bp, Homo sapiens
  misc_feature 14, 419, 420, 421, 422, 423, 424, 425, 426, 427, 428, 429,430, 431, 432, 433, 434, 435, 436, 437, 438, 439, 440, 441,442, 443, 444, 445, 446, 447, 448, 449, 450, 451, 452, 453,454, 455, 456, 457, 458, 459, 460, 461, 462, 463, 464: n = A,T,C or G
  misc_feature 465, 466: n = A,T,C or G
ctcactatagggcnaattggagctccaccgcggtggcggccgcccgggcaggtacaggatggcatagtgaaggccctgaatgtggaaccagatggcacaggcctcacctgcagcctggcacccaatatcatctcacagctctgaggccctgggccagattacttcctccacccctccctatctcacctgcccagccctgtgctggggccctgcaattggaatgttggccagatttctgcaataaacacttgtggtttgcggccgctctagaactagtggatcccccgggctgcaggaattcgatatcaagcttatcgataccgtcgacctcgagggggggcccggtacccagcttttgttccctttagtgagggttaattgcgcgcttggcgtaatcatggtcatagctgtttcctggnnnnnnnnnnnnnnnnnnnnnnnnnnnnnnnnnnnnnnnnnnnnnnnn

SEQ ID NO: 9503 - DNA, 844 bp, Homo sapiens
  misc_feature 2, 3, 21, 24, 27, 34, 38, 492, 611, 676, 693, 746, 749, 757,766, 767, 768, 769, 770, 771, 772, 773, 774, 775, 776, 777,778, 779, 780, 783, 785, 786, 787, 788, 789, 790, 791, 793,795, 799, 801, 802, 803, 804, 805, 806, 807, 809: n = A,T,C or G
  misc_feature 810, 811, 812, 815, 816, 817, 818, 819, 820, 821, 822, 823,824, 825, 826, 829, 830, 831, 832, 834, 837, 840: n = A,T,C or G
gnnacccaatcatggacttanttnttngctgatngganctccaccgcggtggcggccgcccgggcaggtcgcaggggtccccgcggccgccgcgatgcagaaatacgagaaactggaaaagattggggaaggcacctacggaactgtgttcaaggccaaaaaccgggagactcatgagatcgtggctctgaaacgggtgaggctggatgacgatgatgagggtgtgccgagttccgccctccgggagatctgcctactcaaggagctgaagcacaagaacatcgtcaggcttcatgacgtcctgcacagcgacaagaagctgactttggtttttgaattctgtgaccaggacctgaagaagtattttgacagttgcaatggtgacctcgatcctgagattgtaaagtcattcctcttccagctactaaaagggctgggattctgtcatagccgcaatgtgctacacagggacctgaagccccagaaccttgntaataaacaggaatggggagctgaaattggctgattttggcctggctcgagcctttgggattcccgtccgctgttactcagctgaggtggtcacacttgtggtacctcgcccctcttanaactaatggatccccccggcctgcaggaattcattttcaagcttatcgataccgtccacctcganggggggccccgtcccanctttgttcccttttaatgaagggttaattgccccccttggcgtaaatcatggncantagcctgnttttcctgnnnnnnnnnnnnnnncgnannnnnnnanancccntnnnnnnngnnnntgnnnnnnnnnnnnaannnnanaanaanaaaa

SEQ ID NO: 9504 - DNA, 459 bp, Homo sapiens
  misc_feature 215, 397, 410, 411, 413, 451, 455, 456, 458: n = A,T,C or G
ggcgaattggagctccaccgcggtggcggccgaggtacgcggggggagaaggaaggaggaagagcggaggccagggcgggctctaggccgaggaatctggggccttaaagccccttcgtctccccagcacccactctctgggggcaggtgggcccggtgacaagtaaccttcagggagccctgaagaccatggaggactactgaccaacaacctntgacctttacccctctggatgggggacgaatcactaggcaaaggggaacaatgggaaggagacaaaatggctgcctttacagctgcagcaagatgtggaaacactggttccctaggcacctccattgtcttcccgccttgggagcatgaaataaataaagtgtgaaggggaacatgagaaanaaattcttaggtnntnaataaaaaaaggtacctgcccccggggttttttttttntctnncnc

SEQ ID NO: 9505 - DNA, 855 bp, Homo sapiens
  misc_feature 510, 580, 583, 648, 671, 685, 703, 706, 740, 747, 763, 770,771, 772, 779, 782, 785, 786, 787, 811, 826, 831, 840, 846,847, 855: n = A,T,C or G
atcgactactatagggcgaattgggccctctagatgcatgctcgagcggccgccagtgtgatgggatatctgcagaattcggcttcgagcggcccgcccgggcaggtacgcggggatattagtgcatttctttgcagaggttacctctttttcttgtctctcgtcaggtctctgacattgacagagcctggacgttggaggaagccccaggacgttggaggggtaaagtaaaagtccacagttaccgtgagagaaaaaagagggagaaagcagtgcagccaaactcggaagaaaagagaggaggaaaaggactcgactttcacattggaacaaccttctttccagtgctaaaggatctctgatctggggaacaacaccctggacatggctccagagatcaacttgccgggcccaatgagcctcattgataacactaaagggcagctggtggtaaatccagaagctctgaagatcctatctgcaattacgcagcctgtggtggtggtggcnattgtgggcctctatcgcacaggcaaatcctacctgatgaacaagctggctgggaaagaaaaaccgcttnttntctagctccacaatgaaatcttacaccaaagggaatctggatgtggtgtgtgccttattccaaanaagccagaacacacccctaattnttgttcgacctganggcctgggaaatataaanaanggtgacaatgaaaaatgacttcctggatcttttnccttggncatcctcctgaacaanaaccttnnnttccctnggnccnnnaccaccctaagcccaatttcaacnccactggcggccgtnctaanggatcccanctcggnncaaacttn

SEQ ID NO: 9506 - DNA, 433 bp, Homo sapiens
  misc_feature 31, 112, 168, 193, 194, 202, 210, 211, 223, 226, 229, 231,233, 234, 236, 237, 241, 242, 246, 252, 254, 259, 265, 266,272, 280, 282, 283, 285, 288, 290, 292, 294, 301, 302, 304,306, 309, 310, 312, 313, 314, 315, 320, 321, 322, 326: n = A,T,C or G
  misc_feature 327, 332, 336, 337, 338, 340, 344, 345, 346, 347, 349, 351,360, 362, 363, 364, 368, 372, 373, 375, 376, 377, 378, 381,383, 384, 385, 387, 389, 390, 394, 397, 398, 399, 400, 402,404, 405, 407, 411, 412, 417, 418, 420, 421, 423, 424: n = A,T,C or G
  misc_feature 425, 426, 429, 432: n = A,T,C or G
gattgtaatacgactcactatagggcgaatngggccctctagatgcatgctcgagcggccgccagtgtgatggatatctgcagaattcgcccttagcgtggtcgcggccgangtacctgccgcaggaggggaaggatgggcttcctgcaacctcccttgccccacggnttcccatcctacccccggccgtgtnnagcttganggccagtnnggacgcaaaagnttntangncnntnnggtnnttangtatancnttctntaatanngacagntactactntnngntananananttttttnnantncannannnnatatnnnactnnttaanaagnnnantttnnnnantnattttattntnnnatanattnntnnnnttnannntnanntcanttnnnnananntntaannttttnntnnannnnttnagna

SEQ ID NO: 9507 - DNA, 477 bp, Homo sapiens
tagggggcgcctaaacactactatagggcgaattggagctccaccgcggtggcggccggcaccttggccgcgttcagagtgccgatgagctcccccagactctgcttccgcccgttcatcttccagtttcccccaacgaagaacttcctggagggcgccatggcgctggagccgaggcgctgaaggtcagtgtctgccccgcgtacctcggccgctctagaactagtggatcccccgggctgcaggaattcgatatcaagcttatcgataccgtcgacctcgagggggggcccggtacccagcttttgttccctttagtgagggttaattgcgcgcttggcgtaatcatggtcatagctgtttcctgtgtgaaattgttatccgctcacaattccacacaacatacgagccgggagcataaagtgtaaaagcctgggggtgcctaatgaagttgaagctaactcacattaattgcgt

SEQ ID NO: 9508 - DNA, 455 bp, Homo sapiens
cgaattgggtaccgggccccccctcgaggtcgacggtatcgataagcttgatatcgaattcctgcagcccgggggatccactagttctagagcggccgaggtccaagtcccagcgaacccgcgtgcaacctgtcccgactctagccgcctcttcagctcgccatggatcccaactgctcctgcgccgctggtgactcctgcacctgcgccggctcctgcaaatgcaaagagtgcaaatgcacctcctgcaagaaaagctgctgctcctgctgccctgtgggctgtgccaagtgtgcccagggctgcatctgcaaaggggcgtcggacaagtgcagctgctgcgcctgatgctgggacagccccgctcccagatgtaaagaacgcgacttccacaaacctggattttttatgtacctgcccgggcggccgccaccgcggtggagctccagcttttg

SEQ ID NO: 9509 - DNA, 609 bp, Homo sapiens
  misc_feature 3, 8, 10, 11, 14, 479, 551, 556, 565: n = A,T,C or G
ggnatgangnngantgcgctcggatccctagtaacggccgccagtgtgctggaattcggcttagcgtggtcgcggccgaggtacccctcatacccagcctcaactggagatgactaaggctagtctgtgcacttgaggccacattcccctgttcaaggactgagtgtcctttacaaatcccctccaaatgggagattccaaaggggcttaagcaaaagaacaatctctgtggcaaactaagttagccaagaagctgaagacttaaaatcaaggaaggaagatgccagatggcagtttttacatttatttaaacagaaaacgtgcacatgagctgcctactcattttcttcactgcgcagcctggcattgggggttggtgactctgatggccagttgggcagctctttccacgatggctttgcggttcttggaggaaacattgtgagccgatctcggcacagtaagatttgttgcacatnagcagcacttccagctccttgaccgttgtggaccaggaacttccggaagccactgggcagcatgtgctttgnttttntggtgcttncataaccaatgttgggcatcaagatctggcccttgaatcttcta

SEQ ID NO: 9510 - DNA, 663 bp, Homo sapiens
  misc_feature 2, 3, 7, 8, 10, 195, 583, 620, 652, 655, 658: n = A,T,C or G
gnntgcnntnggccgccgggcaggtacgcggggggggacgcgccggaggaaagatggaagactaccaggctgcggaggagactgcttttgttgttgatgaagtgagcaacattgtaaaagaggctatagaaagcgcaattggtggtaacgcttatcaacacagcaaagtgaaccagtggaccacaaatgtagtanaacaaactttaagccaactcaccaagctgggaaaaccatttaaatacatcgtgacctgtgtaattatgcagaagaatggagctggattacacacagcaagttcctgcttctgggacagctctactgacgggagctgcactgtgcgatgggagaataagaccatgtacctcggccgctctagaactagtggatcccccgggctgcaggaattcgatatcaagcttatcgatacccgtcgacctcgagggggggcccggtacccagcttttgttccctttagtgagggttaattgcgcgctggcgtaatcatggtataagctgtttcctgtgtgaaaattggtattcgctcacaattccacacaacatacgaacccggagctaaagtgtnaaagctggggggcctaatgagtgagctactcacattnattgcgttgcgctcactgccgcttttcagtcnggnaanctgtc

SEQ ID NO: 9511 - DNA, 828 bp, Homo sapiens
  misc_feature 7, 10, 11, 23, 27, 347, 379, 447, 448, 449, 450, 451, 452,453, 454, 455, 456, 457, 458, 459, 460, 461, 462, 463, 465,467, 468, 469, 470, 471, 472, 473, 474, 475, 476, 477, 478,479, 480, 481, 482, 483, 484, 485, 487, 488, 489, 490: n = A,T,C or G
  misc_feature 491, 492, 494, 495, 496, 497, 498, 499, 502, 503, 504, 505,506, 509, 510, 511, 512, 513, 514, 516, 517, 518, 519, 520,521, 522, 523, 526, 527, 528, 529, 530, 532, 533, 534, 535,536, 537, 538, 539, 541, 543, 544, 545, 547, 548, 549: n = A,T,C or G
  misc_feature 550, 551, 552, 553, 554, 555, 556, 557, 558, 559, 560, 561,562, 563, 564, 565, 566, 567, 568, 569, 571, 572, 573, 574,575, 576, 577, 578, 579, 580, 581, 582, 583, 584, 585, 586,587, 588, 589, 590, 591, 592, 593, 594, 595, 596, 597: n = A,T,C or G
  misc_feature 598, 599, 600, 601, 602, 603, 604, 605, 606, 607, 608, 609,610, 611, 612, 613, 614, 615, 616, 617, 618, 619, 620, 621,622, 623, 624, 625, 626, 627, 628, 629, 630, 631, 632, 633,634, 635, 636, 637, 638, 639, 640, 641, 642, 643, 644: n = A,T,C or G
  misc_feature 645, 646, 647, 648, 649, 650, 651, 652, 653, 654, 655, 656,657, 658, 659, 660, 661, 662, 663, 664, 665, 666, 667, 668,669, 670, 671, 672, 673, 674, 675, 676, 677, 678, 679, 680,681, 682, 683, 684, 685, 686, 687, 688, 689, 690, 691: n = A,T,C or G
  misc_feature 692, 693, 694, 695, 696, 697, 698, 699, 700, 701, 702, 703,704, 705, 706, 707, 708, 709, 710, 711, 712, 713, 714, 715,716, 717, 718, 719, 720, 721, 722, 723, 724, 725, 726, 727,728, 729, 730, 731, 732, 733, 734, 735, 736, 737, 738-828: n = A,T,C or G
gcgcgtnatnngacttactatanggcnaattggagctccaccgcggtggcggccgcccgggcaggtaccaggaaacataatcataactaccaatgtcattgaaggttccaatgcaggagatggtgactgactgtccaggagacccggacgcggagggaggctgagtcagggcagactgggcccaggaccctgtgccctgagtgaggagggtgaggaggagcagagcccaggccatggtggtgacgtcctgagagcgctgcctcctgagaccccccccgcgtacctcggccgctctagaactagtggatcccccgggctgcaggaattcgatatcaagcttatcgatnccgtcgacctcgagggggggcccggtacccancttttgttccctttagtgagggttaattgcgcgcttggcgtaatcatggtcatagctgtttcctggannnnnnnnnnnnnnnnngncnnnnnnnnnnnnnnnnnnnannnnnntnnnnnntannnnngtnnnnnntnnnnnnnnctnnnnngnnnnnnnntntnnnannnnnnnnnnnnnnnnnnnnnnnannnnnnnnnnnnnnnnnnnnnnnnnnnnnnnnnnnnnnnnnnnnnnnnnnnnnnnnnnnnnnnnnnnnnnnnnnnnnnnnnnnnnnnnnnnnnnnnnnnnnnnnnnnnnnnnnnnnnnnnnnnnnnnnnnnnnnnnnnnnnnnnnnnnnnnnnnnnnnnnnnnnnnnnnnnnnnnnnnnnnnnnnnnnnnnnnnnnnnnnnnnnnnnnnnnnnnnnnnnnnnnnnnnnnnnnnnnnnnnnnnnnnnnnnnnnnnnnnn

SEQ ID NO: 9512 - DNA, 632 bp, Homo sapiens
  misc_feature 3, 541, 582: n = A,T,C or G
ttngggcaattggagctccaccgcggtggcggccgaggtacgcggggaggaactgctcagttaggacccagacggaaccatggaagccccagcgcagcttctcttcctcctgctactctggctcccagataccactggagaaatagtgatgacgcagtctccagccaccctgtctgtgtctccaggggaaagagccaccctctcctgcagggccagtcagagtgttggcaccaacttagcctggtacctgcccgggcggccgctctagaactagtggatcccccgggctgcaggaattcgatatcaagcttatcgataccgtcgacctcgagggggggcccggtacccagcttttgttccctttagtgagggttaattgcgcgcttggcgtaatcatggtcatagctgtttcctgtgtgaaattgttatccgctcacaattccacacaacatacgagccgggagcataaagtgtaaagcctggggtgcctaatgagtgagctaactcacattaatttgcgttgcgctcactggccgctttncagtcgggaaacctgtcgtgccagctgcttaatgaatcggncaacgccccggggagaggcgggttgcgtattgggcgctcttccgcttctc

SEQ ID NO: 9513 - DNA, 831 bp, Homo sapiens
  misc_feature 9, 13, 16, 20, 333, 444, 488, 515, 523, 562, 596, 600, 640,642, 648, 649, 650, 651, 652, 653, 654, 655, 656, 657, 658,659, 660, 661, 662, 663, 664, 665, 666, 667, 668, 669, 670,671, 672, 673, 674, 675, 676, 677, 678, 679, 680, 681: n = A,T,C or G
  misc_feature 682, 683, 684, 685, 686, 687, 688, 689, 690, 691, 692, 693,694, 695, 696, 697, 698, 699, 700, 701, 702, 703, 704, 705,706, 707, 708, 709, 710, 711, 712, 713, 714, 715, 716, 717,718, 719, 720, 721, 722, 723, 724, 725, 726, 727, 728: n = A,T,C or G
  misc_feature 729, 730, 731, 732, 733, 734, 735, 736, 737, 738, 739, 740,741, 742, 743, 744, 745, 746, 747, 748, 749, 750, 751, 752,753, 754, 755, 756, 757, 758, 759, 760, 761, 762, 763, 764,765, 766, 767, 768, 769, 770, 771, 772, 773, 774, 775: n = A,T,C or G
  misc_feature 776, 777, 778, 779, 780, 781, 782, 783, 784, 785, 786, 787,788, 789, 790, 791, 792, 793, 794, 795, 796, 797, 798, 799,800, 801, 802, 803, 804, 805, 806, 807, 808, 809, 810, 811,812, 813, 814, 815, 816, 817, 818, 819, 820, 821, 822: n = A,T,C or G
  misc_feature 823, 824, 825, 826, 827, 828, 829, 830, 831: n = A,T,C or G
gcgttattngacntantatngggctgattggagctccccgcggtgggcggccgaggtacgcggggattctcctttcttttattcttgtctgttctgcctcactcccgagctctactgactcccaacagagcgcccaagaagaaaatggccataagtggagtccctgtgctaggatttttcatcatagctgtgctgatgagcgctcaggaatcatgggctatcaaagaagaacatgtgatcatccaggccgagttctatctgaatcctgaccaatcaggcgagtttatgtttgactttgatggtgatgagattttccatgtggatatggcaaanaaggagacggtctggcggcttgaagaatttggacgatttgccagctttgaggctcaaggtgcattggccaacatagctgtggacaaagccaacctggaaatcatgacaaancgctccaactatactccgatcaccaatgtacctgcccgggcggnccgctctaagaactagtggatcccccnggctgcangaattccatatcaagcttatcgataccgtcgacctcganggggggcccgggacccaacttttggtccctttantganggttaattgcgccctttggcgtaatcatggtcatagctgntncggggnnnnnnnnnnnnnnnnnnnnnnnnnnnnnnnnnnnnnnnnnnnnnnnnnnnnnnnnnnnnnnnnnnnnnnnnnnnnnnnnnnnnnnnnnnnnnnnnnnnnnnnnnnnnnnnnnnnnnnnnnnnnnnnnnnnnnnnnnnnnnnnnnnnnnnnnnnnnnnnnnnnnnnnnnnnnnnnnnnnnnnnn

SEQ ID NO: 9514 - DNA, 622 bp, Homo sapiens
  misc_feature 5, 6, 18, 20, 27, 33, 90, 111, 120, 121, 125, 126, 127, 128,129, 135, 136, 137, 146, 147, 148, 150, 151, 153, 158, 159,163, 169, 172, 173, 177, 178, 183, 184, 188, 202, 211, 215,218, 219, 220, 222, 226, 227, 229, 231, 237, 239: n = A,T,C or G
  misc_feature 243, 246, 255, 256, 263, 273, 275, 282, 286, 289, 290, 291,292, 293, 295, 296, 298, 299, 305, 308, 320, 323, 336, 342,343, 344, 347, 351, 352, 365, 367, 378, 382, 383, 384, 388,392, 393, 408, 415, 417, 418, 422, 423, 424, 426, 432: n = A,T,C or G
  misc_feature 433, 434, 440, 448, 449, 452, 453, 459, 462, 463, 464, 467,468, 471, 474, 476, 477, 478, 483, 489, 498, 499, 503, 513,517, 518, 523, 524, 533, 535, 539, 542, 543, 548, 553, 559,560, 568, 570, 571, 572, 575, 577, 584, 585, 586, 588: n = A,T,C or G
  misc_feature 590, 591, 592, 593, 594, 595, 596, 597, 598, 599, 600, 601,602, 603, 604, 605, 606, 607, 608, 609, 610, 611, 612, 613,614, 615, 616, 617, 618, 619, 620, 621, 622: n = A,T,C or G
gcgtnntggtactcactngngggcctnattggnacctccaccgcggtggcggccgcccgggcaggtactttttttttttttttttttttnaaaaaaaaatttttttttttncccccgggnngggnnnnngggggnnnttttttttnnntnnanccccnntttnaggggnttnnaaannttccnnggantttttttttttttnaaaaaaaangggnttnnncntttnngncnaaattngntttnaanccccaaaannaaggggnttcccccccntngcccccnaaanggnnnnnannanngggggnaancccccccccccnccnaaaaaaaaaaaantttttnnnggnaaannaaaaaaaaaaaantngggggcccccnggtnnnaaangggnnttttttaaaaaaaantttgggntnntttnnnancccccnnncccttnaaaaaatnnggnncccccnggnnnggnnaanttnannnaaaantttttnaaccccccnncccngggggggggncccnnccccnnttttttttncntttnagnnggggnaaatncccccnngggaaaanannnggnanttttttnnncntnnnnnnnnnnnnnnnnnnnnnnnnnnnnnnnnn

SEQ ID NO: 9515 - DNA, 469 bp, Homo sapiens
  misc_feature 2, 3, 5, 7, 9, 11, 12, 13, 15, 20, 23, 28: n = A,T,C or G
cnnantncncnnnancgacntantatgntggctgattggagctccccgcggtggcggcccgaggtacaaggatgctttgaaagatgtggaagagagagtccaggccacaattgataccgcagatgatgccactgtcatggccagtgaaagcctcagtgtcatgtccagcaacgtctccttttctgagtgaagtctaggatagtttcttccccttgtgtttgaacagggcagtttaggttctaggtagtggagggccaggtggggctcgaggaacgtagtgttctttgcatttctgtcccatatgggtgatgtagagatttacctgtttttcagtattttctaaatgcttttcctttgaatagcaggtagttagcttcagagtgttaatttatgaatattagtcgcacatgtattgctctttatctggtttaagagtaacagtttgatattttgttaaaaaaatggaaat

SEQ ID NO: 9516 - DNA, 846 bp, Homo sapiens
  misc_feature 495, 520, 522, 523, 524, 542, 552, 554, 563, 566, 570, 586,599, 602, 605, 616, 620, 627, 638, 655, 661, 680, 683, 684,709, 711, 730, 734, 735, 770, 773, 779, 783, 795, 800, 804,816, 818, 819, 827, 832, 843: n = A,T,C or G
gtaatacgactcactatagggcgaattggagctccaccgcggtggcggccgcccgggcaggtactaagaataacaagaagcccagtggtgaggaaagtgcgttctcccagcactgcctcctgttttctccctctcatgtccctccagggaaaatgactttattgcttaatttctgcctttcccccctcacacatgcacttttgggcctttttttatagctggaaaaaacaaaataccaccctacaaacctgtatttaaaaagaaacagaaatgaccacgtgaaatttgcctctgtccaaacatttcatccgtgtgtatgtgtatgtgtgtgagtgtgtgaagccgccagttcatctttttatatggggttgttgtctcattttggtctgttttggtcccctccctcgtgggcttgtgctcggggatcaaacctttctggcctgttatgattctgaacatttgacttgaacccaagtgaatctttctccctggtgnctcaaataaaagtataatttttacngnnnaaaaaaaaaaaaaaagtntctcggccgntntagaactangtngganccccccgggcttgcanggaatttcgaatnttnaangcctttatcgnatanccgtccnacccttcccanggggggggcccccggtnccccancctttttgttccccctttnaannggagggggtttaaatttggcgcccncnttgggcggttaaatcaatngggnnaataagcttgttttcctgttggtggaaaaattggnttnttccgnttcncaaatttccccnacaancatnccgaacccgggnannccattaanagttntaaaagccctnggg

SEQ ID NO: 9517 - DNA, 605 bp, Homo sapiens
  misc_feature 54: n = A,T,C or G
gacccacgcgtccggctccaccttacatgccacgtctgtgtgagtcaacagggnatcaggtttggtcaccacacatgtctgaagctgggcagcgtctgctctgtgttctgtgtggaatggagaaaaaaacgcctgccctgctgccttccatgttcataggcccagcccaagagagtgacacacagtgctggccctgagacatttccacaaagtggtcaactctgccttgcatcctaaaactttttgggcatctattttgaaaactataggagcctttggaaggcctcttatgtttggaggggaagggtgttgagattgtcaccatccttcaagctgagactcctggtgagcctttgccaccatgaaaaccacatagctgaccagggctgtgcttgaggtacagaggacacacatcgtagacaggcctgtgtcatgtttccttacagtcgttttttacagagaaaaggggcattgttttttcactgctttctcaacagttcctgtgaataaatgaaacatttcggagctccctgagagcaagagccttcacttcttcttgcggtgccgggaccatgtgttggtgaagctggtgctgtgggggccac

SEQ ID NO: 9518 - DNA, 525 bp, Homo sapiens
  misc_feature 1, 39, 77, 89, 402, 424, 430, 451, 477, 517, 524: n = A,T,C or G
nagttttcgatcgccccgcgtccggggcacctgtcttcnaggccctcttgctgtgtggccgcagactggtggttcangcctcttaactnggacatgaggaaactgaaaaacagagtagcagctcagactgccagagatcgaaagaaggctcgaatgagtgagctggaacagcaagtggtagatttagaagaagagaaccaaaaacttttgctagaaaatcagcttttacgagagaaaactcatggccttgtagttgagaaccaggagttaagacagcgcttggggatggatgccctggttgctgaagaggaggcggaagccaaggggaatgaagtgaggccagtggccgggtctgctgagtccgcagcactcagactacgtgcacctctgcagcaggtgcangcccatttgtcaccccctccanaacatntccccatggattctggcgggnttgactctttcagattcaaaagtctnattcctgttgggcattctggacaacttggacccagtcatntttcttnt

SEQ ID NO: 9519 - DNA, 579 bp, Homo sapiens
  misc_feature 4, 6, 12: n = A,T,C or G
cacncntccggnccttactcaactgattatcaccctccctgtcatacaatacttcctggctcgatttcctggggggtggtctcagcccactccacctcccctcagccgagcctagagtagaggggccaggcatcctccccaggggaggggcgttgaagcaaggagcctctcctgggctgtcctagcctcacatttacttgaccacaataacctggcaggaggagctggtggaaaggaccttcatctccccagaggagctcatcaagaagctgcagtacagatatgagaaattctctccctttgccgacacattcaagaagcgcgtcagcaagaacacgttcttcgtgctggtacgggtggtggatgagctctgcctggtggagttgacagaagagatcctgaagctgctgatggaactggtcttccgcctggtgtgcaatggggagctgagcctggcccgtgtgctccggaagaacatcctggacaaggtggaccagaagaagctactcaggtgtgccacctccagccagcccctggcagcccggggggtagcagccaggcccgggaccttgcacgact

SEQ ID NO: 9520 - DNA, 880 bp, Homo sapiens
  misc_feature 1, 3, 605, 621, 684, 708, 741, 764, 781, 793, 794, 816, 824,828, 848, 857, 867, 878, 879: n = A,T,C or G
ntnatacgactactatagggcgaattgggccctctagatgcatgctcgagcggccgccagtgtgatggatatctgcagaattcgcccttagcgtggtcgcggccgaggtacagtggtccttttcagagttggacttctagactcacctgttctcactccctgttttaattcaacccagccatgtaatgccaaataatagaattgctccctaccagctgaacagggaggagtctgtgcagtttctgacacttgttgttgaacatggctaaatacaatgggtatcgctgagactaagttgtagaaattaacaaatgtgctgcttggttaaaatggctacactcatctgactcattctttattctattttagttggtttgtatcttgcctaaggtgcgtagtccaactcttggtattaccctcctaatagtcatactagtagtcatactccctggtgtagtgtattctctaaaagctttaaatgtctgcatgcagccagccatcaaatagtgaatggtctctctttggctggaattacaaaactcagagaaaatgtgtcatcaggagaacatcataacccatgaagggataaaagcccccaaatgggnggtaactgataatagncactaaatgctttaaaaatttggttcacactctcaccctaaggtgagccgcattgagcccagngggtgctaaaatgctacatacttncaacttgaaatggttaagggaagaagatagatnccatttaaaaaaaatttaaaccnaatttaaaaaaaaaaangacccccggggnntccagtcttctttgagttagcntaatacanaaancccctttactttaacttttnaaaaaaaanaaccctggantaatttgatgnnt

SEQ ID NO: 9521 - DNA, 442 bp, Homo sapiens
  misc_feature 2, 3, 7, 8: n = A,T,C or G
gnnatgnncccactgcacgaggcaagggtttaaaaattgctattttatattttaaatgatattgagcagctacctacaatttctatgtacattttgttccccccccaccacccccccccaaattaccttccttttgacattttcctcatctgctgtttgtgacaagtcatcagccagatttcctgactgacacataggtatgatcagtgcaggagagacctgcgcaccacaggctgcaaactggaggttctgttctcatggcagtttgggcagtaacttttgagagaggccaaaaaaaggaggatgacatgctgtctcctctcttcagtatagacattaggctcttattcagaaaggatttttctttaaaaatgtacttactttactgaactacttacagggcacatttcttcataaggccacacctaattccaaacaagac

SEQ ID NO: 9522 - DNA, 653 bp, Homo sapiens
  misc_feature 22, 24, 450, 467, 506, 517, 528, 535, 540, 547, 549, 560,571, 587, 596, 597, 598, 606, 609, 610, 612, 629, 630, 636,641, 653: n = A,T,C or G
actcactatagggcgaattggnanctccaccgcggtggcggccgagtacagagtgatagatcccttcttggtagtggtaattctttcctgcatagtacgcgggggctgtagtggcttcgtcttcggtttttctcttccttcgctaacgcctcccggctctcgtcagcctcccgccggccgctctagaactagtggatcccccgggctgcaggaattcgatatcaagcttatcgataccgtcgacctcgagggggggcccggtacccagcttttgttccctttagtgagggttaattgcgcgcttggcgtaatcatggtcatagctgtttcctgtgtgaaattgttatccgctcacaattccacacaacatacgagccgggagcataaagtgtaaagcctggggtgcctaatgagtgagctaactcacattaattgcgttgcgctcactgnccgctttccagtcgggnaacctgtcgtgccagctgcattaatgaatcggccacgcncgggagaggcnggttgcgtatnggcgctntttcnctttctngntaattaactcnttggctcggtngtcggctgggggaggngggttaagnnnttaaaagnggnnanccgggtttccaaaaatnngggganaaccnaggaaaaaattn

SEQ ID NO: 9523 - DNA, 623 bp, Homo sapiens
  misc_feature 26: n = A,T,C or G
gccccgcgtccgaggcagccttcctnctcctgcactggctgagtccatttacttgtgtacttgttctagtgagtggtgggactgtacatttttgaatagacctcaaaaatacttcattctgctgctgttcagttggctttttaaacctgtctgcagtaggacactgaaaacagcaagaacttcggggtgaacacccgctgatcctttaacaaggatttctggcaggaaactcacaaaaaggagaactgaaaatttagacatacagttggccattgtaaaaaacatcagtttcctctcatacattccaagtaaaccaagtaaaataagtgttggagtaacacttgcataaaagaatttaaggagtgatagctctttctgttctgccattcccaacattcctgggggaaaggagactcaatgagttaatactatttcactgagcccaagatggaaacttggtttgacctaaaacatctgattaatataggctagctgatttcttaaaaattcgttgcattgaaggatattttgcatgtctgtaacacctgtcaatacttgtttgtattgatttctgatattcttgcagctgactacgtgtaattgggcagatcagctttgcagta

SEQ ID NO: 9524 - DNA, 672 bp, Homo sapiens
  misc_feature 1, 10, 15, 17, 38, 39, 40, 574, 594, 625, 627, 630, 631,632, 633, 634, 635, 636, 637, 638, 639, 640, 641, 642, 643,644, 645, 646, 647, 648, 649, 650, 651, 652, 653, 654, 655,656, 657, 658, 659, 660, 661, 662, 663, 664, 665, 666: n = A,T,C or G
  misc_feature 667, 668, 669, 670, 671: n = A,T,C or G
ntacgtactncactntnaggtcgaattgggcccctctnnntgcatgctcgagcggccgccagtgtgatggatatctgcagaattcgccctttcgagcggccgcccgggcaggtaccaacagcacccaggcaaagcccccaaactcatgatttatgaggtcactaatcggccctcaggggtccctcatcgcttctctggctccaagtctggcaacacggcctccctgaccatctctgggctccaggctgaggacgaggctgattattactgctgctcatatacaaggagcaccgctccctgggtgttcggcggagggaccaagctgaccgtcctgggtcagcccaaggctgccccctcggtcactctgttcccaccctcctctgaggagcttcaagccaacaaggccacactggtgtgtctcataagtgacttctacccgggagccgtgacagtggcctggaaggcagatagcagccccgtcaaggcgggagtggagaccaccacaccctccaaacaaagcaacgacaagtacctcggccgcaccacgctaagggcgaattccagcacactggcnggccgttactagtggatccnagctcggtaccaagcttggcgtaatcatggnanctnnnnnnnnnnnnnnnnnnnnnnnnnnnnnnnnnnnnnnnnnnc

SEQ ID NO: 9525 - DNA, 400 bp, Homo sapiens
  misc_feature 14: n = A,T,C or G
gctcgcgtaatacngactcactatagggcgaattggagctccaccgcggtggcggccgaggtactatagtattgctgacagtaataaactgccacatcttcagcctgcaggctgctgatggtgagagtgaaatctgtcccagacccgctgccactgaatcggtcagggaccccggattcccgggtagatgcccagtaaatgagcagcttaggaggctgtcctggtttctgctggtacctgcccgggcggccgctctagaactagtggatcccccgggctgcaggaattcgatatcaagcttatcgataccgtcgacctcgagggggggcccggtacccagcttttgttccctttagtgagggttaattgcgcgcttggcgtaatcatggtcatagctgtt

SEQ ID NO: 9526 - DNA, 404 bp, Homo sapiens
  misc_feature 350: n = A,T,C or G
ggcaattgggccctctagatgcatgctcgagcggccgccagtgtgatggatatctgcagaattcgcccttagcgtggtcgcggccgaggtacttgcgcttactttgtagccttcatcagggtttgctgaagatggcggtatataggctgagcaagaggtggtgaggttgatcggggtttatcgattacagaacaggctcctctagagggatatgaagcacctgccaggtcctttgagttttaagctgtggctcgtagtgttctggcgagcagttttgttgatttaactgttgaggttttagggctaagcatagtggggtatctaatcccagtttgggtcttagctattgngtgttcaaatatgttaaagccacttttcgtaagtctatttttgtgttaaactgg

SEQ ID NO: 9527 - DNA, 472 bp, Homo sapiens
  misc_feature 187, 194, 410, 444: n = A,T,C or G
ggcgaattggagctccccgcggtggcggccgaggtacttctatgggaaagtgaacacgttctgtgacaggaaacatctctgtccatgccagcatagtagttgtatggacttctaaccagttgagttttttaaagcattgaggattttttcctcttaccaactcctcttcaggtttttaaagacccanccccttnccaatctcaaaagagaaaaaggaaactgagttatcttgaataacataactttttaatcaaatgtttattttggcttgtggatcttggtgttatttaaaaaattgaggtgatggtcattgcaagctcatctattaagtacgcgggctctcggccttagcgccatttttttggaaacctctgcgccatgagagccaagtggaggaagaagcgaatgcnccaggctgaagcgcaaaagaagaaagatgaggcngaggtccaagtaaacccgctagcttgtt

SEQ ID NO: 9528 - DNA, 493 bp, Homo sapiens
  misc_feature 3, 428, 429, 430, 431, 432, 433, 434, 435, 436, 437, 438,439, 440, 441, 442, 443, 444, 445, 446, 447, 448, 449, 450,451, 452, 453, 454, 455, 456, 457, 458, 459, 460, 461, 462,463, 464, 465, 466, 467, 468, 469, 470, 471, 472, 473: n = A,T,C or G
  misc_feature 474, 475, 476, 477, 478, 479, 480, 481, 482, 483, 484, 485,486, 487, 488, 489, 490, 491, 492, 493: n = A,T,C or G
acnactactatagggcgaattgggccctctagatgcatgctcgagcggccgccagtgtgatggatatctgcagaattcgcccttgagcggccgcccgggcaggtacgcgggggcttccggttcctagcgttaactgcgaccggggttcagcgctcgggtgaggagctggtggcgtcggcaggttcgaggcgattcgagctccagctaggatgatcgaggttgtttgcaacgaccgtctggggaagaaggtccgcgttaaatgcaacacggatgataccatcggggaccttaagaagctgattgcagcccaaactggtacctcggccgcgaccacgctaagggcgaattccagcacactggcggccgttactagtggatccgagctcggtaccaagcttggcgtaatcatggtcatagctgtttcctgnnnnnnnnnnnnnnnnnnnnnnnnnnnnnnnnnnnnnnnnnnnnnnnnnnnnnnnnnnnnnnnnnn

SEQ ID NO: 9529 - DNA, 722 bp, Homo sapiens
  misc_feature 500, 543, 603, 606, 625, 635, 637, 638, 641, 643, 650, 686,691, 704, 708, 709, 711, 720: n = A,T,C or G
gcgcgcgtaatacgactcactatagggcgaattggagctccaccgcggtggcggccgaggtaccgcaagaaatgggacagcaacgtcattgagacttttgacatcgcccgcttgacagtcaacgctgacgtgggctattactcctggaggtgtcccaagcccctgaagaaccgtgatgtcatcaccctccgctcctggctccccatgggcgctgattacatcattatgaactactcagtcaaacatcccaaatacccacctcggaaagacttggtccgagctgtgtccatccagacgggctacctcatccagagcacagggcccaagagctgcgtcatcacctacctggcccaggtggaccccaaaggctccttacccaagtgggtggtgaataaatcttctcagttcctggctcccaaggccatgaagaagatgtacctgcccgggcggccgcccgggcaggtacactaccaaacactcagtccactgttgagccccantgctggaagggaggaaggcctttcttctgtgttaattgcgtanaggctacagggggttagcctggactaaaggcatccttgtcttttgagctattcacctcantanaaaagggatctaagggaangaatcactgnannttnanttctgtngacctgtgcacctaccccttggaaatgtctgctggnatttntaattcccaggtnattnnangcctgcttnga

SEQ ID NO: 9530 - DNA, 679 bp, Homo sapiens
  misc_feature 603, 606, 623, 669, 673, 679: n = A,T,C or G
tcactatagggcgaattggagctccccgcggtggcggccgcccgggcaggtacgcgggattctcttttcttttattcttgtctgttctgcctcactcccgagctctactgactcccaacagagtgcccaagaagaaaatggccataagtggagtccctgtgctaggatttttcatcatagctgtgctgatgagcgctcaggaatcatgggctatcaaagaagaacatgtgatcatccaggccgagttctatctgaatcctgaccaatcaggcgagtttatgtttgactttgatggtgatgagattttccatgtggatatggcaaagaaggagacggtctggcggcttgaagaatttggacgatttgccagctttgagactcaaggtgcattggccaacatagctgtggacaaagccaacctggaaatcatgacaaagcgctccaactatactccgatcaccaatgtacctccagaggtaactgtgctcacaaacagccctgtggaactgagagagcccaacgtcctcatctgtttcatagacaagttcaccccaccagtggtcaatgtcacgtggcttcgaaatggaaaacctgtcaccacangantgtcagagacagtcttnctgcccagggaagacaccttttccgcaagttccactatctcccttnctgncctcan

SEQ ID NO: 9531 - DNA, 392 bp, Homo sapiens
cgtaatacgactcactatagggcgaattggagctccaccgcggtggcggccgaggtacctctttggggagcttttcgttttgttttgtttttaattctctttccttagcagcaaggtcttttttcctagagaatctactccgttgcagaatcattgcaacctcaggagccctcactgattgagtgctgtcagcctgatatactactttggactctggaaacagatatgggttctattctctatttctactgtgtgtcgttaaacaaccgccggagaccagatgacctgttagatggctagtcctgtataactcgactctgtatgtttcaatgtatgttactgcaatgcttcacctgctgtacctgcccgggcggccgctctagaactagtgg

SEQ ID NO: 9532 - DNA, 650 bp, Homo sapiens
  misc_feature 504, 520, 533, 585, 596, 597, 598, 599, 601, 605, 610, 613,614, 618, 621, 622, 623, 624, 625, 626, 633, 634, 635, 636,637, 641, 642, 644, 645, 650: n = A,T,C or G
gattgtaatacgactcactatagggcgaattgggccctctagatgcatgctcgagcggccgccagtgtgatggatatctgcagaattcggcttagcgtggtcgcggccgaggtacaaacacatcttagctagtaacgaccacttgttttccactgaaaatggcaaattcttcccagggccctcctcatagtggctcctacggaccacagaggttgtgaacctccggatgctctggcccaacataccgctgctggaagctctgcgaaaggcgcagagaatgaggacagatgaaatggcggcacctcaccaagaccttttttttcacgaccttgttccccggtgcgcaaggactgaaaagaaagatgggaaatgggccccgcgtacctgcccgggcggccgctcgaaagccgaattccagcacactggcggccgttactagtggatccgagctcggtaccaagcttggcgtaatcatggtcatagctgtttcctgtgtgaaattgntatccgctcacaattncacacaacatacnagccggaagcataaagtgtaaagcctggggtgcctaatgagtgagctaactnacattaattgnnnngngctnactgnccnntttncannnnnnaaacctnnnnnccanntnnttaan

SEQ ID NO: 9533 - DNA, 723 bp, Homo sapiens
  misc_feature 2, 3, 4, 5, 6, 7, 8, 9, 10, 11, 12, 14, 20, 21, 24, 27, 28,32, 34, 43, 395, 645, 657, 703, 723: n = A,T,C or G
gnnnnnnnnnnngncgtgcnnggnatnnagtntnccacgcccnatacaggagtgacttggaactccattctatcactatgaagaaaagtggtgttcttttcctcttgggcatcatcttgctggttctgattggagtgcaaggaaccccagtagtgagaaagggtcgctgttcctgcatcagcaccaaccaagggactatccacctacaatccttgaaagaccttaaacaatttgccccaagcccttcctgcgagaaaattgaaatcattgctacactgaagaatggagttcaaacatgtctaaacccagattcagcagatgtgaaggaactgattaaaaagtgggagaaacaggtcagccaaaagaaaaagcaaaagaatgggaaaaaacatcanaaaaaggaaagttctgaaagttcgaaaatctcaacgttctcgtcaaaagaagactacataagagaccacttcaccaataagtattctgtgttaaaaatgttctattttaattataccgctatcattccaaaggaggatggcatataatacaaaggcttattaatttgactagaaaatttaaaacattactctgaaattgtaactaaaggtagaaagttgattttaagaatccaaacgttaagaattggtnaaggctatgatngctttggtcttctaccaccaccagtgaattcatcatgcttaaggcntgatttagcaataccctgtn

SEQ ID NO: 9534 - DNA, 847 bp, Homo sapiens
  misc_feature 1, 5, 605, 609, 613, 623, 668, 697, 739, 742, 752, 753, 757,764, 792, 799, 822, 827: n = A,T,C or G
ntgcncttatcgactactatagggcgaattgggtaccgggccccccctcgaggtcgacggtatcgataagcttgatatcgaattcctgcagcccgggggatccactagttctagagcggccgaggtacttagtattttccccctcttctttctccacatcctcttctctgattcttggtggtcctgaggaggaggaggtgccctctggtgtgataccaaatcttaccgagagcattcccagtagtcctccacagggtcctccacagggtccttcccagagtcctctgagctcctgctgctcctctttttcatggagctcattcagtgaggagtccagcagccagaaaggggaggatacaggcacctgtcagggcctgccagacagtgagtcctctttcacatatacactagatgaaaaggtggccgagttagtggagttcctgctcctcaaatacgaagcagaggagcctgtaacagaggcagagatgctgatgattgtcatcaagtacctgcccgggcggccgccaccgcggtggagctccagcttttggtccctttagtgagggttaattgccgcttggcgtaatcatggtcatagctggttnctgngtgnaaatggtatncgctcacaaattcacacaacataccagccggaagcataaagtggnaaagcctggggggcctaatgagtgagctnactcacattaattgcgttgcgctcactggcccttttcaatcnggnaaacctggcnngccnacttganttaatgaatcggccaaccccccgggagnaggcggnttgcgtatttgggccctttcccnttctnggttaattgacttcttgggg

SEQ ID NO: 9535 - DNA, 607 bp, Homo sapiens
  misc_feature 5, 24, 25, 35: n = A,T,C or G
tcatngttatagcgtagtacctgnnttactatagnagatggttctaccacctcatggtctgctcctaacacccatgtttcagctaaggtgattctctctgcctgctgcacagcccatatcatactattcctcaagttctcatgctactccaagctttatctggccttccttacagtctatcctttgccctttgttccatctacacaaaacaccttgctccccctttttcccattcctcaacccacccaccactcaattttgcaactagttatggaaagttcttcctatcataatttaaccagtaaccttccctcctttgaccacttcctgcttcatgaagccttcctgaataaagagaaaaaatacctcccagatttttgttaaagcaaactaatgcattggaccacaacatttatgcatagtgttgctacctagctttctagatttctctaaaactgccgcaactatgcatgtgcacttgtttgtccatgtcagtgtcatctgctttagattgtaaggacaaggagaggacctgttgaccttgtgctatacagggctcatcatactatgagcatatgggcagttaatactattgtattataaagat

SEQ ID NO: 9536 - DNA, 883 bp, Homo sapiens
  misc_feature 3, 4, 5, 9, 21, 43, 69, 74, 75, 76, 96, 146, 167, 230, 328,376, 445, 499, 527, 546, 585, 614, 621, 625, 645, 648, 664,695, 700, 706, 708, 734, 744, 747, 750, 758, 781, 787, 789,804, 815, 817, 835, 838, 856, 860, 869: n = A,T,C or G
gannntccncttttggaggtngcggtcgcccgggcaggtactntgtacttttttttttttttttttttngggtnnntttttttttttttttcccanagagcaagtttatttggtgaatgctgacggcaaacatcatccaagagagncaagatgggaaagttgctganacaagaaagcctagggaaactttaggctagatacaaaattcacacagggaaaggcacggactntggggagactgggaaggtcctcagccattcagcaccatgcggacgagctccgccccatgggcccgtcaccccgacaggatatgcctcacaaacgcttnatagttgatacaaccattgctgtcctcatgccctgccaccagcatctntacttcttcctctggcatcttctcacccagtgtgacaagaacatgccggatttcagcacccatgacggngccatttccttccttgtcaaacacccgaagtccttcgacataatcctcataggngccctggtccttgttcttggccactgtntgcagcatgggcagaaagngcttcaaagtccagcaccttcacattcatttcatcactnttgggggtccccaggaccttgagcacctnggcgttngtangggtttggcccaagggcctnatnggattcccacactggntgtaccttgggcggtttaaaactagggggtnccccnggctgnangaatttcaattttaagcttattcganacccgtcganctnggngggggggnccggtccccaactttttgttccntttagngnggggtaaattgcgcncttgggggaananatgggcaaaagctgtttnctnggggaaattgttttccgntcanaaatttccnaacaaaatccgagc

SEQ ID NO: 9537 - DNA, 907 bp, Homo sapiens
  misc_feature 4, 5, 524, 526, 527, 528, 529, 530, 531, 533, 534, 535, 536,537, 538, 539, 540, 544, 545, 546, 547, 548, 549, 550, 551,552, 553, 554, 555, 556, 557, 558, 559, 560, 561, 562, 563,564, 565, 566, 567, 568, 569, 570, 571, 572, 573: n = A,T,C or G
  misc_feature 574, 575, 576, 577, 578, 579, 580, 581, 582, 583, 584, 585,586, 587, 588, 589, 590, 591, 592, 593, 594, 595, 596, 597,598, 599, 600, 601, 602, 603, 604, 605, 606, 607, 608, 609,610, 611, 612, 613, 614, 615, 616, 617, 618, 619, 624: n = A,T,C or G
  misc_feature 628, 663, 671, 691, 700, 701, 703, 711, 727, 733, 740, 743,758, 768, 769, 776, 777, 782, 786, 799, 808, 809, 811, 814,821, 834, 851, 852, 854, 858, 860, 865, 866, 867, 869, 877,878, 882, 886, 887, 889, 894, 904, 905, 906: n = A,T,C or G
tagnnccacgcgtccgcgggaaaaactactctttccaagagaagaggtgagacagatcgatcgggaaaatcagaggcttttgaaagaactgtcaagacaggcggaaaagccaggaagcaaaagtacaattcctagatcggctgatcatcccccaaagttatatcacagtgctctcaacagacagaaggaacaacaaaggattgagagagaaaacttggctttattgaaaaggcttgaggccgtgaaaccaacagttggtatgaaacgttcagaacaactgatggactatcatcgcaatatgggctatctcaactcatcaccattgtcaagacgggccagatccactcttggccaatatagcccattaagagcttccaggacatccagtgctacgaagtggtctcaagttgtaggagtgagcgatcagcggttgacccctccagtggccaccctcgaagaagacctaaaccccctaatgtccgtacagcttggttataaaacacttttttactttaaaaaaaaanannnnnnannnnnnnnggannnnnnnnnnnnnnnnnnnnnnnnnnnnnnnnnnnnnnnnnnnnnnnnnnnnnnnnnnnnnnnnnnnnnnnnnnnnaaaangggnggccctttaacttttttaaaaaaaaaacttccaancctccctngactggaaaataaaaggaangcaatgggnngnggaaattntttttggcctttaaangggtcnaaaaaancanttccctcccaatttnccaaaaaagnnttttttnncggcntttnaatggggggtggnccaaccccnnanggnttttatntgttgggaacccnggccccgcccaaaaaanncntttncnttctnnnanaaaaaccnngccngggnntngggtnggggaaaggnnnt

SEQ ID NO: 9538 - DNA, 735 bp, Homo sapiens
  misc_feature 4, 9, 10, 16, 17, 26, 33, 510, 535, 557, 575, 589, 666, 675,680, 685, 703, 715: n = A,T,C or G
gttncatgnngcaacnngacttcctntctgtanggccaattgggccctctagatgcatgctcgagcggccgccagtgtgatggatatctgcagaattcggcttagcgtggtcgcggccgaggtacaaatccaggtgcagtgccagcaagtatttcaaataaatttcaacgacttgatattcaagtccaaactaaatatttaatgttttctttattgcaaatatgatgtctttgacctgaggtatagagttgtcctctagaatctttgcataaggcatagggacatcagcaccagtgacacgaacagcaggagcatccaggaaattgaacgcaggaccttccatgatcctggcacagatttcagctcctactccaaactgtggccagcctccttccacagttacaagatgatttgtcttcatgacactggcttctatggtttccatgtccattggtctaatggtacctgcccgggcggccgctcgaaagccgaattcagcacactggcggncgttctagtggatccgagctcggtnccaagcttggcgtaatcatggncatagctgtttcctgtgngaaattgtatccgntcacaattccacacaacatacgagccggaacataaagtgtaagcctggggtgctaatgagtgaagctactcacattnattgcgtgngctcntgccnctttcaggcgggaaactntcgtgccactgntttatgaatcggcaacgccg

SEQ ID NO: 9539 - DNA, 826 bp, Homo sapiens
  misc_feature 3, 4, 8, 9, 12, 29, 32, 236, 345, 520, 622, 638, 654, 656,662, 685, 691, 725, 730, 749, 753, 763, 770, 783, 804, 819,820, 826: n = A,T,C or G
cgnncganngtnacaagttatatttctgnccnggaacaaagtctcacagatgtgatgaatgtggtaaatgcttcacgagaagttcaagccttatccgccataaaataatccacactggagaaaagccctatgaatgtagtgagtgtgggaaagccttcagtcttaactccaaccttgtcctgcatcagaggatccacacaggagagaaacctcatgaatgtaacgagtgtggcaanggccttaagccacagttccaatctcatcctccatcagcgcatccactctggagagaaaccttatgaatgtaatgagtgcgggaaggccttcagccagagctcggacctnaccaagcatcagagaattcacacgggggagaaaccctatgaatgtagtgaatgtggaaaagctttcaaccgaaactcatacctgattttgcatcggagaattcacactcgagaaaagccctacaagtgcactaagtgtggcaaggccttcacccgcagcttcacccttactctgnatcacagaatccatgccagagagagagcctttagtacagcccaccttccttgatgcatttggcgccgtccttgaaagttgtgtgtaaaggaagaattgcctnaagcctttcccctttngttctaaatatttcananatgtgnctctggagggaaaagaaatccgncttacngattaaaacaaagtccccttaggtcctttatccntaagnggtctgcctttttttaatnggcntatcttccanagccttnaggaaggtatttncggtatcccggattccccganaaaccccctttgaanntttttn

SEQ ID NO: 9540 - DNA, 440 bp, Homo sapiens
  misc_feature 1, 10, 71, 76, 93, 102, 207, 209, 217, 218, 219, 229, 232,233, 234, 255, 267, 276, 281, 288, 292, 297, 307, 328, 362,373, 380, 384, 387, 396, 406, 414, 417, 425, 427, 428, 433: n = A,T,C or G
nagcgcccgnatcactactatagggcgaattggagctcccccgcggtggcggccgacgtactttctttttnttttntttttttttggctctanagggggtanagggggtgctatagggtaaatacgggccctatttcaaagatttttaggggaattaattctaggacgatgggcatgaaactgtggtttgctccacagatttcagancnttggccgnnntataccccgntcnnntagcggtgaaagtggtttggnttaaacatccgntaattgcanctgtntttaagnctantgtgnggacagctcntgagtgcaagaccttcttggnacggaattattatacccaatgggggctttaatcngaagtacctgnccgggcngccnctntaaaactanagggatcccncgggctgnaangaattctntnntcaancctatcc

SEQ ID NO: 9541 - DNA, 616 bp, Homo sapiens
  misc_feature 5, 9, 11, 12, 13, 38, 47, 54, 60, 97, 415, 421, 423, 427,429, 433, 438, 444, 446, 449, 451, 452, 455, 456, 459, 462,464, 469, 474, 477, 478, 481, 484, 486, 491, 492, 493, 495,496, 497, 498, 499, 500, 501, 502, 503, 504, 505, 506: n = A,T,C or G
  misc_feature 507, 508, 509, 510, 511, 512, 513, 514, 515, 516, 517, 518,519, 520, 522, 523, 524, 525, 526, 527, 528, 529, 530, 531,532, 533, 534, 535, 536, 537, 538, 539, 540, 541, 542, 543,544, 545, 546, 547, 548, 549, 550, 551, 552, 553, 554: n = A,T,C or G
  misc_feature 555, 556, 557, 558, 559, 560, 561, 562, 563, 564, 565, 566,567, 568, 569, 570, 571, 572, 573, 574, 575, 576, 577, 578,579, 580, 581, 582, 583, 584, 585, 586, 587, 588, 589, 590,591, 592, 593, 594, 595, 596, 597, 598, 600, 601, 602: n = A,T,C or G
  misc_feature 603, 604, 605, 606, 607, 608, 609, 612, 613, 614, 615, 616: n = A,T,C or G
gttgntgcngnnnctgtgtggcttgctagccttgcagnacacagtgnaacctgnaacagnaactggctatccatattctgaaatctatgggcttagnaagtagttctgatgactggagacaacagtaaaacagctagatctattgcttctcaggttggcattactaaggtgtttgctgaagttctaccttctcacaaggttgctaaagtgaagcaacttcaagaggaggggaaacgggtagcaatggtgggagatggaatcaatgactccccagctctggcaatggctaatgtgggaattgctattggcacaggcacagatgtagccattgaagcagctgatgtggttttgataaggaatgatcttctggatgtagtggcaagtattgacttatcaagaaagacagtcaagaggnttcggntnaatntntgantttgntctaangnatnanntgnntgnaangnccgtnactgntgnnggnttntnccccnnntnnnnnnnnnnnnnnnnnnnnnnnnnntnnnnnnnnnnnnnnnnnnnnnnnnnnnnnnnnnnnnnnnnnnnnnnnnnnnnnnnnnnnnnnnnnnnnnnnnnnnnntnnnnnnnnnnttnnnnn

SEQ ID NO: 9542 - DNA, 639 bp, Homo sapiens
  misc_feature 5, 10, 562, 608, 633: n = A,T,C or G
gttgntttcncgcgccgcggacgcgtgggcggacgcgtgggccagcggcgggtgtgagagtccgtaaggagcagcttccaggatcctgagatccggagcagccggggtcggagcggctcctcaagagttactgatctatgaaatggcagagaatggaaaaaattgtgaccagagacgtgtagcaatgaacaaggaacatcataatggaaatttcacagacccctcttcagtgaatgaaaagaagaggagggagcgggaagaaaggcagaatattgtcctgtggagacagccgctcattaccttgcagtatttttctctggaaatccttgtaatcttgaaggaatggacctcaaaattatggcatcgtcaaagcattgtggtgtcttttttactgctgcttgctgtgcttatagctacgtattatgttgaaggagtgcatcaacagtatgtgcaacgtatagagaaacagtttcttttgtatgcctactggataggcttaggaattttgtctttctgttgggcttggaacagggctgcacacctttctgctttatcttgggtncacatatagccttaagttacattagctgcttatgaatgcaattaanttaattttccgaaccccctatcctnatcaga

SEQ ID NO: 9543 - DNA, 527 bp, Homo sapiens
  misc_feature 277, 293, 299, 311, 313, 314, 333, 338, 339, 340, 348, 352,358, 361, 363, 366, 367, 369, 370, 374, 375, 380, 381, 388,389, 395, 403, 407, 409, 410, 411, 417, 418, 419, 420, 426,437, 443, 444, 445, 446, 449, 453, 457, 459, 460, 465: n = A,T,C or G
  misc_feature 469, 470, 471, 482, 483, 485, 486, 487, 490, 491, 494, 495,498, 500, 506, 509, 511, 517, 518, 521, 524, 527: n = A,T,C or G
gtaatacgactcactatagggcgaattgggccctctagatgcatgctcgagcggccgccagtgtgatggatatctgcagaattcggcttagcgtggtcgcggccgaggtacaagcattacaaagactcctgtgacgaaaacacaattgttcaaagctttccacagtgtccacagactcagtttcagggacagcctggactactttcctttcacacaaacaaacctccccgtgttctctcctgggccagcggccgcctccttggtgtggtctttctgngtgaatgtcacaaggncggtgncaggagggggtngnntattctatttatttttatnatatnnntatcgatngcantcttantgntntanncnntgcnntgttnnttaattnntcattntcttattntttntnnnattcannnnaaaatntttattcttanacatannnntantttnttcntnntatcncttnnntatatatttanntnnntgnntannatnantattancgncntaagannatnatntcn

SEQ ID NO: 9544 - DNA, 620 bp, Homo sapiens
  misc_feature 87, 88, 92, 93, 96, 97, 103, 104, 124, 125, 130, 131, 133,140, 141, 145, 147, 154, 155, 157, 159, 162, 163, 164, 165,169, 185, 186, 194, 195, 200, 201, 202, 203, 205, 213, 215,217, 220, 222, 223, 229, 231, 234, 235, 243, 246, 247: n = A,T,C or G
  misc_feature 248, 253, 258, 260, 261, 262, 264, 266, 269, 273, 274, 275,278, 283, 285, 288, 298, 306, 308, 309, 310, 313, 319, 324,327, 328, 329, 331, 332, 333, 340, 341, 342, 349, 350, 351,355, 363, 365, 366, 368, 371, 372, 377, 378, 379, 380: n = A,T,C or G
  misc_feature 384, 385, 386, 387, 388, 391, 392, 394, 395, 397, 398, 399,402, 407, 409, 410, 411, 413, 420, 423, 427, 430, 445, 446,447, 451, 452, 454, 455, 456, 460, 461, 462, 466, 467, 468,469, 472, 473, 474, 475, 476, 478, 479, 492, 496, 497: n = A,T,C or G
  misc_feature 503, 508, 510, 511, 515, 520, 521, 524, 529, 535, 542, 544,545, 550, 556, 560, 580, 582, 588, 596, 598, 604, 609, 611: n = A,T,C or G
gccccgcgtccgttttttttttttttttttttttttttttttttttttttttttttttttttttttttttttttttttttttttttnngggnncannaaaatnnaaggggtttttttttttttnncccannangattttnncccnanttttttnncntnaannnnaaanttggggggcccggggnntttttttnnttttnnnngnttttcccnangnctngnntttgancnccnntttttttnaannnaaaanttccngnnngncnccnaaannnttngcccngncanggggggaaancctttaantnnnaantttttnctttngannntnnnttttttnnnaaaaaannntttnaacccccnanngnccnnttttnnnngaannnnnaanngnngnnnaanaaaangnnngnaaaaaanccncccnccngggggggggggaaannntttnncnnncccnnngggnnnnaannnnngnnggggttttttttnaaanntttaanccccncnngggnttttnnaanccttntttttnggaaaancnnttttnggaaanaaantttttttttttttttaaaangnaaaggnccccattngnccaaanttttncnggggggggg

SEQ ID NO: 9545 - DNA, 810 bp, Homo sapiens
  misc_feature 2, 3, 5, 13, 18, 606, 623, 624, 631, 632, 633, 634, 635,636, 637, 639, 640, 641, 642, 643, 644, 645, 646, 647, 648,649, 650, 651, 652, 653, 654, 655, 656, 657, 658, 659, 660,661, 662, 663, 664, 665, 666, 667, 668, 669, 670, 671: n = A,T,C or G
  misc_feature 672, 673, 674, 675, 676, 678, 680, 681, 682, 683, 684, 685,686, 687, 688, 689, 690, 691, 693, 694, 695, 696, 697, 698,699, 700, 701, 702, 703, 704, 705, 706, 707, 708, 709, 710,713, 714, 715, 719, 720, 721, 722, 723, 724, 725, 726: n = A,T,C or G
  misc_feature 727, 728, 729, 730, 731, 732, 733, 734, 735, 736, 737, 738,739, 740, 741, 742, 743, 744, 745, 746, 747, 748, 749, 750,751, 752, 753, 754, 755, 756, 757, 758, 759, 760, 761, 762,763, 764, 765, 766, 767, 768, 769, 770, 771, 772, 773: n = A,T,C or G
  misc_feature 774, 775, 776, 777, 778, 779, 780, 781, 782, 783, 784, 785,786, 787, 788, 789, 790, 791, 792, 793, 794, 795, 796, 797,798, 799, 800, 801, 802, 803, 804, 805, 806, 807, 808, 809,810: n = A,T,C or G
gnngnttggatanaactnactattgggcgaatggggccctctagatgcatgctcgagcggccgccagtgtgatggatatctgcagaattcgcccttagcgtggtcgcggccgaggtacgcggggagggaaccgctcagatacccttccacaccgtggaaactttgttcttaccctcttgacgaaaaatcttgctgctgctcactctttgggtccacaccacctttaagagctacaacgatcaccacgacagtctgcggcttcattcttgaagtcagcgacaccacaaacccaccagaagggagaaactccagacacatctgaaggaacaaactccagacacaacatctttaacagctgtaacacacactgtgaaggtccacggcttcattcttgaagccagcgagaccacgaaccctctggaaggaaccaactctggacacagcaggacgtgagacttctacctgctcactcagaatcatttccgcaccaaccatggccacgtttgtggagctcagtacctgcccgggcggccgctcgaaagggcgaattccagcacactggcggccgttacttagggatccgagctcggtaccaagcttggcgtnatcatggtcatagctgnntttcggnnnnnnngnnnnnnnnnnnnnnnnnnnnnnnnnnnnnnnnnnnnnngnannnnnnnnnnnntnnnnnnnnnnnnnnnnnnggnnnattnnnnnnnnnnnnnnnnnnnnnnnnnnnnnnnnnnnnnnnnnnnnnnnnnnnnnnnnnnnnnnnnnnnnnnnnnnnnnnnnnnnnnnnnnnnn

SEQ ID NO: 9546 - DNA, 911 bp, Homo sapiens
  misc_feature 4, 496, 599, 600, 609, 631, 632, 652, 689, 694, 707, 710,711, 718, 720, 721, 722, 740, 767, 781, 789, 795, 804, 805,806, 807, 810, 813, 816, 822, 830, 832, 838, 845, 851, 853,859, 861, 862, 864, 867, 868, 869, 872, 877, 886, 888: n = A,T,C or G
  misc_feature 897, 898, 899, 903, 904, 906: n = A,T,C or G
gttngagcgcgcgtaatacgactcactatagggcgaattggagctccaccgcggtggcggccgcccgggcaggtaccctaagacgctgctaattgactgccacttcgcaactcaggggcggctgcattttagtaatgggtcaaatgattcactttttatgatgcttccaaaggtgccttggcttctcttcccaactgacaaatgccaaagttgagaaaaatgatcataattttagcataaacagagcagtcggcgacaccgattttataaataaactgagcaccttctttttaaacaaacaaatgcgggtttatttctcagatgatgttcatccgtgaatggtccagggaaggacctttcaccttgtctatatggcattatgtcatcacaagctctgaggcttctcctttccatcctgcgtggacagctaagacctcagttttcaatagcatctagagcagtgggactcagctggggtgatttcgccccccatctncgggggaatgtttgaagacaatttttgggtacctcaatgagggaagtggaggaggatacagtgctactaccaactagtggataagaggccaggggatgccttnnttaaccctnctaccatggtcccttgggccgnntctaagaacctagtgggatnccccccgggctggcagggaatttccaatattcaaagncttantcggattacccgntcnnaccttcnannngggggggggcccccggtnccccaatctttttgtttccctttttantggaggggttaatntggccccncttggncgttaaatnnnnggncanaancttgtnttcctggntnggaaanttttatncccttncnaatttncnnanaannnatnctaanccccgggancnttaaaattnnnaaanncntgggg

SEQ ID NO: 9547 - DNA, 480 bp, Homo sapiens
  misc_feature 10, 19, 469, 474, 477, 478, 479, 480: n = A,T,C or G
ataactactnctgagggcnaattggagctccaccgcggtggcggccgcccgggcaggtacgcgggggcccttgttctctagaagcaaggagccctctgaccccttcttttaaacaaattcttttgtctttgtcttcatttctgcatttgtcctccttcgtttagtcctacagtaacagccacaatggcacccaaacagagacttgaatgaagaaggtctgctggagcagagaaagtgaaactgatcagatgaacgaggaaccccaggacgagtcagccagaggaggatataaagtcagtgccctgaggaggtacctcggccgctctagaactagtggatcccccgggctgcaggaattcgatatcaagcttatcgataccgtcgacctcgagggggggcccggtacccagcttttgttccctttagtgagggttaattgcgcgcttggcgtaatcatggtcatagctgnttctnggnnnn

SEQ ID NO: 9548 - DNA, 620 bp, Homo sapiens
  misc_feature 1, 3, 5, 21, 27, 28, 34, 36, 67, 369, 370, 372, 375, 376,383, 386, 392, 397, 398, 399, 400, 404, 411, 414, 415, 416,419, 420, 426, 427, 428, 430, 431, 435, 442, 443, 448, 455,464, 468, 469, 484, 487, 491, 492, 493, 494, 499, 500: n = A,T,C or G
  misc_feature 503, 505, 512, 515, 516, 523, 527, 530, 533, 534, 536, 537,538, 539, 542, 545, 546, 547, 548, 549, 550, 551, 552, 553,554, 555, 556, 557, 558, 559, 560, 561, 562, 563, 564, 565,566, 567, 568, 569, 570, 571, 572, 573, 574, 575, 576: n = A,T,C or G
  misc_feature 577, 578, 579, 580, 581, 582, 583, 584, 585, 586, 587, 588,589, 590, 591, 592, 593, 594, 595, 596, 597, 598, 599, 600,601, 602, 603, 604, 605, 606, 607, 608, 609, 610, 611, 612,613, 614, 615, 616, 617, 618, 619, 620: n = A,T,C or G
ncntnctggtactcactctgntggccnnattggnanctccaccgcggtggcggccgagtacgcgggnattgtagttattttcaaatctttgcttgataagtattaagaaatattggacttgctgccgtaatttaaagctctgttgattttgtttccgtttggatttttgggggaggggagcactgtgtttatgctggaatatgaagtctgagaccttccggtgctgggaacacacaagagttgttgaaagttgacaagcagactgcgcatgtctctgatgctttgtatcattcttgagcaatcgctcggtccgtggacaataaacagtattatcaaagagaaaaaaaaaaaaaaaaaaaaaaaaaaaanntnccnncccgggnggncctttnaaaannnngggnccccccnggnnnggnnaatttnnntnnaacntttttannccccnccccccnggggggggncccnnccccccctttttttnccntttnnnnggggnnaantnccccccnggnnaaaaaangggnaanttnntnnnnccnggnnnnnnnnnnnnnnnnnnnnnnnnnnnnnnnnnnnnnnnnnnnnnnnnnnnnnnnnnnnnnnnnnnnnnnnnnnnn

SEQ ID NO: 9549 - DNA, 714 bp, Homo sapiens
  misc_feature 6, 699: n = A,T,C or G
acgccngcttggtccgagctcggatccctagtaacggccgccagtgtgctggaattcgcccttagcgtggtcgcggccgaggtacaaggcatgatgagtccttttgcttttaggcttttgacttctggttttagactttctttagcttctgttgttagacaacattgtgcaagcttggtttttataagtttgcatggattaaactgaacttaatgaaattgtccctccccccaaattctcagcacaatttttaggcccacaaggagtcaagcacctcaaggagatcttcagtttgaacttggtgtagacacagggatactgatgaatcaatattcaaattagctgttacctacttaagaaagagaggagaccttggggatttcgaggaagggttcgtaagggagattttagctgagaaataccatttgcacagtcaatcacttctgaccaagttatcagaaaaaggagaaaagaatgtctccccactaaatgttctagggtggtgagaaatctagggtggttatctaaatcaacaatatttagatattccaatatctaaatattgttggaaatactctcctgaagtgttcattgaactctaagagagacagcttgtgtatcagtggcagggtttaaggttcattttttattcccatattaatccttaataatttagacaaatttccttctgagtttaangataaaatgggatgg

SEQ ID NO: 9550 - DNA, 436 bp, Homo sapiens
tcggccgcgaaacactacttagggcgaattggagctccccgcggtggcggccgaggtacattttcactcctgctctaaaacttgcctcagtctctcactgtgccttatgcccctcagctgaattctttcttctgagcaggcaggaattgaggttgctgcagacgtgtatgcatttgccaccagtaacatactttggtgccacatgactaggatatgttctctagtgctaacatgttcgtttacagttcttaggactccctgatagaaaaaaacacaaaaaaaaacacaaaaaaacccaaccaaccaaacaaacaaacaaaaaaaaacacaggagtttctcccaaaaagaagtctgcagtgtcttttctgttttctctggaaggtatcccagggtgttagatttctgttgtttttcccttatgtggcacccgaagtt

SEQ ID NO: 9551 - DNA, 782 bp, Homo sapiens
  misc_feature 1, 4, 5, 6, 8, 11, 546, 637, 662, 724, 748, 760, 764, 766,772: n = A,T,C or G
nggnnngngcncgtccgagagaagtggttcaggttgaagatggacttgttaggaacgtgatcaagtcctttaagtacttgtttctttttcaggttgtgatgtggccattccgaattttgttgagagtttggtttataattgtctcttttgtcttgttagtaaacattcatttgcaacagttttgaaggtgctgagtggaaaaccgaaacacatggttattgcgtattggacctagaatgaaataattgcctcaatatttaacaacaagccattcttatctcaaagatttaaattcccgaatgtcccattcgcaaatcatatgcaattgaagtgagcagcatgagcatctgggtcatgagggccttcatttacgtaaatttgtcactaaaacccagtagtagctctacaaaatcttaaactgctgcagtgctcaaggagatggaatatctttgtcattggtgctgaggagagcatttcggtagaagacagttgcgcctgaagattgagtgtaaatcattcaaaccagtggttctcagtgttggctgnatacactttgtagcacttttggaatgttggaagacacatcgatgcttgggttccgatgccaagatctgatgtgggctggaatataaccggncataaggtttttaaaacttttgggntttcaatatgcttgcaaggttagaaccctgtggaaattcacctgggttctcatttgcaaatnaaaaaaaaatcttgtcctccttantcctaaagggtnttgngnaaaggnaatatgggat

SEQ ID NO: 9552 - DNA, 618 bp, Homo sapiens
  misc_feature 1, 3, 5, 6, 9, 14, 15, 20, 30, 49, 52, 63, 91: n = A,T,C or G
ntntnnggngtcgnncccgncgtccgcggncgcgtggggtcttataagnagnaatgggtgagnattttaaaatttatgtatctatgtaagnactggtgatagtaaatcttaaaacagtccagtggcaatctgctgctcagttaataattactaaaattcttggatccctgaatagaaattaaaaaaaaaaaatacaagaggcagtagagtcaatacaagcttaatacaagcttagagtaaatacaagcttagagtcacttgatgactgttttactgttctccatattgtttttatttttaattaggccctaccatagtatttcacactaaaaacaaaggaattatattggctaatatagtctttgactcatttcggtatctcagtaaaagtaaactgtcttttcattgtttcaccagttggtggtgaaaatagcagtatgcatgcattatcactggtgtcacaaactgtaagctttgtaagttagcactttactcctatagctgatgtaatcaaactttaaaataaacatttcactaaaccttttaaaaataatacatttgttttggattgtatagcacgaccatgtggtaccaatttggatgaattcttgatagatc

SEQ ID NO: 9553 - DNA, 849 bp, Homo sapiens
  misc_feature 4, 448, 469, 603, 680, 689, 701, 702, 723, 725, 726, 734,742, 743, 765, 773, 776, 786, 790, 795, 796, 803, 805, 810,811, 815, 816, 818, 819, 821, 823, 824, 825, 826, 827, 829,830, 832, 833, 836, 837, 838, 839, 840, 842, 848: n = A,T,C or G
agancactcactatagggcgaattggccctctagatgcatgctcgagcggccgccagtgtgatggatatctgcagaattcgcccttagcgtggtcgcggccgaggtactcttgctcttttagctagagtgtatgtgaaaataaagaaatacatcattgtattcacaaccatgtgtcttcattataactttttgtttaaaaaatttttagttcaagtttagttcattgatattatcctctgaatgcagttaaggctgggcagaaattctactcatgtgacatctgccacaggtctattttgaagcttttcttctaatggcaatgtttgtccttaccaggatttaatctatagaattgtctctcaactctgcttttctccagttccagataacgtccttaagaccatctgttcaggggttcacaaaactcaaatttgtgtcattctattntatttattttattttttattnccttccctcataccttgcccattccctctgaatattaggtgtgatgtcaacagcatgttagaaggatcaatgggaaggcaatgattgaaaacatttcaatgaaccttaatagtggtcctttgaggagcacccangagaatatctggtcatagatctttttttaaaatgcagttttataaaaccctaacagcggtgatatcattagactgtntgaatcaantttattacctanngtacctgccccggccggccgntnnaaagggcnaattccanncactggcggccgtctaatggancccaactnggnccaactggcnaatnatggnnatactgntnctggnnaaanngnntncnnnnnanncnncannnnnanccgganc

SEQ ID NO: 9554 - DNA, 628 bp, Homo sapiens
  misc_feature 1, 5, 6, 8, 14, 28, 30: n = A,T,C or G
ntttnncntttganacccgattcgaccncncgtccgcaagatggcggcgccaaaggggaagctttgggtccaggcccaactggggctcccgccgctgctgctgttgactatggcgctggccggaggctcggggactgcagcggccgaagcctttgactcggtcctgggagacacagcgtcctgtcaccgggcctgtcagctgacctaccccttgcacacctacccgaaggaagaggagttatacgcatgccagagaggctgcaggctgttttcaatttgccagtttgtggatgatgggcttgatttaaatcggaccaagctggaatgtgaatctgcgtgcacagaagcatattcccaacctgatgagcagtatgcttgtcatcttggctgccaggatcagttgccatttgctgaactgagacaagaacaactcatgtccctgatgccaagaatgcatctcctcttccctctgactctggtgaggtcgttctggagtgacatgatggactctgcacagagcttcataacctcttcatggactttttatcttcaagccgatgacggaaaaatagttatattccaagtctaagccagaaattcagtatgcaccgcaattggagcaggagcc

SEQ ID NO: 9555 - DNA, 699 bp, Homo sapiens
  misc_feature 2, 67, 146, 217, 439, 449, 520, 522, 530, 546, 548, 574,585, 586, 589, 594, 597, 611, 615, 617, 618, 620, 621, 622,623, 624, 625, 630, 631, 633, 637, 642, 645, 646, 652, 654,656, 659, 660, 662, 665, 666, 669, 673, 674, 675, 678: n = A,T,C or G
  misc_feature 681, 683, 686, 693, 697: n = A,T,C or G
gnggtcttttttttttttttttttttttttttgcattcagaaaaagtattattcacaccacaaaagnataatcacaacaaaatatacactaacttaaaaaacaaaagtattatagtgacataaaatgttatattctctttttaagngggtaaaagtattttgtttgcttctacataaatttctattcatgagagaataacaaatattaaaatacagngatagtttgcatttcttctatagaatgaacatagacataaccctgaagcttttagtttacagggagtttccatgaagccacaaactaaactaattatcaaacacattagttatttccagactcaaatggatacacattcaaccaataaactgagaaagaagcatttcatgttctctttcattttgctataaagcatttttttcttttgactaaatgcaaagngagaaattgnattttttctccttttaattgacctcagaagatgcactatctaattcatgagaaatacgaaatttcaggggntnatcttctnccttacttttgggggncnacaaccagcatatcttcatggctggnaaattcatggnntgnggaantcncggctgactttggnaagntnncnnnnnnaaaannancggnaaggnctnntaggtncnancanngnctnnccncttnnnaanccngnccngctgcgnccgngg

SEQ ID NO: 9556 - DNA, 891 bp, Homo sapiens
  misc_feature 3, 4, 32, 36, 423, 439, 443, 446, 448, 455, 466, 467, 496,502, 504, 506, 513, 514, 516, 517, 524, 528, 534, 561, 565,574, 579, 584, 588, 603, 617, 621, 622, 623, 626, 631, 636,637, 640, 648, 649, 654, 655, 659, 666, 671, 672, 674: n = A,T,C or G
  misc_feature 676, 679, 681, 682, 683, 684, 698, 701, 706, 710, 713, 714,715, 723, 725, 726, 727, 728, 734, 735, 741, 745, 747, 758,759, 766, 780, 781, 786, 787, 791, 800, 812, 817, 818, 819,820, 821, 822, 823, 825, 827, 828, 833, 843, 864, 866: n = A,T,C or G
  misc_feature 872, 874, 877, 882, 883, 888, 891: n = A,T,C or G
agnnggcccagcttggtaccgagctcggatcnctantaacggccgccagtgtgctggaattcgcggccgctgatttttcttttttaatttctgcccagttacaacaacgaaatgggaaaccacaattaaaattcacaaaccatggcatgaaaaacaacacgcaccccatcaggaattacaccaaaccccttttcctttttattcattcaaaagagagtccaatacacaagtgtcaaatatgagcactgtcattttttttttcttagaagggggaaaaacatttattttggcagtgctttgacaattccaggaagtggttttgataccacaagttgcaggaatagaaaccctaacaaacttggagggcatttgtttgagaggcaagggacgccttgcttagaaaacattcctcttgtgcttagngaatcacctatcgccncggnggncntgttggntttttccaggnnctgaaaaaaaaaccgggattttttgtgcntacacngntnaaagacnntnnaagggangagntttttntgtttttaaaacccttcccaaatgganaaanatttttaanacttnttttngggngaatctttttggggnaaaaaccccccctnaaannnggngcccnttttnnttnaaaacacnntgtgnncccnggggggngggtnntnanacncnnnntttttttttggggnggnggaanaacnccnnnaaaaaaancnnnngggggnnaaaaantttntnttttttaaaannggggggnggtttttttttttnnaaaannaaancttttttgngggggggggggnccccnnnnnnngnannttttntttttttttntttttttcccccggggggggngncccccnanatnttaanntaatnttn

SEQ ID NO: 9557 - DNA, 497 bp, Homo sapiens
  misc_feature 1, 3: n = A,T,C or G
nanctactattggcgaattgggccctctagatgcatgctcgagcggccgccagtgtgatggatatctgcagaattcgccctttcgagcggccgcccgggcaggtacttttctccttcagcttcctgtccttcatcctgaagcttcagggcaaggagaaccttaatatatccattgtctggatttaagcggacagcctgccttaggggaagcaaagaaaatggcttgtgattttttgtggctaatttaaagccatccaggcgataggcagagatcgcatacccagcgctggattcagggttttcagggtccacttcaagcaccttttcaaagcaggccttggcccgttcataattctttcctccacacttcagcaaggcccatccttcctcacagtctatttctggacactccattctatagcggaagggatttgaaagcttcttgcaaatgttctccaccttgtccaggtaaagtctgggcttctgccagtctgcca

SEQ ID NO: 9558 - DNA, 659 bp, Homo sapiens
  misc_feature 6, 15, 16, 17: n = A,T,C or G
cttttncgtccgggnnnacctgcaaaacccctgccggcctccaggtgctcaacgattacctggcggacaagagctacattgaggggtacgtgccatcacaagcagacgtggcagtatttgaagcagtttctggtccaccacctgctgacctgtgtcatgccctacgttggtataatcacatcaagtcgtatgaaaaagaaaaggccagcctgccgggagtgaagaaatctttgggcaagtatggccctagcagtgtagaagacaccacaggaagtggagctgcagatgctaaggatgatgacgacattgatctctttggatctgatgatgaggaggaaagtgaggaagcaaagaagctacgagaagaacgccttgcacagtatgagtccaagaaagctaaaaagcctgcagttgttgcgaagtcttccatcctactagacgtgaagccttgggatgatgagacggacatgacaaaactagaggagtgtgtccgaagcattcaagcagatggcctggtgtggggctcctctaaattggttccagtgggatatggaattaaaaagcttcaaatacagtgtgtagttgaagatgataaggttggaacggatatgctggaagagcaaattactgcttttgaggactacgtacagtccatggat

SEQ ID NO: 9559 - DNA, 605 bp, Homo sapiens
  misc_feature 14, 15, 26, 36, 38, 57: n = A,T,C or G
gccccgcgtccggnngcggcgtgganatcgctgggnancggttgcggcgtgccgggnagctgagttatagctgtgacttctgccctgccaggccgcacacaagctggctgacccggtttgtaaaaatggaatttcaagcagtagtgatggcagtaggtggaggatctcggatgacagacctaacttccagcattcccaaacctctgcttccagttgggaacaaacctttaatttggtacccattgaacctgcttgagcgtgttggatttgaagaagtcattgtggttacaaccagggatgttcaaaaggctctatgtgcagaattcaagatgaaaatgaagccagatattgtgtgtattcctgatgacgctgacatgggaactgcagattctttgcgctacatatatccaaaacttaagacagatgtgctggtgctgagctgtgatctgataacagacgttgccttacatgaggttgtggacctgtttagagcttatgatgcatcacttgctatgttgatgagaaaaggccaagatagcatagaacctgttcccggtcaaaaggggaaaaaaaaagcagtggagcagcgtgacttcattggagtg

SEQ ID NO: 9560 - DNA, 852 bp, Homo sapiens
  misc_feature 1, 2, 3, 27, 522, 566, 619, 623, 662, 669, 683, 702, 736,753, 756, 762, 767, 768, 773, 777, 790, 808, 815, 816, 820,824, 826, 827, 832, 836, 839, 844, 846, 848, 850: n = A,T,C or G
nnnatatgactactataggggcgaatngggccctctagatgcatgctcgagcggccgccagtgtgatggatatctgcagaattcgccctttcgagcggcccgcccgggcaggtactgagctccacaaacgtggccatggttggtgcggaaatgattctgagtgagcaggtagaagtctcacgtcctgctgtgtccagagttggttccttccagagggttcgtggtctcgctggcttcaagaatgaagccgtggaccttcacagtgtgtgttacagctgttaaagatgttgtgtctggagtttgttccttcagatgtgtctggagtttctcccttctggtgggtttgtggtgtcgctgacttcaagaatgaagccgcagactgtcgtggtgatcgttgtagctcttaaaggtggtgtggacccaaagagtgagcagcagcaagatttttcgtcaagagggtaagaacaaagtttccacggtgtggaagggtatctgagcggttccctgctccccgcgtacctnggcccgcgaccacgctaaagggcgaattccaacacactggcggncgttactagtggatcccaactcggtccaaacttgggggtaatcatgggcatanctgnttcctgtgtgaaaatggtatcccttacaattcacacaanatacganccggaagcataaantgtaaacctggggtgcctnatgagtgagctaactcacatttattgcgttggcntactggcccgttttcantcnggaaanctgtnnggcanctgnattaatgaatcgnccaccccccgggaaaagnggtttgnntttngggncnnttccntttnctngttantnantngg

SEQ ID NO: 9561 - DNA, 940 bp, Homo sapiens
  misc_feature 234, 333, 346, 349, 354, 360, 377, 378, 380, 382, 386, 390,392, 402, 404, 410, 412, 422, 437, 440, 446, 447, 463, 474,482, 495, 499, 515, 516, 517, 521, 523, 524, 526, 529, 530,532, 533, 538, 539, 541, 546, 548, 549, 552, 553, 554: n = A,T,C or G
  misc_feature 556, 557, 565, 566, 568, 571, 576, 577, 581, 595, 596, 598,600, 604, 606, 609, 613, 614, 616, 617, 619, 620, 621, 623,624, 625, 627, 628, 631, 633, 634, 639, 642, 643, 647, 648,650, 652, 653, 660, 664, 665, 669, 670, 671, 676, 679: n = A,T,C or G
  misc_feature 683, 685, 686, 688, 690, 694, 695, 696, 698, 699, 701, 707,708, 709, 710, 716, 720, 730, 731, 732, 735, 739, 742, 745,751, 757, 760, 763, 767, 772, 773, 774, 775, 779, 781, 782,788, 790, 793, 794, 802, 803, 804, 808, 810, 815, 820: n = A,T,C or G
  misc_feature 821, 822, 823, 825, 828, 829, 830, 831, 832, 835, 836, 837,841, 850, 853, 854, 855, 857, 859, 868, 870, 871, 872, 880,883, 884, 889, 890, 894, 895, 896, 899, 901, 903, 919, 920,921, 925, 926, 928, 935: n = A,T,C or G
ggcgaattggagctccccgcggtggcggccgaggtactgagctccacaaacgtggccatggttggtgcggaaatgattctgagtgagcaggtagaagtctcacgtcctgctgtgtccagagttggttccttccagagggttcgtggtctcgctggcttcaagaatgaagccgtggaccttcacagtgtgtgttacagctgttaaagatgttgtgtctggagtttgttccttcanatgtgtctggagtttctcccttcttggtgggtttgtggtgtcgcttgactttcaaaaaatggaaaccccaagacttgtcggtgggggatccgttgtaancctcttttaaaanggnggggngtgggnccccaaaaaaaggtganncncnccanccangnatttttttcntncaaagnanggggttaaanaaacaaaagtttttnccnccgggnntttggaaaaaggggantttttgaaccngggttccnttggtttccccgnggtnaccttggccccggggnnnaaanannanaanntnntcccnnangggcntnntannnannaactaaanntntgnatttnntttnaaacaaaaaccccnncncntttnanaancggnncnncnnngnnncnnaancnnggganaannttcnntntnnaagttcnaacnnggtnnncaacnaanattntnntncnttgnnntnntncccctnnnnaaaaantttntacctttccnnnagntttnacnccntttttnacagtnttnttnaaanggggnnnnaacnanngggctncntannaaaaaatnnntttngnttttncctcnnnnanaannnnnatnnntttnaaaaaaaanatnnngntnctttaatcntnnnaaaaaaanacnnacatnngttnnnggngngnttttttttttttttannntaanntnccccctnaaaaa

SEQ ID NO: 9562 - DNA, 882 bp, Homo sapiens
  misc_feature 3, 562, 567, 597, 615, 621, 651, 656, 660, 667, 679, 682,690, 707, 723, 724, 753, 762, 790, 794, 795, 796, 799, 800,811, 819, 835, 866, 878, 879, 882: n = A,T,C or G
atnactactatagggcgaattgggccctctagatgcatgctcgagcggcccgccagtgtgatggatatctgcagaattcgcccttagcgtggtcgcggccgaggtactgagctccacaaacgtggccatggttggtgcggaaatgattctgagtgagcaggtagaagtctcacgtcctgctgtgtccagagttggttccttccagagggttcgtggtctcgctggcttcaagaatgaagccgtggaccttcacagtgtgtgttacagctgttaaagatgttgtgtctggagtttgttccttcagatgtgtctggagtttctcccttctggtgggtttgtggtgtcgctgacttcaagaatgaagcccgcagactgtcgtggtgatccgttgtagctcttaaaggtggtgtggacccaaagagtgagcaacagcaagatttttcgtcaagagggtaaagaacaaaagtttccacgggtgtggaagggtatctgagccggttccctgctccccgcgtacctgcccgggcggcccgctcgaaaaggggcgaattccaaccacacntggcngcccgttactaatggaatccgaacctcggnacccaagcttggcgtaancatggncataactgtttcctgtgtgaaattggttantccgntcanaattccncacaaacatacnaancccggaanccattaaagtgtaaaancctgggggtcctaaannatgacttacttcacattaaattgcgttgnccttactgncccgtttccaatcgggaaacccttcctngccnnnttnntttaatgaatngcccaacnccccggggaaaaggcngtttgccttattgggcgcttttttcctttcntctgttaaatgnntcn

SEQ ID NO: 9563 - DNA, 621 bp, Homo sapiens
  misc_feature 23, 534, 582: n = A,T,C or G
gactcactatagggcgaattggnactccaccgcggtggcggccgcttttttttttttttttgttttggtcttatatgcgctatgaatatgaatatgacagcttcacggctccaacgtaattatagaaaataaaaataatatgacattactttggcaggcaggcatacattttcatttaatatgacacaataagaattactactttctcccaaaagttaactcctattgccaataaaaacttacttctagttctttaattttttcttctgctattttctgcttctctaacagctgactgtgaattgcttccttggactgaagaataaacattcttcctacaccttcatacatgttagtctcatctaccaaagtcatgatctctgtatctgtaagatgtgcatgctttttcgttctgtttagctgttcaatctgtatgtctgcgagcttcaccttctgttgagtgtcaataactttggcttgaagctctgtgaaggccttcttcagctctagatccacgggggcggccatcttggngcccccgcgttaattaattctagaagtactctcgaggggggccccggnacccagcttttggttccctttagtgaggggttaattggc

SEQ ID NO: 9564 - DNA, 829 bp, Homo sapiens
  misc_feature 3, 4, 5, 6, 7, 8, 21, 25, 535, 541, 547, 591, 593, 598, 623,633, 634, 639, 641, 642, 643, 644, 645, 646, 647, 648, 649,650, 651, 652, 653, 654, 656, 657, 658, 659, 660, 661, 662,663, 664, 665, 666, 667, 668, 669, 670, 671, 672: n = A,T,C or G
  misc_feature 673, 674, 675, 676, 677, 678, 679, 680, 681, 682, 683, 684,685, 686, 687, 688, 689, 690, 691, 692, 693, 694, 695, 696,697, 698, 699, 700, 701, 702, 703, 704, 705, 706, 707, 708,709, 710, 711, 712, 713, 714, 715, 716, 717, 718, 719: n = A,T,C or G
  misc_feature 720, 721, 722, 723, 724, 725, 726, 727, 728, 729, 730, 731,732, 733, 734, 735, 736, 737, 738, 739, 740, 741, 742, 743,744, 745, 746, 747, 748, 749, 750, 751, 752, 753, 754, 755,756, 757, 758, 759, 760, 761, 762, 763, 764, 765, 766: n = A,T,C or G
  misc_feature 767, 768, 769, 770, 771, 772, 773, 774, 775, 776, 777, 778,779, 780, 781, 782, 783, 784, 785, 786, 787, 788, 789, 790,791, 792, 793, 794, 795, 796, 797, 798, 799, 800, 801, 802,803, 804, 805, 806, 807, 808, 809, 810, 811, 812, 813: n = A,T,C or G
  misc_feature 814, 815, 816, 817, 818, 819, 820, 821, 822, 823, 824, 825,826, 827, 828, 829: n = A,T,C or G
agnnnnnngaaatgtgatacnactnactattgggcgaattgggccctctagatgcatgctcgagcggccgccagtgtgatggatatctgcagaattcgcccttagcgtggtcgcggccgaggtacgcggggagcagggaaccgctcagatacccttccacaccgtggaaactttgttcttaccctcttgacgaaaaatcttgctgctgctcactctttgggtccacaccacctttaagagctacaacgatcaccacgacagtctgcggcttcattcttgaagtcagcgacaccacaaacccaccagaagggagaaactccagacacatctgaaggaacaaactccagacacaacatctttaacagctgtaacacacactgtgaaggtccacggcttcattcttgaagccagcgagaccacgaaccctctggaaggaaccaactctggacacagcaggacgtgagacttctacctgctcactcagaatcatttccgcaccaaccatggccacgtttgtggagctcagtacctgccnggcggncgctcnaaagggcgaattccagcacactggcgggcggtcttaatgggatncnacttngtacaaagcttggcgtaatcatggncatagcttgnnttcgngnnnnnnnnnnnnnnannnnnnnnnnnnnnnnnnnnnnnnnnnnnnnnnnnnnnnnnnnnnnnnnnnnnnnnnnnnnnnnnnnnnnnnnnnnnnnnnnnnnnnnnnnnnnnnnnnnnnnnnnnnnnnnnnnnnnnnnnnnnnnnnnnnnnnnnnnnnnnnnnnnnnnnnnnnnnnnnnnnnnnnnnnnnn

SEQ ID NO: 9565 - DNA, 815 bp, Homo sapiens
  misc_feature 2, 3, 4, 5, 6, 7, 11, 14, 18, 23, 29, 38, 495, 507, 550,576, 587, 595, 603, 618, 620, 627, 628, 635, 636, 638, 639,640, 641, 642, 643, 644, 645, 646, 647, 649, 650, 651, 652,653, 654, 655, 656, 657, 658, 659, 660, 661, 662, 663: n = A,T,C or G
  misc_feature 664, 665, 666, 667, 668, 669, 670, 671, 672, 673, 674, 675,676, 677, 678, 679, 680, 681, 682, 683, 684, 685, 686, 687,688, 689, 690, 691, 692, 693, 694, 695, 696, 697, 698, 699,700, 701, 702, 703, 704, 705, 706, 707, 708, 709, 710: n = A,T,C or G
  misc_feature 711, 712, 713, 714, 715, 716, 717, 718, 719, 720, 721, 722,723, 724, 725, 726, 727, 728, 729, 730, 731, 732, 733, 734,735, 736, 737, 738, 739, 740, 741, 742, 743, 744, 745, 746,747, 748, 749, 750, 751, 752, 753, 754, 755, 756, 757: n = A,T,C or G
  misc_feature 758, 759, 760, 761, 762, 763, 764, 765, 766, 767, 768, 769,770, 771, 772, 773, 774, 775, 776, 777, 778, 779, 780, 781,782, 783, 784, 785, 786, 787, 788, 789, 790, 791, 792, 793,794, 795, 796, 797, 798, 799, 800, 801, 802, 803, 804: n = A,T,C or G
  misc_feature 805, 806, 807, 808, 809, 810, 811, 812, 813, 814, 815: n = A,T,C or G
gnnnnnngaantgnatanaactnactatngggcgaatngggccctctagatgcatgctcgagcggccgccagtgtgatggatatctgcagaattcgcccttagcgtggtcgcggccgaggtactgagctccacaaacgtggccatggttggtgcggaaatgattctgagtgagcaggtagaagtctcacgtcctgctgtgtccagagttggttccttccagagggttcgtggtctcgctggcttcaagaatgaagccgtggaccttcacagtgtgtgttacagctgttaaagatgttgtgtctggagtttgttccttcagatgtgtctggagtttctcccttctggtgggtttgtggtgtcgctgacttcaagaatgaagccgcagactgtcgtggtgatcgttgtagctcttaaaggtggtgtggacccaaagagtgagcagcagcaagatttttcgtcaagagggtaagaacaaagtttccacggtgtggaanggtatctgagcngttccctgctccccgcgtacctgcccgggcggccgctcgaaanggcgaattccacacactgggcgggcntactatggatnccaactcngtaccaancttggcgtaatcatngncatactnnttttccnngnnnnnnnnnngnnnnnnnnnnnnnnnnnnnnnnnnnnnnnnnnnnnnnnnnnnnnnnnnnnnnnnnnnnnnnnnnnnnnnnnnnnnnnnnnnnnnnnnnnnnnnnnnnnnnnnnnnnnnnnnnnnnnnnnnnnnnnnnnnnnnnnnnnnnnnnnnnnnnnnnnnnnnnnnnnnnnnnn

SEQ ID NO: 9566 - DNA, 491 bp, Homo sapiens
  misc_feature 3, 10, 13, 14, 467: n = A,T,C or G
atngacttantgnntggctgattggagctccaccgcggtggcggccgaggtacgcggggagggaaccgctcagatacccttccacaccgtggaaactttgttcttaccctcttgacgaaaaatcttgctgctgctcactctttgggtccacaccacctttaagagctacaacgatcaccacgacagtctgcggcttcattcttgaagtcagcgacaccacaaacccaccagaagggagaaactccagacacatctgaaggaacaaactccagacacaacatctttaacagctgtaacacacactgtgaaggtccacggcttcattcttgaagccagcgagaccacgaaccctctggaaggaaccaactctggacacagcaggacgtgagacttctacctgctcactcagaatcatttccgcaccaaccatggccacgtttgtggagctcaatacctgcccgggcggncgctcgacgcccgggcaggtcaat

SEQ ID NO: 9567 - DNA, 670 bp, Homo sapiens
  misc_feature 56, 234, 511, 529, 539, 553, 565, 586, 599, 603, 620, 621,622, 629, 631, 636, 651, 658, 660, 670: n = A,T,C or G
ctctatatagtctagcggccgcccttttttttttttttttcaatgtgtaagaagtnctttaatagctcaaactcagagtcatcgtgctcccaattccaaaggagattcctaaaaggaggcaacttcggccgtttgagaagccagcgctcacccacccggggtctctgtgcattgacctttgggtgctgacttggagaaaagcacaaacacgaccagtcccatcctggctcccgnggggcttcttctatctacgcattgtatcgactgcattagttggactaagatgatgactcagttaaaggaggagacaaatgctgactgtctaagcaagaatggcccaagctggcaagaaaaagcacactgcatacataggatacagaagggcagagcttctgcctgcggatctgcaacattacatttgttttgcctgcaaactatcaagaaggatttttgttggccagggagtctccactgaacaaacaaaatggcaggtcaaaagtctttgagtgtnctattccagcagcccaanagtcctcatnccgttttcccgggnagagtctttggnggaaacatgaagtccagcttntggccttgcctangggnaatttttttcggggaannnctgggancntgaantttttttttccccgnggaaccncnttgttagggn

SEQ ID NO: 9568 - DNA, 839 bp, Homo sapiens
  misc_feature 554, 629, 662, 746, 747, 757, 770, 772, 775, 778, 780, 785,806, 811, 816, 822, 828, 829: n = A,T,C or G
actactatagggcgaattgggccctctagatgcatgctcgagcggccgccagtgtgatggatatctgcagaattcgccctttcgagcggccgcccgggcaggtactgagctccacaaacgtggccatggttggtgcggaaatgattctgagtgagcaggtagaagtctcacgtcctgctgtgtccagagttggttccttccagagggttcgtggtctcgctggcttcaagaatgaagccgtggaccttcacagtgtgtgttacagctgttaaagatgttgtgtctggagtttgttccttcagatgtgtctggagtttctcccttctggtgggtttgtggtgtcgctgacttcaagaatgaagccgcagactgtcgtggtgatcgttgtagctcttaaaggtggtgtggacccaaagagtgagcagcagcaagatttttcgtcaagagggtaagaacaaagtttccacggtgtggaagggtatctgagcggttccctgctccccgcgtacctcggccgcgaccacgctaagggcgaattccagcacactggcggncgttactagtggatccgagctcggtaccaagcttgccgtaatcatggtcatagctgtttcctgtgtgaaaattgntatcccctcacaatttccacacaacataccaancccggaagcataaagtgtaaaagcctgggggtgcctaatgaagtgagcttacttacatttaattgcgttgccctcacttgcccnnttttccaatncgggaaaacctgncnttnccnanctgcntttaattgaattcggccaacnccccnggggnaaaggngttttnnttttttggct

SEQ ID NO: 9569 - DNA, 400 bp, Homo sapiens
  misc_feature 3, 7, 22, 23: n = A,T,C or G
gcntatngactactatggggcnnattggagctccaccgcggtggcggccgaggtacctgactttgggtaagttgccagaataagatcatcaggcttggcttggaaattacatactttttcccaccattcttttgataatatcaacgtagggactccatctacttccatgatgttaaacagttctggctttttttccatcgtgggagcgtttttctcaatcttcgccattgggaatctggtatctcaggcagcagaggaagcagcttgctgcctttagtcaaactgcttcctggaaacccagagccaggtccagctccaggacactgtgcaagcaagagcacagcaggtccccgcgtacctgcccgggcggccgctcggctctagaactagtggatccccc

SEQ ID NO: 9570 - DNA, 804 bp, Homo sapiens
  misc_feature 2, 6, 15, 21, 495, 539, 565, 577, 588, 616, 636, 657, 674,718, 735, 769, 787, 792, 804: n = A,T,C or G
gntatntcaattccngtgtcnaccccgcgtccgcggacgcgtgggcggacgcgtgggcggacgcgtgggcggacgcgtgggtttgtttaataggtgtatttacagttacaaatttccctcctaccactgctttgactgtacctgtttttttgtatattacatttttcatttaccacaagatattttctaatttcccttgtgagttccccattaatctgctggttgagagcgttgtttaattttcacataattgtgtacttttcagttttttgtctgttactgatttctagtttcatcccactgtggccagaaaagatattttatttcctcagtcttttgaaatttgttgacttgtttagtcatctaacatactgtctatcctagagaaaggtccatttgcacttgagaaaaacgtgtgtactgctgttgtgtctgttaggtccagctggtatgatgctgttcaagttctgtcttgcgactgatcttctgtctggntgtcctatccggtactgaaagtgggctactgcagtcttctactnttactggtagaactatccatttcttnctttgaatctgncaatggtttgnttcatatattttgggctctgatgtttgnggcatatatattacaatctnggtgaaatttcaaactttttnaaatttcaacatggaanatgaaaatatagggaggtctggggaattttcctttgaattccgnggggcttgggagtactnttaaatgaaacaaagaatgggccgggaatttgangctgcaaggataggttcncccangggagtgaagcn

SEQ ID NO: 9571 - DNA, 646 bp, Homo sapiens
  misc_feature 203, 442, 448, 476, 526, 561, 566, 628, 643, 646: n = A,T,C or G
tactatagggcgaattggagctccccgcggtggcggccgaggtactaatcatagcaaataaaggggaagccgtgcagttggaaacagccatgcctggtgcaaatgctgccattgtttaattgttgatgatgctgcataagaatccttaaggtagaagcaatcttgaccttttttatttttgcaggcccctgccagtgcccttntccagactatattcttaaaaattaaagtgctttggtttgtagagttgactgtatgtatctccaaaatgaatatgcagcagtgattttttttttcctccctgatctctttcctgctttggtaattctgtgagggtataatcatattggggctgtccttggcaggttaggtgacatacaagaacatgcggttccacagcagtcctgtcattctcgggtaagaacatcaaagtgagttgcancacttntgcattcatacacgtaaatcttaatctngaaggaagatagaatctaccatagggaatttctccagaagttttacgctngagtgcacccagatctgtatgccgttgacccaatncagtngccctagggaaaattctagacccagggggacctacccgggcctgtaatttcccagatcactntctaacctgaagcanacn

SEQ ID NO: 9572 - DNA, 820 bp, Homo sapiens
  misc_feature 651, 659, 718, 745, 783, 792, 798, 812, 819: n = A,T,C or G
gggccctctagatgcatgctcgagcggccgccagtgtgatggatatctgcagaattcgccctttcgagcggccgcccgggcaggtactggtgaactccctcacttgaatttctcgttcttatgaaggtgctttcttgcttggatagttgttcagtgtgacattcctgcagggtgaacaattgctagagggttctattcagccatctttctccacctcacatccatgtttttgcatgttatttctttccttttattgattagcatttgattccatgaatatagcacaatgtatataaccactattcttttctggaaaacttatgtccaggttggggttattatgaataaggctatgaaatttcaggtacctcggccgcgaccacgctaagggcgaattccagcacactggcggccgttactagtggatccgagctcggtaccaagcttggcgtaatcatggtcatagctgtttcctgtgtgaaattgttatccgctcacaattccacacaacatacgagccggaagcataaagtgtaaagcctggggtgcctaatgagtgagctaactcacattaattgcgttgcgctcactgcccgctttccagtcgggaaacctgtcgtgccagctgcattaaatgaatcggccaacgcncggggagnaggcggttgcgtattgggcgctttttccctttcttgcttcaatggattccttgggctcnggccgtccggcttgcggcgagccggtnttaagcttacttcaaaggcgggtaataccggtattccncaaaaacangggganaaccccaggaaaanaacattng

SEQ ID NO: 9573 - DNA, 742 bp, Homo sapiens
  misc_feature 3, 4, 5, 6, 7, 8, 9, 10, 15, 23, 32, 496, 498, 530, 589,628, 664, 675, 683, 691, 723, 729: n = A,T,C or G
tgnnnnnnnnagttnttgtttantggacctcnctttgcgttcggccagcgcaggggcttctgctgagggggcaggcggagcttgaggaaaccgcagataagtttttttctctttgaaagatagagattaatacaactacttaaaaaatatagtcaataggttactaagatattgcttagcgttaagtttttaacgtaattttaatagcttaagattttaagagaaaatatgaagacttagaagagtagcatgaggaaggaaaagataaaaggtttctaaaacatgacggaggttgagatgaagcttcttcatggagtaaaaaatgtatttaaaagaaaattgagagaaaggactacagagccccgaattaataccaatagaagggcaatgcttttagattaaaatgaaggtgacttaaacagcttaaagtttagtttaaaagttgtaggtgattaaaataatttgaaggcgatcttttaaaaagagattaaaccgnangtgattaaaagaccttgaaatccatgacgcanggagaattgcgtcatttaaagcctagttaacgcatttactaaacgcagacgaaaatggnaagattaattgggagtggtaggatgaacaattggagaanatagaagttggaagtggaaactggaagacagaagtncgggaggcganaaaagatngagaagtnggggaatttgaagataaaacatcctttagaanaaaaantaatttaacctga

SEQ ID NO: 9574 - DNA, 781 bp, Homo sapiens
  misc_feature 503, 680, 684, 689, 690, 700, 726, 743, 761, 778, 780: n = A,T,C or G
aattggagctccaccgcggtggcggccgcccgggcaggtacaaaagccaagatgcccattgtgggcctggacacttggaggtctcttctcggcaaagtgaaagaagcggtgaaggtggccattgatgcagaatatcgccacattgactgtgcctatttctatgagaatcaacatgaggtgggagaagccatccaagagaagatccaagagaaggctgtgatgcgggaggacctgttcatcgtcagcaaggtgtggcccactttctttgagagaccccttgtgaggaaagcctttgagaagaccctcaaggacctgaagctgagctatctggacgtctatcttattcactggccacagggattcaagactgggggatgactttttccccaaaagatgataaaggtaatatgatcagtggaaaaggaaccttcttggatgcctgggaggccatggaagaactggtggaccaagggctggtgaaagcccttggggtctcaaatttnaaccacttccaaatcgagaggttcttgaacaaacctggactgaaatataaaccagtgactaaccaggttgagtgtcacccatacctcacgcaggaaaaactgatccagtacctcggcccctctaaaactagtggatcccccggctgcaggaattcatatcaagctttatcgatcccncganctcgnnggggggcccngtcccactttttgtttccctttaatngagggttaattgccccncttggcctaatcattggncatagcttggtttctgngng

SEQ ID NO: 9575 - DNA, 799 bp, Homo sapiens
  misc_feature 62, 103, 284, 383, 422, 499, 547, 594, 603, 681, 684, 698,708, 718, 719, 720, 721, 723, 733, 734, 742, 750, 751, 789,798: n = A,T,C or G
ggcgaattggagctccaccgcggtggcggccgaggtactttttttttttttttttttttttnggagacagagtctcgctctgctgcccaggctggattgcagnggtgtgacctcggctcactgcaacctctgcctcccgggttcaagcgattctcctgcctcagcctcccgagtagctggggttacaggcgcccactaccacgccaggctaatttttgtatttttaaatagagaccgggtttagccatgttggccaggctggtcttgagctcctgacctcaggngatccacccgccttggcctgccaagatacagttcttaaaaagtagtcttgacacatcattcaagacatttttcgttaattgaaaagcctgctattaagngtttataagcctctatggtagttactgcattattcttgnggagccatcacaggtcctctccccttccttgtaatgatgtgtttaaagttctctgaaaacatggaaaagatgctgtnggcataaatcaaaaagtcacttaaaccactggatgcccatttctcagngccgtgtcaaacaaatgccttgaggacctgtggcttggacatgtggngtttcatanggatgtcctatcaccaagcccaggggctaattttaaaaatggggaaaaatgatttgaaaaaacaaaactctgttctcnttncttttgaaaaaggnccctttcaanggggggggannnnanagttgaacannaggtttgncaaacttnncaagataactttcctctttggtaagggggccaaaaggntaattgtant

SEQ ID NO: 9576 - DNA, 848 bp, Homo sapiens
  misc_feature 618, 625, 637, 645, 667, 694, 717, 726, 730, 745, 748, 765,780, 786, 789, 790, 797, 798, 806, 807, 808, 813, 815, 816,819, 823, 824, 826, 828, 836, 842, 843, 846, 847: n = A,T,C or G
gactactatagggcgaattggagctccaccgcggtggcggccgaggtacgcgggacaattctgaaagcccaccagccttatggtgtccaggcctgtgtgccctgtggtccagggaccaagaacaacaagatccactctctgtgctacaacgattgcaccttctcacgcaacactccgaccaggactttcaactacaacttctccgctttggcaaacactgtcactcttgctggagggccaagcttcacttccaaagggctgaaatacttccatcactttaccctcagtctctgtggaaaccagggtaggaaaatgtctgtgtgcaccgacaatgtgactgacctccggattcctgagggtgagtcagggttctccaaatctatcacagcctacgtctgccaggcagtcatcatccccccagaggtgacaggctacaaggccggggtttcctcacagcctgtcagccttgctgatcgacttattggggtgacaacagatatgactctggatgggaatcacctccccagctgaacttttccacctggagtccttgggaatacccggacgtgaatctttcttttataggtccaatgatgtgaccccagtcctgcagttctngggagancaaaccaccatncgcgtcangggcagtccacaaaaaaactgnccctggaaagttttgctgttgccaagnaacgtgcttcggatgggaacctnggaatgggntggnaactttccacctttnttntgggaaaaaccccgggnttgtttttccccctnttgttnaannggggggnngtacccannnttttntnnaanaaanntngngggggggnggggannccnnt

SEQ ID NO: 9577 - DNA, 595 bp, Homo sapiens
  misc_feature 20, 22, 124, 125, 129, 130, 137, 143, 145, 158, 160, 170,172, 173, 174, 184, 185, 191, 194, 196, 202, 211, 224, 230,234, 237, 240, 242, 245, 249, 251, 254, 255, 256, 257, 258,259, 262, 271, 273, 274, 276, 279, 280, 284, 285, 286: n = A,T,C or G
  misc_feature 287, 288, 289, 290, 291, 292, 293, 294, 296, 297, 298, 299,301, 304, 309, 311, 312, 315, 320, 321, 322, 323, 324, 326,327, 328, 331, 341, 342, 343, 345, 346, 347, 358, 359, 361,365, 369, 370, 371, 372, 373, 375, 378, 379, 380, 381: n = A,T,C or G
  misc_feature 382, 383, 388, 390, 391, 392, 396, 398, 402, 404, 405, 407,416, 423, 425, 428, 437, 444, 445, 450, 455, 461, 463, 465,473, 475, 476, 481, 491, 492, 506, 508, 512, 513, 516, 517,519, 520, 528, 529, 537, 542, 559, 560, 563, 564, 566: n = A,T,C or G
  misc_feature 567, 569, 570, 577, 584, 585, 587, 589, 591, 593, 594: n = A,T,C or G
tcactatagggcgaattggnanctccaccgcggtggcggccgagtacttttttttttttttttttttttttttttttttttttttttttttttttttttttttttttttttttttttttttttnntccnnccccccncccccngnccaaaaaaaaagnancccccccccngnnngaaagaaatnnaaaacnaancnaacccnccccccccncgggggggggggncccccncccnatnttncnttncttnanggnnnnnnaanccccccccngnncnaannaaannnnnnnnnnntnnnngnaanaaaantnnttncccannnnnannnaanaaaaaaaccnnncnnnaaaaaaaaaanncnaggngggnnnnncnaannnnnnaaccnannnaaantnattngnncnccccccccnccccccntncanaaaaaaaanccggccnnccccnttaanaaaaanancncccccccncnnggggnggggggggtnnggggtgggcccccntncccnnccnnannaaaaaaannccctgggncgggnggttggggggggggggnnggnntnncnnaaagggnggggggnngntngncnna

SEQ ID NO: 9578 - DNA, 775 bp, Homo sapiens
  misc_feature 5, 11, 19, 21, 107, 558, 609, 627, 641, 643, 686, 700, 721,736, 739, 749, 750, 753, 763, 767, 773: n = A,T,C or G
gagcnctcctntagggagncnaccccgcgtccgacaaggcaaaatctcagcaagttcggacctctagtacaataaggcgaacctcctctttggatacaataacaggnccttacctcacaggacagtggccacgggatcctcatgttcactacccttcatgcatgaaagacaaagctactcagacacctagctgttgggcagaagagggtgcagaaaagaggtcacatcagcgttctgcgtcatgggggagtgctgatcaactaaaagagatcgccaaactgaggcagcaactacaacgcagtaaacagagtagtcgtcacagtaaggagaaagatcgccagtcacctcttcatggcaaccatataacaatcagtcacactcaggctactggatcaaggtcagttcctatgccactgtcaaatatatcagtgccaaaatcatctgtttcgcgtgtgccctgcaatgtagaaggaataagtcctgaattagaaaaggtattcattaaagaaaataatgggaaggaagaagtatccaagccgttggacataccaagatggncgaagagctccacttctgctcattaccggagcagtagtactcgcagcattnacactcagactccttctntccaggagcgcagnantagcttgcagcagtcatttcaccctgtgtctcccctttttgtncccccggaaatccnagggatgggtagcccttgctnaacaagaagatttgnttntatgaatcgnngantaaaagggtncttngtccancg

SEQ ID NO: 9579 - DNA, 672 bp, Homo sapiens
  misc_feature 14, 21, 23, 27, 29, 30: n = A,T,C or G
gcgcgttcagcgtnctcactngntggncnncttggaacctccaccgcggtggcggccgtttgataagccagcgctcacccacccggggtctctgtgcattgacctttgggtgctgacttggagaaaagcacaaacacgaccagtcccatcctggctcccgtggggcttcttctatctacgcattgtatcgactgcattagttggactaagatgatgactcagttaaaggaggagacaaatgctgactgtctaagcaagaatggcccaagctggcaagaaaaagcacactgcatacataggatacagaagggcagagcttctgcctgcggatctgcaacattacatttgttttgcctgcaaactatcaagaaggattctgttggtcagggagtctccactgaacaaacaaaatggcagtcaaaagtcttgagtgtcctattccagcagcccagagtcctcatccgtcatccacgggagagtctttgagggaaacatgaagtccagctcatgcctctgcctatgggtcaatttcttcgggaatcactgtgatcatgatatcttcattacccctgcggaccaccatgttcagggtgctttcccttttaatgacgtcgctgacatcattggcggagaccacggactgtccattgatgctgattatgacgtcgtttt

SEQ ID NO: 9580 - DNA, 614 bp, Homo sapiens
  misc_feature 3, 14, 23, 35, 62, 83, 87, 107, 110, 127, 131, 133, 134,136, 147, 149, 150, 151, 159, 160, 167, 168, 171, 175, 181,182, 183, 188, 191, 199, 203, 207, 216, 219, 223, 228, 229,234, 238, 239, 244, 245, 257, 262, 263, 270, 277, 280: n = A,T,C or G
  misc_feature 284, 285, 293, 306, 308, 314, 316, 318, 322, 323, 324, 332,339, 357, 358, 360, 365, 377, 382, 389, 394, 395, 401, 402,404, 409, 410, 412, 414, 415, 417, 418, 422, 427, 429, 436,438, 443, 445, 446, 450, 453, 460, 461, 462, 468, 469: n = A,T,C or G
  misc_feature 472, 473, 492, 495, 507, 531, 535, 536, 541, 553, 554, 567,568, 571, 573, 579, 584, 585, 609: n = A,T,C or G
atnctgtgtacatnatctgtttncttatggacgtncgcatgcacgcgtacgtaagccttggntcctctaaaccggccgcactngggntttttttttttttttttttnaancccctttttaaaaaaantttnannantccattttttncnnnaagggggnnccaattnnttngaanccaaannnttttnttnaaaggaancccnaaantttaaaaanaancccntcccnnaaaantttnnggggnngggcccaaaaanaaaanntaaaaancccccanggnaaanntttttttnaaaattttttaancnaaaaanancntttnnntaaaaaanttttttnaaaaaaaaaaaacccaanngnaaaantttttttttttnaaaanttgggcnaaaanntttttnntnaaatnngncnntnncccnttaancnaaaaaancnttttncnnaaanccnaaatttnnntttttnnttnntaaaaaaaaaaaacccccnttnccaaaaaaaaancagccccaaaaaaaaccccccaantccnntaaantttttttttttnnaaaataaaaaccnnccncncttttnccccnnaaaaaggccttttttttttttttnttttt

SEQ ID NO: 9581 - DNA, 830 bp, Homo sapiens
  misc_feature 795, 801, 809: n = A,T,C or G
gtaatacgactcactatagggcgaattggagctccaccgcggtggcggccggccgccgcctctccttagtcgccgccatgacgaccgcgtccacctcgcaggtgcgccagaactaccaccaggactcagaggccgccatcaaccgccagatcaacctggagctctacgcctcctacgtttacctgtccatgtcttactactttgaccgcgatgatgtggctttgaagaactttgccaaatactttcttcaccaatctcatgaggagagggaacatgctgagaaactgatgaagctgcagaaccaacgaggtggccgaatcttccttcaggatatcaagaaaccagactgtgatgactgggagagcgggctgaatgcaatggagtgtgcattacatttggaaaaaaatgtgaatcagtcactactggaactgcacaaactggccactgacaaaaatgacccccatttgtgtgacttcattgagacacattacctgaatgagcaggtgaaagccatcaaagaattgggtgaccacgtgaccaacttgcgcaagatgggagcgcccgaatctggcttggcggaatatctctttgacaagcacaccctgggagacagtgataatgaaagctaagcctcgggctaatttccccatagtcgtggggtgacttccctggtcaccaaggcagtgcatgcatgttggggtttcctttaccttttctataagttgtccctcggcccgctctagaactagtggatcccccgggctgcaggaattcgatatcaagcttaatcgattnccgtcnacctcganggggggggcccggtacccacc

SEQ ID NO: 9582 - DNA, 797 bp, Homo sapiens
  misc_feature 2, 3, 6, 9, 17, 630, 633, 706, 728, 784, 789: n = A,T,C or G
gnngangcncttgttgncccactcgtacgcaccaagaagaagtatattggtatccgaatgatgtcactcacgtccagcaaagccaaagagctgaaggaccggcaccgggacttcccagacgtgatctcaggagcgtatataattgaagtaattcctgataccccagcagaagctggtggtctcaaggaaaacgacgtcataatcagcatcaatggacagtccgtggtctccgccaatgatgtcagcgacgtcattaaaagggaaagcaccctgaacatggtggtccgcaggggtaatgaagatatcatgatcacagtgattcccgaagaaattgacccataggcagaggcatgagctggacttcatgtttccctcaaagactctcccgtggatgacggatgaggactctgggctgctggaataggacactcaagacttttgactgccattttgtttgttcagtggagactccctggccaacagaatccttcttgatagtttgcaggcaaaacaaatgtaatgttgcagatccgcaggcagaagctctgcccttctgtatcctatgtatgcaagtgtgctttttcttgccagctttgggccattcttgcttagacagtcagcatttgtctnctnctttaactgagtcattatcttaatccaactaatgcagtcgatacaatgcgtagataggaagaagccccaccgngagccaaggatggggactggtngtgtttggtgcctttttttcaaagtcaagcacccaaaagggtcaaattgccaccanaaagnaaccccct

SEQ ID NO: 9583 - DNA, 824 bp, Homo sapiens
  misc_feature 767, 815, 823: n = A,T,C or G
gactactatagggcgaattggagctccaccgcggtggcggccgaggtactggatcagtttctcctgcgtgaggtatgggtgacactcaacctggttagtcactggtttatatttcagtccaggtttgttcaagagcctctcgatctggaagtggttgaaatttgagaccccaagggctttcaccagcccctcgtccaccagctcctccatggcctcccaggcatccaagaacgttccttttccactgatcatattacctttatcatctttggggaaaaagtcatccccagtcttgaatccctgtggccagtgaataagatagacgtccagatagctcagcttcaggtccttgagggtcttctcaaaggctttcctcacaaggggtctctcaaagaaagtgggccacaccttgctgacgatgaacaggtcctcccgcatcacagccttctcttggatcttctcttggatggcttctcccacctcatgttgattctcatagaaataggcacagtcaatgtggcgatattctgcatcaatgggccaccttcaccgcttctttcactttgccgagaagagacctccaagtgcccaggcccacaatgggcatcttggcttttgtacctgcccgggcggccgctcgagaaattgttatccgctcacaattcccacaacatacgagccggggagcataaagtgtaaagcctgggggtgcctaatgagtgagctactcacattaattgcggttgcgctcactgcccgctttccantccggggaaaacctgtcgtgcccactgcaattaatgaatcggccaacnccccgggna

SEQ ID NO: 9584 - DNA, 817 bp, Homo sapiens
  misc_feature 2, 3, 5, 6, 7, 11, 12, 13, 14, 18, 21, 22, 26, 29, 30, 31,34, 36, 40, 587, 615, 638, 679, 737, 746, 748, 767, 776,783, 800, 812: n = A,T,C or G
gnntnnntttnnnntttnaanncccntgnnnccncncgtncggtgctgtttgggctaacaggatctcctcttgcagtctgcagcccaggacgctgattccagcagcgccttaccgcgcagcccgaagattcactatggtgaaaatcgccttcaatacccctaccgccgtgcaaaaggaggaggcgcggcaagacgtggaggccctcctgagccgcacggtcagaactcagatactgaccggcaaggagctccgagttgccacccaggaaaaagagggctcctctgggagatgtatgcttactctcttaggcctttcattcatcttggcaggacttattgttggtggagcctgcatttacaagtacttcatgcccaagagcaccatttaccgtggagagatgtgcttttttgattctgaggatcctgcaaattcccttcgtggaggagagcctaacttcctgcctgtgactgaggaggctgacattcgtgaggatgacaacattgcaatcattgatgtgcctgtccccagtttctctgatagtgaccctgcaacaattattcatgactttgaaaaagggaatgactgnttacctggacttggtgctggggaactgntatctgatgcccctcaatacttntattggtatgccctccaaaaatctgggagagctcttttgcnaactggcgagtggcaagatatctggctcaaacttatttgggtcgagaagacctaattncttggggangnaattctgatggttagtaancctgggttnttattanccacctttcaataacanaaaggccttccncttcc

SEQ ID NO: 9585 - DNA, 391 bp, Homo sapiens
  misc_feature 11, 12, 17: n = A,T,C or G
tcgactactanngggcnaattggagctccccgcggtggcggccgaggtacatcccccggctgcacagactcttcagatctgttagcttgaacagggacccatagtatgtggccagtgcagggtcatctctctgaatgagaaggggcttctgctcccagaattccttgaaaaaaaagtctctgtcttgatgggcgagattaaactttcaaagagactactgggactgtcaaagtttaaagctgaaggccccccagctgcttctaacttcatctgcttacagggagccggcccctcttccttcccactccctgtaggctttgctttctttggcatcgttctgtcttcaagacaaagcagtaaggaaatgcaaacccggcacggcctgttgctc

SEQ ID NO: 9586 - DNA, 804 bp, Homo sapiens
  misc_feature 1, 3, 4, 5, 13, 15, 16, 17, 21, 24, 25, 35, 39, 40, 639,732, 752, 758, 773: n = A,T,C or G
ngnnngtccgcgntnnntatntcnncttactgtanggcnnattggagctccaccgcggtggccgagcggccgcccgggcaggtacttttgtatgacactagacttctgctgtagtgcttcacccaaaacagaggtttaaggaaataaaaaaataaaaataatacagaaaaaaaaccaaaacactttactgaaaattttcatttcaaccagaagcaaacgtgttctaagaaggcaaagtagagttaggaacaactccgtgtttccctcaggaataaacgtgatctttcacacttgggggttgatagtcagcatggagtaacttagaccaacttaagaaggaggcatctggggctgttcacctaaggagatgcttcccagaggcccagcatcttgggagaacaccccaagttctctggagaggtcaggagtttgggatgcaggatcacactgaaggtcagcccagcaaagcagctgatctaggatatgggcttctgacttccagattctaccatcatcacagaggctcaaagctggggcccacaccaaaagggcgtgatgattcccagccttcagcacaacaggaattgacctggaaagaaaggcctttattcctctgacagaaaaacctgattcccaaangaaaatgatacttttaccttattccctttctcaatggatctgcattttcatgaatgaagaaaagaagaaagttgaattctctgacttaggaangtttcttattaaaaaggttncaatanacttcaacttttttnaagctgggcagcaaaaaaaaaaaaaaaaaaa

SEQ ID NO: 9587 - DNA, 928 bp, Homo sapiens
  misc_feature 289, 342, 382, 384, 397, 408, 436, 451, 453, 473, 475, 479,489, 522, 527, 537, 545, 558, 569, 579, 585, 588, 594, 598,606, 612, 625, 635, 639, 649, 652, 663, 664, 668, 673, 691,695, 696, 714, 722, 730, 740, 747, 751, 756, 759, 765: n = A,T,C or G
  misc_feature 766, 772, 773, 774, 775, 780, 781, 792, 796, 803, 804, 809,812, 822, 830, 837, 840, 842, 848, 859, 862, 867, 868, 875,890, 892, 906, 910, 915, 919, 922, 923, 927, 928: n = A,T,C or G
gaattggagctccaccgcggtggcggccgcccgggcaggtacaaatctgttgccagcctgaacacacctgtaggaggtggatggagaccctggttgagaggtctcacccagccagtagaaacaggatcagggacctgcttgaagaagcagtctagccccacttttgtagaacagctgagctgtgctgggataccatttctgcccctcatggtgttgggttctccaaaacctggaagctggaacggctaaattgcagaaacagcaaagatggcaagcctgcccctctctntagtaactctgtcccaggatgctttcaaacccttgtcaaccagagaacatcantgggagagggcttgaaaaccccttggtttgggaaaggttntncccaagtgagggnggaaccagatnaagggggacccttgctttaaaaagaaancgggtcttttgcccncngcctttttttaaaaaggcangnttgnggttcaattncttggggggtaccccttgggggccgctttttanaaacntaagtggggntccccccnggggccttgaganggaaattttcnttatttcaangctttnttnggattncccngcgaaccntttagngggggggggcccncgggttcccnaagntttttgtttnccnttttaagtggnngggntaaanttgggcccccttgggggntaannattgggccataagccttnttttcctnggtttggnaaattggttnattcccnttancaaanttncccaannaacaannnncgaanncccgggggganattnaaaatgnnaaaanccncggggggggncctaaatnggggggnggntnaccttnacatttaaatntgngtttnnggccttnaatggcccgtttttnanttaggggaaaaccntttnttggncccnctnntttnn

SEQ ID NO: 9588 - DNA, 871 bp, Homo sapiens
  misc_feature 526, 554, 661, 682, 739, 749, 750, 752, 779, 782, 790, 809,811, 834, 841, 847, 853, 859, 870: n = A,T,C or G
agggagtcgaccccgcgtccgaagtgagcagagagaatctgctacaactgctggctgatgatgaagcctggaatggattcgtggctgctgctgaactgcccagggatgaggcagatgagctccgtaaagctctgaacaagcttgcaagtcacatggtcatgaaggacaaaaaccgccacgataaagaccagcagcacaggcagtggtttttgaaagagtttcctcggttgaaaagggagcttgaggatcacataaggaagctccgtgcccttgcagaggaggttgagcaggtccacagaggcaccaccattgccaatgtggtgtccaactctgttggcactacctctggcatcctgaccctcctcggcctgggtctggcacccttcacagaaggaatcagttttgtgctcttggacactggcatgggtctgggagcagcagctgctgtggctgggattacctgcagtgtggtagaactagtaaacaaattgcgggcacgagcccaagcccgcaacttggaccaaancggcaccaatgtagcaaaggtgatgaangagtttgtgggtgggaacacacccaatgttcttaccttaattgacaattggtaccaagtcacacaagggattggggaggaacattcgtgccctcataacaacccaancccaacccttcatttaggaangtattccccacccccccatgttatttggggcgaaatctcaaacttgaaaggcggttnaacaaggttnnanaagggttgtttgaaaggcccccccccnagncaattgtnccataaggaaacccatggntncgtgggttgcccgcccccttggnaggcatntttgcnttttgntgggantgtggggcaang

SEQ ID NO: 9589 - DNA, 842 bp, Homo sapiens
  misc_feature 18, 34, 394, 492, 637, 662, 663, 670, 672, 687, 757, 761,769, 787, 794, 796, 797, 805, 815, 833, 837, 841: n = A,T,C or G
actactatagggcgaatnggagctccaccgcggnggcgctgtttcctgtgtgaaattgttatccgctcacaattccacacaacatacgagccgggagcataaagtgtaaagcctggggtgcctaatgagtgagctaactcacattaattgcgttgcgctcactgcccgctttccagtcgggaaacctgtcgtgccagctgcattaatgaatcggccaacgcgcggggagaggcggtttgcgtattgggcgctcttccgcttcctcgctcactgactcgctgcgctcggtcgttcggctgcggcgagcggtatcaagctcactcaaaggcggtaatacggttatccacaagaatcaggggataacgcaggaaagaacatgtgagcaaaaggccancaaaaggccaggaaccgtaaaaaggccgcgttgctggcgtttttccataggctccgcccccctgacgagcatcacaaaaatcgacgctcaagtcagangtggcgaaacccgacaggactataaagataccaggcgtttccccctggaagctccctcgtcgctctcctgttccgacccctgccgctttacccggatacctgtcccgcctttctcccttcggggaagcgtggggctttctcatanactcaccgctgtaaggtattttcannttcgggngnagggtccggttcggntccaaagcttgggcctgtggtgccaccgaaacccccccccgtttcaagccccgaccggttggggcctttnttcnggtaactnttcggcttgggagtcccnacccccngnnaagacacngaactttttngcccccttggcagacagncccncttng

SEQ ID NO: 9590 - DNA, 874 bp, Homo sapiens
  misc_feature 2, 4, 123, 528, 679, 684, 708, 729, 739, 751, 753, 786, 799,803, 813, 820, 835, 836, 845, 866: n = A,T,C or G
tntnggagtcgccccgcgtccgggccttcctaacctttacggggcctggcggtgctgacggctgagctggtaggggtggagcaggtaggaaacagcaaatgcagaagctgctgcgcggaagtnggccatggactggaaagaagttcttcgtcggcgcctagcgacgcccaacacctgtccaaacaaaaaaaaaagtgaacaagaattaaaagatgaagaaatggatttatttacaaaatattactccgaatggaaaggaggtagaaaaaacacaaatgaattctataagaccattccccggttttattataggctgcctgctgaagatgaagtcttactacagaaattaagagaggaatcaagagctgtctttctacaaagaaaaagcagagaactgttagataatgaagaattacagaacttatggtttttgctggacaaacaccagacaccacctatgattggagaggaagcgatgatcaattacgaaaactttttgaaggttggtgaaaaggctggagcaaagtncaagcaatttttcacagcaaaaagtccttgctaaactccttcatacagattcatatggaagaatttccatcatgccagttctttaattatgtcatgagaaaagtttggcttcatcaaacaagaataggactcaatttatatgatgtccctnggcangggtccttcgggaatctgatttanaaaactcatattggaactatncctcctttgncacaattagatngnctggaaaaatcttctactccttttattgtttgnacagccagtttangaanttctttcttntttttanaaccctttaaaaacnnggaaagatnaaaattcaagaatattttaancatgccct

SEQ ID NO: 9591 - DNA, 946 bp, Homo sapiens
  misc_feature 342, 433, 446, 465, 466, 480, 499, 503, 506, 511, 557, 570,572, 584, 589, 603, 605, 616, 628, 631, 640, 644, 645, 651,653, 673, 675, 676, 680, 683, 695, 700, 701, 704, 712, 719,733, 736, 743, 751, 765, 768, 770, 773, 775, 786, 790: n = A,T,C or G
  misc_feature 809, 812, 828, 829, 839, 843, 846, 849, 852, 860, 868, 870,892, 895, 905, 907, 910, 915, 933, 935, 945, 946: n = A,T,C or G
gggcgaattggagctccaccgcggtggcggccgcccgggcaggtacgcggggagcagggaaccgctcagatacccttccacaccgtggaaactttgttcttaccctcttgacgaaaaatcttgctgctgctcactctttgggtccacaccacctttaagagctacaacgatcaccacgacagtctgcggcttcattcttgaagtcagcgacaccacaaacccaccagaagggagaaactccagacacatctgaaggaacaaactccagacacaacatctttaacagctgtaacacacactgtgaaggtccacggcttcattcttgaagccagcgagaccacnaaccctctggaaggaaccaacttttggacacagcaggacgtgagacttctacctgctcactcagaatcattttcgcaccaaccatggccangtttgtgggagcncagtaccttgggcgctctnnaactagttgggatncccccgggctggagggaanttcnatntcaancttatcggattccccgtcgacccttcaaggggggggggcccgggtnccccaactttttngnttcccttttaantgganggggtttaaatttngnggccgcctttnggcggtaaatanatnggtcaatancctnntttccntngtggtggaaaaatttgttantnnccgnttnacaaatttccanaacannaantccgaagnccggggnggcaattaaaagtngtnaaagccntggggggngccttaattgaggnggngnctnanctcaacaattnattngcggtttgcggctcaactnggnccggtttttccaattnngggaaaaacntgtngtngcnacnttgctttnaatggaantngggccaacccccccgggggganggnggttttgggnanttnggggnggttttttcggtttcttngntttaaattgnn

SEQ ID NO: 9592 - DNA, 809 bp, Homo sapiens
  misc_feature 6, 13, 26, 29, 33, 37, 48, 50, 54, 58, 67, 660, 717, 744,753, 772, 774, 803, 808: n = A,T,C or G
cgaaangggctanctgtttcctgttntgnaaanaggngctccaccgcngnggcngccnaggtaccanctactgccttgtgtgtcttcgatgcacatgatggggaagtcaacgctgtgcagttcagtccaggttcccggttactggccactggaggcatggaccgcagggttaagctttgggaagtatttggagaaaaatgtgagttcaagggttccctatctggcagtaatgcaggaattacaagcattgaatttgatagtgctggatcttacctcttagcagcttcaaatgattttgcaagccgaatctggactgtggatgattatcgattacggcacacactcacgggacacagtgggaaagtgctgtctgctaagttcctgctggacaatgcgcggattgtctcaggaagtcacgaccggactctcaaactctgggatctacgcagcaaagtctgcataaagacagtgtttgcagggatccagttgcaatgatattgtcttgcacagaacaatgtgtaatgagtggacattttgacaagaaaattcgtttctgggacattcgatcagagagcatagttcgagaaatggagctgttgggaaaaaattaactgccctggactttaaacccaaaaaaggactgaacctcctgagctgctnccgtgatgacttgcttaaaagttatttgatcttccgaacaaatgcttttcaagccanacatttcagtgcacctggggttcaagngccgggttntgacttggaccaaaatttntntttcagccccttgaatggcaggtttaccnttggng

SEQ ID NO: 9593 - DNA, 927 bp, Homo sapiens
  misc_feature 1, 9, 648, 686, 724, 725, 730, 731, 733, 754, 755, 783, 797,809, 829, 837, 849, 859, 864, 873, 875, 876, 878, 889, 892,894, 896, 898, 903, 911, 912, 919: n = A,T,C or G
ngtggccgnaacgactcactatagggcgaattggagctccaccgcggtggcggccgcgttgctggcgtttttccataggctccgcccccctgacgagcatcacaaaaatcgacgctcaagtcagaggtggcgaaacccgacaggactataaagataccaggcgtttccccctggaagctccctcgtgcgctctcctgttccgaccctgccgcttaccggatacctgtccgcctttctcccttcgggaagcgtggcgctttctcatagctcacgctgtaggtatctcagttcggtgtaggtcgttcgctccaagctgggctgtgtgcacgaaccccccgttcagcccgaccgctgcgccttatccggtaactatcgtcttgagtccaacccggtaagacacgacttatcggccactggcagcaagccactggtaacaggattagcagagcgaggtatgtaggcggtgctacagagttcttgaagtgggtggcctaactacggctacactagaagaacaagtatttggtatctgcgctctgctgaagccagttacctttggaaaaaaagagttggtagctctttgatccggcaaacaaaccaccgcttggtaagccggtggtttttttttgttttgcaaagcaggccatnattacggcgccagaaaaaaaagggattcttcaaagaangaatccttttgaatcttttttctacgggggtcttgacnnctcanntnggaaaacgaaaaaacttaacnnttaaaggggaatttttggtccattgaanattattcaaaaaanggatcttttcanctaaaatccctttttaaaantaaaaaanggaaagtttttnaattcaattnttaanggttttttntnntnttaaactttgnttntngncnggttnccaatggnnttaatanagtggagg

SEQ ID NO: 9594 - DNA, 493 bp, Homo sapiens
  misc_feature 493: n = A,T,C or G
gactactatagggcgaattggagctccaccgcggtggcggcccgcccgggcaggtacgcgggggaagagctgctcagttaggacccagagggaaccatggaaaccccagcgcagcttctcttcctcctgctactctggctcccagaaaccaccggagaaattgtattgacgcagtctccaggcaccctgtctttgtctccgggggaaagagccaccctctcctgtagggccagtcagagtgttagcagtgagcagttagcctggtatcagcagaaacctggccaggctcccactctcctcatctatggtgcatccaccagggccattggcatcccagacaggttccgtggcagtgggtctgggacagacttcactctcaccatcagcgcactggagcctgaagattttgcagtatattcctgtcagcagtatggtagttcacctcggacgttcggccaagggaccaaagtggaaatcaaacgaactgtggctn

SEQ ID NO: 9595 - DNA, 665 bp, Homo sapiens
  misc_feature 5, 29, 36, 37, 60, 437, 473, 475, 497, 511, 518, 553, 559,561, 563, 578, 583, 590, 592, 593, 594, 595, 602, 611, 613,616, 617, 619, 628, 633, 638, 639, 640, 642, 652, 653, 654,655, 656, 659, 661, 662: n = A,T,C or G
gccancgcgcattaaccctcactaaaggnaacaaannctgggtaccgggccccccctcgngtcgacggtatcgataagcttgatatcgaattcctgcagcccgggggatccactagttctagagcggccgcccgggcaggtacatcacttgacgttggggtcagggaaggtggcagctgactggatgctggcaatagccacactggttgggtcttccccagtagccactgcaccttcctgaatctgcactgtcccctcttccgtttcagctgttttctgctgccccttcatctctctgtgagggggcacatccgaggaactggtccttttttggaggtctttgtatttcctgattcacaggcctgagtgctaagtccggccaaggccgtctcagctgccgattttctccaactgtgtatctccctctcccggcctangtatctccatagacagctgctcatgcgcacttccancncgcggccatgttggtgaccccncgtacctcagccgncaccgcngtggagcttccaattccgcccttttattgaggtanattacncncngctcactggcccgtnagttnacaaacngnnnnactgggnaaaaccctngncgnnancccaacttnaattncctgnnngnacataccacnnnnntcngnnggg

SEQ ID NO: 9596 - DNA, 886 bp, Homo sapiens
  misc_feature 6, 7, 8, 577, 631, 643, 673, 694, 708, 718, 730, 741, 749,754, 763, 775, 778, 788, 818, 825, 833, 837, 846, 852, 867,877, 879, 884: n = A,T,C or G
ggtggnnngatttgtatacgactcactatagggcgaattgggccctctagatgcatgctcgagcggccgccagtgtgatggatatctgcagaattcgccctttcgagcggcccgcccgggcaggtacgcggggagcagggaaccgctcagatacccttccacaccgtggaaactttgttcttaccctcttgacgaaaaatcttgctgctgctcactctttgggtccacaccacctttaagagctacaacgatcaccacgacagtctgcggcttcattcttgaagtcagcgacaccacaaacccaccagaagggagaaactccagacacatctgaaggaacaaactccagacacaacatctttaacagctgtaacacacactgtgaaggtccacggcttcattcttgaagccagcgagaccacgaaccctctggaaggaaccaactctggacacagcaggacgtgagacttctacctgctcactcaaaatcatttcgcaccaaccatggccacgtttgtggagctcaatacaaaagccaagatgcccattgtgggcctgggcacttggaggtctcttnttcggcaaaagtgaaaagaagcggtgaaaggtggccattgatgcaaaatatcgncacattgactgngcctatttcttttgagaaataacatgaggnggggagaaagccttccaaganaaaatcccaagaanaagggtgttnttccgggagganctggtttattngtcaagcnaaggngggggcccncttttttttganaanaccccttgtngagggaaagccttttgaaaaaacccttaangacctgnaaactggncttnttttggcgntttatnttatttactgggccncaagggattnanaactngg

SEQ ID NO: 9597 - DNA, 942 bp, Homo sapiens
  misc_feature 422, 423, 482, 527, 571, 578, 581, 587, 590, 607, 640, 657,683, 685, 692, 701, 714, 725, 731, 735, 741, 749, 751, 755,766, 771, 782, 791, 806, 817, 825, 833, 846, 849, 850, 856,858, 860, 871, 884, 887, 895, 897, 912, 918, 930, 931: n = A,T,C or G
  misc_feature 932, 933, 937: n = A,T,C or G
agtggactacttagggcgaattgggccctctagatgcatgctcgagcggccgccagtgtgatggatatctgcagaattcgccctttcgagcggcccgcccgggcaggtacgcgggggcccttgttcactagaagcaaggagtcccctgacccccttcttcaaaacatactcttcagtctttgtctttattcccgccttggtcctcctttgttcagtccagcaaggtccacagcaaagtgctgcccgaaaacagggtcttgaggacatgaacaaagaaggtctgctggagcagaggaagtgaaattgaccagatgaacagggaccctgggatgaatctgctggcagtggatataaggtcagtgctctaaagaagtacctcggcccgcgaccacgctaagggccaaattcagcacactggcggnncgttctagtggatccgaactcggtaccaagcttggcgtaaatcatggtcataagctgtntcctgtgtgaaattgtttcccctcacaattccacacaacattacnagcccggaagcataaagtgtaaaaacctggggtgcctaatgagngagctanctnacattnatnggcgttgcgctcactgnccgcttttcaatccgggaaacctgtcttgccanctgcattaatgaattcnggccaacccccccgggaaaaggccgntngcgtatntgggcactntttcccttcctgnttactggactngatggncctnggtcanttcggctngnggcnagcggatttancttanttaaaggcggnaataccggnattcccaaaattcangggaatacccncggaaagnaacatttnaccaaaaggcccncannagggcncngnaccctaaaaangccccggttgctngcnttttttcntnaaggctccccccccntgccanccttcaaaaaannnncccnaatct

SEQ ID NO: 9598 - DNA, 574 bp, Homo sapiens
  misc_feature 7, 22, 372, 444, 456, 464: n = A,T,C or G
ggagatncgatccgagtcgccncgcgtccgtataaatggagttgggagggagagaatttgaaatgggatacctatttttttaattacataaatttaaactagcagacatttaaacatgaatgattaggatttttctatgtggttaacctggactttctgaacaaagaccaactgagcccctcccagtactctggtggatttttcttcagcaaccattacgcaagtcttagttgtaaccagcaatgttctgtgtgttttatgtttgctttttagttaaaaatcaccaccaccaccaaaaagaaaaacaaaattttttggctcctggattttcaaaacacatggtagacctctctgattttaggcttttattgnttaaagacaggtgtcttcgctttatgacccacacttggagtggcagtgcccccgatcatagcttcactgcangcttggaccctnccaggctnaaagccagtccttcccaccttcggccttctggggtagctgcatgccacccacgcccagcttaattttttaacttttttgtagaaacaaggggccttggctatgctggcca

SEQ ID NO: 9599 - DNA, 866 bp, Homo sapiens
  misc_feature 526, 568, 575, 607, 617, 635, 640, 641, 663, 666, 676, 684,694, 702, 704, 706, 714, 727, 752, 754, 755, 758, 774, 776,787, 791, 796, 797, 798, 802, 808, 814, 830, 848, 850, 852,857: n = A,T,C or G
tccccgcggtggcgagcggccgcccgggcaggtactggatcatgtttctcctgcgtgaggtatgggtgacactcaacctggttagtcactggtttatatttcagtccaggtttgttcaagagcctctcgatctggaagtggttgaaatttgagaccccaagggctttcaccagcccctcgtccaccagctcctccatggcctcccaggcatccaagaacgttccttttccactgatcatattacctttatcatctttggggaaaaagtcatccccagtcttgaatccctgtggccagtgaataagatagacgtccagatagctcagcttcaggtccttgagggtcttctcaaaggctttcctcacaaggggtctctcaaagaaagtgggccacaccttgctgacgatgaacaggtcctcccgcatcacaagccttctcttggatcttctcttggatggcttctcccacctcatgttgattctcatagaaataggcacagtcaatgtggcgatattctgcatcaatnggccaccttcaccgcttctttttacttttgcccgagaaaganaaccttncaagtgccccaggcccacaatgggcatttttnggcttttggnaccttgggccgctttaanaaacnngtgggaatccccccgggcctgncanggaaattcgnaattcaangctttattgnaaacccgncnancctctgangggggggggcccnggacccccaactttttgttcccttnannggnggggtaaattgccgcncnttgggcgtaancatnggggnnnagcntggttnctgtgnggaaattgggtttccntttaaaatttccccacanananacgancccggagcg

SEQ ID NO: 9600 - DNA, 702 bp, Homo sapiens
  misc_feature 3, 6, 7, 8, 9, 10, 11, 12, 13, 14, 15, 16, 17, 18, 20, 21,22, 23, 24, 26, 30, 34, 35, 36, 37, 38, 40, 41, 42, 43,44, 45, 46, 49, 50, 51, 52, 54, 55, 56, 57, 58, 59, 61,62, 63, 64, 65, 66, 67, 68, 69, 70, 71, 72, 73, 74, 75,76: n = A,T,C or G
  misc_feature 77, 78, 79, 80, 81, 82, 83, 84, 85, 86, 87, 88, 91, 92, 93,208, 213, 366, 386, 645, 678, 702: n = A,T,C or G
ttnccnnnnnnnnnnnnntnnnnntncttntctnnnnnannnnnnnttnnnntnnnnnntnnnnnnnnnnnnnnnnnnnnnnnnnnnnagnnngttcttgaaccggtgtcgaccccgcgtccgagacaccaatgcccgtcattggggaaatgaaagacttttaagtaaaacgattttgagtgaaataatatttgttgttttaaacagntaatnttaaccactctccatcatatattgaaattaacttaagatgtgaaagttaaaattagaaacccttgtaaaggaaaaataggaaatagtttcatgaacttgacacaggaaaatatttcttagactagatactgtagcactcaccacaaattaagnaaatcaagccgaattgcacnttcatttttaaaaagcttctccttattatgttgttgtttaacaactttaaaccgcctatctctagacccaggaataatttatttgcctatataatacagcaaaaaaataatggtatggtataaaaccgggactcatttcaaaaataatataaaaggaaactccctattacaaaggaaattggacaaacagccccaagtattatcaaatggaatattaaaaaatttggagaagaatatttttccataaggaaggatatcntaaatggaacattagggcatggaggaaaacccnaaattttagggatatcactacccn

SEQ ID NO: 9601 - DNA, 884 bp, Homo sapiens
  misc_feature 2, 3, 4, 10, 15, 16, 76, 79, 84, 93, 98, 151, 186, 252, 290,302, 455, 486, 510, 524, 533, 594, 646, 726, 734, 736, 774,787, 815, 816, 819, 820, 827, 839, 842, 843, 850, 856, 858,868, 878: n = A,T,C or G
gnnnaaggtngaccnngtaatacgactcactatagggcgaattggagctccaccgcggtggcggccgaggtacttnttnttgtntttttttgnttttntttgcaatccccctccccctgaaccaatttcacattgggaatgcaggacctanactgctgaataaaaagctacttcttctataattgncaggttctctccaatttctcagcttcctcaaagacatggggtggagttgggtgtgccatcactganagagctctggaacttttgactcttagtgacatttttanatttaggggttnatggccttccacatgttgtcaccaactggtgatctctgccccttcatgctgatcaagaaagtagaaactcctcgtcgccttcaggtttgcagtcgcagaaacattgcctgctgtggactgtcagcacaaaactgggacactggtgtcatttanactgtcagcagtgcacatgattgtacgatanactccaggcaaccatgtgcatctntgcaagatgacctntgccccaanagaagggttacggtctaattaaatgtttaccaagatggtaccagtgggctctccccgtgtnctttggtgttattggagctggtgtatgacagactcaagggaaattttttaangaaaatgaagaagaaatcaacctttatgggtctctttcattggaaagaaggagaaataaggaaaggaaatggcatggtanaagagggnangggggaaaagggaatagaaaatggcatgttttttgatncctgtgggctttngtgttgggggacaattggggaaagagcnncanncagggcnccaaccatattntgnngtttagnggcccncnttgggtatcntgttaaatanttgccg

SEQ ID NO: 9602 - DNA, 848 bp, Homo sapiens
  misc_feature 570, 601, 626, 656, 658, 676, 683, 688, 695, 713, 714, 741,744, 750, 758, 761, 765, 770, 771, 774, 779, 811, 821, 824,839, 844: n = A,T,C or G
gcgcgtaatacgactcactatagggcgaattggagctccaccgcggtggcggccgaggtacgcggggccttgaaatgggctgagtccctcttgctcacccttgacttggaaaaaccagtttctcttttattgtctgttactaatctctattctaaaaattcagctcaattctcaaccatactccaaactctctcttttccagctacctttactccctctccttcaattccactttcctctgcttacttttttttttttctgacagggtctcactttgtcgcccaggcaggagcgcagtggctcaatcttgggctcactgcagcctcaacctcccagaggcggggtttcaccatgttgcccagactggtcttgaactcctgagcttaagcaatccacctgcctcggcctcccaaaagtgttgagatcacaggcgtgagccaccgcatccggcctcatgttctttttcattaaaagagagaaatcaactattcagggaccggcccccaccttttcctcaggagtcatttttgttcccgcacagggcctgctgaactgggtgctttatataangacactgtcattttttcaaggtacctggccnggcgggccgcttctagaaactaggngggatccccccgggctggaaggaaattcgnanattcaaagctttattcgnaaacccngccgnacctttnaaggggggggccccgggnnccccacctttttggttcccctttaagnggnggggtnaattggcnccncctnggcgnnaantaaanggggcaaaacctggtttccttggggggaaaanggttaatccngcntccaaaattcccaancaaanaaag

SEQ ID NO: 9603 - DNA, 358 bp, Homo sapiens
  misc_feature 12, 17, 177, 185, 186, 187, 190, 222, 224, 225, 233, 236,244, 249, 250, 256, 258, 274, 275, 283, 290, 301, 305, 313,314, 320, 321, 326, 334, 336, 338, 343, 344, 355, 356, 357: n = A,T,C or G
tgacactatagnaaaanctatgacgtcgcatgcacgcgtacgtaagcttggtatcctctagaagcggccgccctttttttttttttttttttttttttttttttttttttttttttttttttttttttttttttttttttttttttttttttttttttttttttttttttttttttnggggaaannnaanttttttttaaaaaaaaaaaaaaaaaaaaaagntnnaaaaattnaangggggggnttttnntttttnanaaaaaagggggggggnnaaaaaaanggggggnaaaaaaaaaangggnaaaaaaannaaaaannaaaantttttaangncnaaaannttttggggggnnng

SEQ ID NO: 9604 - DNA, 605 bp, Homo sapiens
cccgcgtccggcgcctaaagctgacgggtttgaaatggcttcgatgttagccgggacccgactcaggtgaagatcgatgctatagaagacaaacaagggaaggttttttttccttttgcatcatggctcaatttggaggacagaagaatccgccatgggctactcagtttacagccactgcagtatcacagccagctgcactgggtgttcaacagccatcactccttggagcatctcctaccatttatacacagcaaactgcattggcagcagcaggccttaccacacaaactccagcaaactatcagttaacacaaactgctgcattgcagcaacaagccgcagctgcagcagctgcattacaacagcaatattcacaacctcagcaggccctgtatagtgtgcaacaacagttacagcaaccccagcaaaccctcttaacacagccagctgttgcactgcctacaagccttagcctgtctactcctcagccaacagcacaaataactgtatcatatccaacaccaaggtccagtcaacagcaaacccagcctcagaagcagcgtgttttcacaggggtgggtacaaaactacatgatacattg

SEQ ID NO: 9605 - DNA, 829 bp, Homo sapiens
  misc_feature 266, 316, 460, 547, 591, 606, 633, 661, 710, 751, 762, 774,785, 803, 812, 824, 828: n = A,T,C or G
ggcgaattggagctccaccgcggtggcggccgcccgggcaggtacttttttttttttttttttggtgtaaactgaaaaagtgtgtgtgtgccctttttacccgttctttgttctgtggtgtgcgtgtggtgtgagcttggtgttttgtctcgaggaaacatgggtcagacacaaagtaagcctactccgctaggaactatgtagaaaaattttaagaagggatttaatggagactatggggttactatgacaccagggaaacttanaactttgtatgaaatagattggccaacattagaagtgggttggccatcanaaggaagcctggacaggtcccttgtttctaaggtatggcacaaggtaactggtaagtcaagacacttagaccagttcccatacatagacacttggttgcagctggtgctagaccccccacagtggttaggagggcaggcagcancagtggtagtagtagcaaagggacagatagccaaggaaagatcccctttccccaccgagggaaatcaactgctgaaagttctgttcnacccaagcatcagaaagatccattgcaggaagatggccccaggngatccccaagtgcgngccctccccctttatcaagggagagangcttccccactttttggggccccacagngcttggcaccctccgcaagaaaaaaacatattccctaaggccggcccanaagtaaaccaaaaaaaagggggggggaaaaacttttaaaanaaaaccccttncctttggcaacntcggtttaaanaacccaaaaacttggganaccaaatgnccccttggaaanaacnt

SEQ ID NO: 9606 - DNA, 632 bp, Homo sapiens
  misc_feature 528, 592: n = A,T,C or G
ctctctaatacgactcactatagggaaagctggtacgcctgcaggtaccggtccggaattcccgggtcgacccacgcgtccgattatgtatatacacgtattatatatatacacgtatgtatatacacgtatatatattatatatattcatgtgtttgtatatatattatatatacgtgtatacacgtatatacatgtatacatgtatacgtgtatacatgtatatatgtgtataatatatatacacgtgtatatatattatatatatatacgtgtgccatgttggtttgctgcacccattaactcgtcatttacattaggtatttctcctaatgctatccctcccccagccctcaccccatgacaggccctggtgtgtgatgttccccgtcctgtgtccaagtgttctcattgttcagttcccacccatgagtgagaacatgctcgcaccgccgcttctaaatgttttaaaaacaaagacaccaatgcccttcattggggaaatgaaagacttttaagtaaaacganttttgagtgaaataatattggtggtttaaaaaggtaatattaaccactcttcatcatatgttgnaattatcttaagatgtgaaagtaaaaatagaaccttgtaa

SEQ ID NO: 9607 - DNA, 838 bp, Homo sapiens
  misc_feature 4, 6, 7, 10, 16, 21, 22, 583, 585, 586, 587, 606, 607, 610,613, 641, 642, 643, 644, 648, 656, 659, 660, 661, 663, 669,670, 680, 683, 684, 686, 687, 711, 716, 725, 726, 733, 737,750, 752, 754, 755, 756, 757, 758, 759, 764, 769, 770: n = A,T,C or G
  misc_feature 771, 772, 773, 774, 775, 776, 777, 778, 779, 780, 781, 783,784, 785, 786, 787, 788, 789, 790, 791, 792, 793, 794, 795,796, 797, 798, 799, 800, 801, 802, 804, 805, 806, 807, 808,809, 810, 811, 812, 813, 814, 815, 816, 817, 818, 819: n = A,T,C or G
  misc_feature 820, 821, 822, 823, 824, 825, 826, 827, 828, 829, 830, 831,832, 833, 834, 835, 836, 837: n = A,T,C or G
ctancnnctncctggngggcnnattggagctccccgcggtggcggagatgtagtcttcacagtgagttgttatttgtagctgtgtttttgtttttgtatagcttatagcaatgcagtgtgctttttattaacatcattttcttttctttttgcagtgattatttattcaagttacttctgattggcgactcaggggttggaaagtcttgccttcttcttaggtttgcagtaagttgaaattgaaatgtctttacaattaatggtacaattaatgctatgtatgttttctaggtagataaaattaaacagttttattcagaataagttaattcttccagaatttatatatttaaagactccaaatatacatccccagtggtatcttggactgttaaatagaaaaatattgttgctcttaaaagaaattcagtgaagtctggttataaagtcagaatgtctaatacttttggtcagagtcaaacagcagttccaatataggcagcaagttaaaggggtagttggtggcctgtgttgaaagcgacttgatgaaaataaatctttaaattaaactttagtagagcanannnaaaaaaaaaaaaaaaaaannccnggnccctttaaaaaatgggggtcccccccgnnnngggnattttaanttnnncntttttnncccccccccnccnngnngggggggccccggccccccccttnttgcnccctttagnnggggggnaaanggccccctggggnanannnnnnggggnaaaannnnnnnnnnnnngnnnnnnnnnnnnnnnnnnnnannnnnnnnnnnnnnnnnnnnnnnnnnnnnnnnnnc

SEQ ID NO: 9608 - DNA, 778 bp, Homo sapiens
  misc_feature 470, 523, 621, 627, 628, 629, 630, 631, 632, 633, 634, 635,636, 637, 638, 639, 640, 641, 642, 643, 644, 645, 646, 647,648, 650, 651, 652, 653, 654, 655, 656, 657, 658, 659, 660,661, 662, 663, 664, 665, 666, 667, 668, 669, 670, 671: n = A,T,C or G
  misc_feature 672, 673, 674, 675, 676, 677, 678, 679, 680, 681, 682, 683,684, 685, 686, 688, 689, 690, 691, 692, 693, 694, 695, 696,698, 699, 700, 701, 702, 703, 704, 705, 706, 707, 708, 709,710, 711, 712, 713, 714, 715, 716, 717, 718, 719, 720: n = A,T,C or G
  misc_feature 721, 722, 723, 724, 725, 726, 727, 728, 730, 731, 732, 733,734, 735, 736, 737, 738, 739, 740, 741, 742, 743, 744, 745,746, 747, 748, 749, 750, 751, 752, 753, 754, 755, 756, 757,758, 759, 760, 761, 762, 763, 764, 765, 766, 767, 768: n = A,T,C or G
  misc_feature 769, 770, 771, 772, 773, 774, 775, 776, 777: n = A,T,C or G
ctatagggcgaattggagctccccgcggtggcggccgaggtacaaaagccaagatgcccattgtgggcctgggcacttggaggtctcttctcggcaaagtgaaagaagcggtgaaggtggccattgatgcagaatatcgccacattgactgtgcctatttctatgagaatcaacatgaggtgggagaagccatccaagagaagatccaagagaaggctgtgatgcgggaggacctgttcatcgtcagcaaggtgtggcccactttctttgagagaccccttgtgaggaaagcctttgagaagaccctcaaggacctgaagctgagctatctggacgtctatcttattcactggccacagggattcaagactggggatgactttttccccaaagatgataaaggtaatatgatcagtggaaaaggaacgttcttggatgcctgggaggccatggaggaactggtggaccangggctgatgaaagcccttggggtctcaaatttcaaccacttccagatcgagangctcttgaacaaacctggactgaaatattaaaccagtgactaaccaggtttgagtgtcacccatacctcacgccaggaaaaactgatccaagtacccnttcggnnnnnnnnnnnnnnnnnnnnnntnnnnnnnnnnnnnnnnnnnnnnnnnnnnnnnnnnnnntnnnnnnnnntnnnnnnnnnnnnnnnnnnnnnnnnnnnnnnntnnnnnnnnnnnnnnnnnnnnnnnnnnnnnnnnnnnnnnnnnnnnnnnng

SEQ ID NO: 9609 - DNA, 626 bp, Homo sapiens
tcctatagggcgaattggagctccaccgcggtggcggccgcttttttttttttttttagcttaaatgttgtttatagaaccaaattctacaagtgttgttgacttgttttttgttgttttgatctctccctttgtactgtgacttccttgggggctcaagctgtgtctcatccccagcacccagaactgtgctggcatgtgttggcacttaatgaagcatgaacaaatgagcaaacaaatgaagaaacggctcagggatggagtgagggaagcaaattagaaaatatcttatctgaagcacctcaagtcagtatttctttaagtaaaatattacttgtgagtatacatagttctccagtgttcccactgttcaggctacagagttgttgaacatgcatataaaagtatgaggcatttttatgtcacagtgaaactattcttactacaactgatatgagtaaatctgagctcttatagaattaagaattattattttaagagttcaatataaatgactttgtaggccaggcctccaagaaatgaaatcttcacattactagatttgctatcaatcctgggaaaaatatcagatgcattatctcagattggctcatctctacccctgc

SEQ ID NO: 9610 - DNA, 900 bp, Homo sapiens
  misc_feature 2, 4, 5, 6, 266, 280, 282, 283, 284, 285, 288, 289, 291,295, 302, 305, 306, 312, 314, 315, 317, 320, 323, 326, 329,331, 332, 335, 336, 337, 338, 339, 340, 342, 345, 346, 347,348, 349, 355, 356, 361, 364, 366, 367, 370, 371, 372: n = A,T,C or G
  misc_feature 374, 376, 377, 378, 379, 380, 382, 385, 386, 387, 390, 391,392, 393, 398, 400, 401, 402, 403, 404, 405, 408, 412, 414,416, 417, 422, 423, 424, 425, 428, 429, 430, 431, 433, 435,436, 437, 438, 439, 441, 446, 447, 448, 453, 456, 459: n = A,T,C or G
  misc_feature 461, 463, 464, 466, 467, 468, 469, 471, 472, 475, 477, 483,484, 485, 487, 488, 489, 491, 492, 493, 495, 496, 497, 501,503, 504, 505, 506, 507, 508, 509, 510, 512, 513, 514, 516,517, 518, 520, 521, 522, 523, 524, 525, 532, 534, 535: n = A,T,C or G
  misc_feature 536, 537, 539, 540, 542, 545, 549, 550, 551, 552, 554, 556,558, 560, 561, 562, 563, 564, 565, 566, 567, 568, 572, 573,574, 575, 576, 577, 579, 583, 586, 587, 588, 589, 590, 591,592, 593, 598, 601, 602, 603, 604, 606, 609, 610, 611: n = A,T,C or G
  misc_feature 615, 617, 619, 625, 627, 628, 630, 631, 632, 633, 634, 635,636, 637, 639, 640, 641, 643, 644, 646, 648, 649, 652, 653,658, 661, 662, 664, 665, 666, 667, 668, 669, 670, 671, 672,673, 674, 676, 678, 680, 681, 682, 683, 685, 687, 688: n = A,T,C or G
  misc_feature 689, 692, 693, 694, 697, 700, 701, 702, 705, 706, 707, 708,709, 710, 714, 715, 716, 717, 719, 721, 722, 723, 724, 725,726, 730, 731, 732, 734, 735, 736, 737, 739, 740, 742, 744,745, 746, 747, 748, 749, 750, 751, 752, 754, 755, 756-759: n = A,T,C or G
  misc_feature 762, 764-767, 772-787, 789, 794-799, 801-803, 805-807,809-810, 812, 815-819, 821-822, 825-828, 830-832, 837-838, 849,851-853, 860-863, 865-866, 869-870, 872-873, 876-884, 886-888, 894: n = A,T,C or G
angnnngacgcgcgtaatacgactcactatagggcgaattggagctcccccgcggtggcggcccgcccgggcaggtactgcggcgggtaggcctaggattgtgggggcaatgaatgaagcgaacagattttcgttcattttggttctcagggtttgttataattttttatttttatgggctttggtgagggaggtaggtggtaagtttgtgtttaatatttttagttgggtgatgaggaatagtgtaaggagtatgggggtaattntggtggaccatacngnnnnatnnanttgnggcattncgnntacctngnncnatntanaantantnnatnnnnnngnctnnnnngaattnnatttnaancnnatnnntncnnnnnanctnnnggnnnngcccngnnnnnnatntttngntnnctttnnnnaannnntnannnnncncttgnnntaatnatngtnananntnnnntnnttntnaaaaannnannntnnntnnnaaantnnnnnnnnannntnnnannnnnnaaaattnannnntnnantcntggnnnngncnantnnnnnnnnntaannnnnntntaantgnnnnnnnntttantgnnnnanttnnntatntngnaaaaananngnnnnnnnnannntnnantnnatnntatanatnnannnnnnnnnnnananannnntntnnnttnnntanatnnnttnnnnnntttnnnntntnnnnnnattnnntnnnntnntntnnnnnnnnngnnnnnnaantnnnnataannnnnnnnnnnnnnnnanatttnnnnnntnnnannntnnanaannnnntnnatnnnntnnnaaagnntttaaaaaaanannntaaaaannnnannttnnannttnnnnnnnnnannnaaattnatttta

SEQ ID NO: 9611 - DNA, 808 bp, Homo sapiens
  misc_feature 21, 25, 27, 28, 33, 37, 38, 39, 50, 58, 60, 62, 67, 80, 552,564, 578, 606, 614, 644, 651, 657, 658, 663, 708, 737, 741,745, 752, 753, 764, 780, 787, 790, 793, 806, 807: n = A,T,C or G
ctatagggcgaatttgggccntttngnngcttnctcnnncggccgccagngtgatggntntntgcanaattcgcccttancgtggtcgcggccgaggtacacagtggtggaaaattggcacagaacctacaagcatttcaatcacaataaggctgtccatgatttatctgttcaaacttgatgtccattttctactgatcaagttgaaagaaaaaacctattctggccaggcacggtggctcatttttattttgtgtatttaatagagatggggtttcaccatgttggtcatggctgatcttaaactcctaggaaagtcaaattaaaaaaaatagcaatgacaatgcttaagttttaaaaaaagtttatcagcttagtctccaaaaccaggaagaaaatatttaatgattaaaaacaagtatgacctggaaagatattagactaaaaggaggaatcacaatgagcaggtgaaaatgttaaaggaaagctttcaatacaccactgaaaaaggcatttctaattggccaacccaaattacccgcgtccttgccnggccggccgctngaaagggcgaattncagcacacttggcgggcgtttactagtngatcccancctcggtacccaagccttggcgtaatcatnggccatngcctgnnttccntggtggtgaaaattgttattccgcttcccaattcccccccaacantaccgagcccggaagccttaaaaggtgtnaaangccntgggggnngccttaatggngggggagcttaacctncccattnaanttngcgttggcgctcnnt

SEQ ID NO: 9612 - DNA, 543 bp, Homo sapiens
  misc_feature 4, 478, 490, 538: n = A,T,C or G
cccngtttcgaccccgcgtccgagaagaggaggctaaaggaagagattgaaaggcgaagagcagaagctgctgagaaacgccagaagatgccagaagatggcttgtcagatgacaagaaaccattcaagtgtttcactcctaaaggttcatctctcaagatagaagagcgagcagaatttttgaataagtctgtgcagaaaagcagtggtgtcaaatcgacccatcaagcagcaatagtctccaagattgacagcagactggagcagtataccagtgcaattgagggaacaaaaagcgcaaaacctacaaagccggcagcctcggatcttcctgttcctgctgaaggtgtacgcaacatcaagagtatgtgggagaaagggaatgtgttttcatcccccactgcagcaggcacaccaaataaggaaactgctggcttgaaggtaggggtttctagccccatcaatgaatggctaactnaaaccccagatngaaacaagtccctgctccaaaccttctgacttgagaccaggagacgtnttcag

SEQ ID NO: 9613 - DNA, 647 bp, Homo sapiens
  misc_feature 4, 7, 10, 18, 20, 25, 34, 35, 36, 71: n = A,T,C or G
cgtnatncgnactcactntnagggncgaattggnnnctccaccgcggtggcggccgaggtacatccaaagnaatctgcttttaaaaaaaaaaaaaaattagcatgctcatatattttcatcagttaatatcgaaactgatgaaaatattaatacttaacattgtattaagtgtcatctttcccaacatttcaaaagtttcatatttaaaatgttaatagagttcaaagcctctaaagttaactatactttccaaagttaactttgggattattattattttccttgccccatctaaacaacaaacaatgacagagtaagtaaaaagccagcgtcctagtttatcttcattcagttgtctaatccttcttagaggtcacacaaggtatcagataaaaccatacagcagaggttgttcattaagagaagtgctgatctaacattttggaactcccaagtcataggcagtcaccaattatttgaatcattcacatgctcattttctaaatagaaacagtttaaaaataattgtctattcaaaagccttcgtgaataagtaattttggacagctaggtttttccagagagccaagaaataagcctttaagggccaggtgcagtggctcatgcctgtaatcccagcactttg

SEQ ID NO: 9614 - DNA, 506 bp, Homo sapiens
  misc_feature 2, 3, 4, 5, 6: n = A,T,C or G
gnnnnngattgtaatacgactcactatagggcgaattgggccctctagatgcatgctcgagcggccgccagtgtgatggatatctgcagaattcgcccttagcgtggtcgcggccgaggtacatggaatcttgctctgtggcggaactggcctgacagtagggagaggcgacagttgacactgcagtttagttggggaaataatggacttttcgacaagtgctctgggatacttcatatggattgcgttagtctcttagggccgccgtaacaaaataccacaaactgaatggcttaaaacatcggacgtttattctctcacagttctggaggctaaaagtccaaaattactcgacctccgaaggctctaggaagaattgctccccatctcttcctagcctctggttgctggcagtccttcacgttcatgccttagagctgcatcacttcagtttctgcctctgtcttcacatgaatgtctttgccttgtaaggatcaagtcatact

SEQ ID NO: 9615 - DNA, 616 bp, Homo sapiens
  misc_feature 5, 190, 495, 550: n = A,T,C or G
gttgngcgcaccacgcgtccgtttcttcaagatttggggctccgcgatacagttaggatggctgtagtacctctgctgttgttggggggtttgtggagcgctgtgggagcgtccagcctgggtgtcgttacttgcggctccgtggtgaagctactcaatacgcgccacaacgtccgactgcactcacacnacgtgcgctatgggtcaggtagtgggcagcagtcagtgacaggtgtaacctctgtggatgacagcaacagttactggaggatacgggggaagagtgccacagtgtgtgagaggggaacccccatcaagtgtggccagcccatccggctgacacatgtcaacactggccgaaacctccatagtcaccacttcacttcacctctttctggaaaccaggaagtgaagtgcttttggtgaggaagtggaaaggtgattatcttggatgactggacagtgctctgtaatggaccctctgggtgaaaaganggttgaggttccggttcaaacacttcttcccttgaggtctggttgtctgtcacangagaacaatatggtcgacctatcaatgggcaaaaagaggtgcattggcattggcccagccaagtct

SEQ ID NO: 9616 - DNA, 398 bp, Homo sapiens
  misc_feature 7, 22: n = A,T,C or G
gattttntacgactcactatanggcgttttgggccctctacatgcatgctcgagcggccgccagtgtgatggatatctgcagaattcgccctttcgagcggccgcccgggcaggtactgtgggcggctctatggcttaggcacaggagtggcccagaagcagaatgaggatgtggactctgcccaggagaagatgagcatcctggcgattatcaacaacatgcagcagtgatggcgccaggctctgcagggtgggcctgatcccagagtggtgcttactgtgctgactgtgtacctcggccgcgaccacgctaagggcgaattccagcacactggcggccgttactagtggatccgagctcggtaccaagcttggcgtaatcatggtcatagctgttt

SEQ ID NO: 9617 - DNA, 523 bp, Homo sapiens
  misc_feature 3, 4, 5, 6, 7, 8: n = A,T,C or G
ggnnnnnngaatgtaatacgactcactatagggcgaattgggccctctagatgcatgctcgagcggccgccagtgtgatggatatctgcagaattcgccctttcgagcggccgcccgggcaggtaccatgtgcctgagatggaggtgtttgtggttgggcaggctggctttgctaattttaaatccaccaaaatatatcattttggcattgacaggtgtattagtctgttctcaggctcctataaggacatacctgagactgggtgatttataaagaaaagaggtttaactgactcacagttccgcatggctggggaggcctcagcaaatttacaatcatggtggaaggggaagcaaacacatccttcttcacatgatggcagcaaaaggaagtgctgagaaaaaggggaaaagccccttagaaaaccatcagatcccatgagaactcactatgatgagaacagcatggaggtaaccacccatgattccattacctgccaccgggtgcgtcccacaacatgtt

SEQ ID NO: 9618 - DNA, 570 bp, Homo sapiens
  misc_feature 2, 3, 4, 8, 42, 78, 114, 119, 161, 407, 437, 465, 484, 495,510, 512, 518, 523, 527, 533: n = A,T,C or G
gnnngagngcgcgtccgttttttttttttttttttttttagngggaacgaaacttttatttccaggacacgtgtgcangaagcaacaagtcaaaattaaccattctatctgaangagangaaacatgtaccaacacatgtcattcaaggagtagaagtttntagaataaggcaaaagttacagggcagcagttatgacctttaatagaactttgttacactgaaagatacagcctgccatacttgcagggaaaatgtctttcaagaagggtaacacccaatttcttccatacatttaaaaatagcctaatcttaaacttatcaaatcattttagggatgagaaaacagggtcacacaagttaggtgacatcatttatggcaaagcaagaatcggcatggttattttntaacccccaagctggaatatttttcactgngccactcttccctatactccagggcttnatttttttttctggaaaancccaaccttcnaatgtccccttgttntnccaagnaattntttntggaanataccccccctggttttttttgtttttttttgagggg

SEQ ID NO: 9619 - DNA, 594 bp, Homo sapiens
  misc_feature 3, 518: n = A,T,C or G
cantgcttgacattgcataggacaaggtcatttgctgtttgctgtctaacaaaaacaagaaacatgaagttttattggctttccagtgtcttcattagattcttctttcctgtgctaatgttctgttgagttctctttttatgcgcatagtgaagcaagctaagtttcaccaggaggagggaatatccactcacaagaattttagtgtctgtttttttagtatcatggtctaaaacaattgggtgaaatacagaggtcttgtttacttcttttctactaatttgctatggaatgtggatttcaaatttctgtgtgtagaaaatgtcttccatttgtcaaagctcattttaagtcccacgacctctaagaagtgttatggactaaatagctatattctcataattcccaaaacaaataaaaataaaaattcttccactccttgattttagtatgttgtgaatgaggagttaaaaattatttttataactggatctccttttgaaatcaatatgttgaangattgttgagccaggagaagttagcaggagatttgatgtttgagaattgctgggtacatcagatcttctagagact

SEQ ID NO: 9620 - DNA, 608 bp, Homo sapiens
  misc_feature 28, 50, 52, 590, 607: n = A,T,C or G
cctgtgcccggcctataatttttgtagnagattttgaattattttccagngnataaaattttaaatgtttccattatatcactgatttatttctgcaaattgaataaattcttaattttctgcatgcacataatacaaaaggtattttcatagttttggatttataccaaatgaaaaggattctcttgatgagcacctttaactgatttttctgttaaagttttaacaatttgttcttggaagtcagttcgtgaaggcaagtttgtcagtattttcacaaaactattcagctgaatccagaaagtgaaacagcaagaatttgcattgtaaaattgtgttataaaattggactttgaaatttcaaaaataagaaaaattttcatgtgtatttatactaaataccgttttaggaaactaggatcagggtgtttctgttggcgttggcattaactagctggatgtaaatttgaaaagccactcaagcagcttcctagtctagaaagtcagaggtttagattagatttccgacatcccttccatttctgacctgtagttctttgtctggaattctgctttgttataaactattngttctaaggagttttgnt

SEQ ID NO: 9621 - DNA, 778 bp, Homo sapiens
  misc_feature 3, 9, 10, 16, 582, 655, 661, 665, 673, 695, 714, 718, 726,746, 750, 755: n = A,T,C or G
acncctatnnggcgantggggccctctagatgcatgctcgagcggccgccagtgtgatggatatctgcagaattcgccctttcgagcggccgcccgggcaggtacacctttcccagggaaaaaaatgtcacactatatcaagaatcttttaaaacgttcacactccttaagagtgattctatttctaggaatcatttcaaaagaaaaaaaatcaaggatgtggatagtgatttatgtaaatgaatgcccatcacactgctactttaaagtgtcactgaataactgcaaatggtgtatattcccaatataaggaaaatagtaaaagaaattatggtataattatgtcattattataaacatttctacaaatcatgatactgaaaatactgaataacactaaaaaatgaacaatactgagtaagaaaggggatagaaaaatatacattatgacttggtattaatgacccaagtcttagaacccaaacatacacttgccattcacaccctcacaatttcccccaaattttatcccacagtcaatggaaagaacaccaaaagaaaagcccagagtgtgaagactgngtcctttacttgtcctttagcttctggaattttaattcattttactttgggttaatggattttaaattttctncctganaaangaaactgnttggcattcaaaaactttaggngaatcccccccctttttgngggnaacaccgnggattggggcctttcccggnctcnggggnggaaaccctcttggggcaattcc

SEQ ID NO: 9622 - DNA, 622 bp, Homo sapiens
  misc_feature 38, 189, 190, 195, 196, 197, 219, 225, 226, 231, 234, 239,243, 247, 249, 255, 259, 260, 270, 275, 276, 277, 278, 281,284, 288, 293, 294, 298, 299, 303, 304, 314, 315, 316, 324,329, 335, 336, 343, 357, 360, 363, 364, 365, 373, 378: n = A,T,C or G
  misc_feature 379, 380, 388, 390, 393, 397, 398, 401, 405, 410, 413, 415,422, 426, 427, 428, 435, 441, 450, 453, 474, 481, 485, 486,488, 500, 510, 512, 515, 517, 520, 524, 529, 536, 537, 544,545, 551, 552, 563, 564, 565, 566, 567, 569, 579, 581: n = A,T,C or G
  misc_feature 586, 601, 602, 608, 609, 616, 617: n = A,T,C or G
tcactatagggcgaattgggtaccgggccccccctcgngtcgacggtatcgataagcttgatatcgaattcctgcagcccgggggatccactagttctagagcggccgcactttttttttttttttttttttttttttttttttttttttttttttttttttttttttttttttttttttttttttttnnccccnnnccccccccgggggggacccccncttttnntcccnttnagggngggnaaangncccccngggnnaaaaaagggnaaaannnnttnccngggnaaaanngttnncccnnaaaaattccnnnaaaaaaanaaccngaaacnnaaaaggnaaaacccggggggnccnaannngggacccnccccnnnttattggngnggncccnncgncccnttttnaanangggaaancccnnngggcccncttgtnttaaaaaancgncccccccccgggggaaaaggngggtttnggtnntngggccccttttncgttttcctnanaananaancccnggggnctggggnnttggggnngggggnnaaggttttaannnnntnaaaagggggntnttttnggtttccccaaaaanngggggnnaaccagnnaaaat

SEQ ID NO: 9623 - DNA, 695 bp, Homo sapiens
  misc_feature 4, 6, 21, 23, 46, 57, 59, 79, 147, 158, 159, 161, 173, 175,176, 177, 185, 190, 193, 194, 201, 203, 204, 208, 214, 219,220, 221, 222, 224, 225, 226, 227, 239, 240, 241, 242, 243,246, 247, 248, 254, 256, 257, 258, 259, 260, 267, 268: n = A,T,C or G
  misc_feature 269, 270, 271, 276, 291, 292, 294, 295, 296, 303, 305, 306,318, 327, 328, 329, 331, 333, 334, 335, 338, 339, 340, 351,354, 355, 356, 358, 359, 360, 363, 364, 367, 369, 370, 371,374, 382, 394, 397, 399, 400, 401, 402, 403, 404, 406: n = A,T,C or G
  misc_feature 407, 414, 415, 420, 421, 422, 431, 432, 446, 453, 454, 458,462, 463, 464, 474, 480, 483, 485, 490, 491, 492, 493, 494,498, 499, 501, 502, 508, 514, 517, 523, 535, 536, 553, 554,556, 557, 559, 575, 580, 589, 617, 621, 622, 629, 652: n = A,T,C or G
  misc_feature 665, 667, 683, 695: n = A,T,C or G
tttntnatacgtacttcactntnatggtcgtacttgggccctctanagcatgctcgnancggccgccagtgtgtatggnatatctgcagaattcgcccttagcgtggtcgcggccgaggtacttttttttttttttttttttttttnaaaaaaaaagnntnttttttcccccnannngggggggnggggnccnnttttggntnncccnaatttnccccnnnngnnnnaaaaaaattttnnnnnttnnncccccngnnnnngggggannnnnggggnccccccccccccccnnannnttttttngnnttttaaaaaaanggggggttnnncntnnnggnnngggggggcccnaannncnnnccnnaangnnnttncccccccnggccccccaaanggntnnnnnnannggggggnnccccnnnccccccccnnaaaaaatttttttnaaaaaanntttngggnnnccccaaaaancccccnaantnggggnnnnnccgnnanntttttnaaaaantcntttggnaccccccaaaannttcccaaattgggggcnnanncngcccaaatttaaaaancggcntaaaaaatntccccgggggttttcccttaaaccaagnaatnnacccccnaagggggttaaaaagggcctttnaaaaccccccacncnaaaatttccagagggnggggtttatccn

SEQ ID NO: 9624 - DNA, 582 bp, Homo sapiens
  misc_feature 3, 5, 17, 20, 392, 400, 432, 454, 482, 541: n = A,T,C or G
ggntnattccgctttcnccncgcgtccgttgagacaggaaattgagaaattccaaaagcaggctttagaggcatctaataggattcaggaatcaaagaatcagtgtactcaggtggtacaggaaagagagagccttctggtgaaaatcaaagtcctggagcaagacaaggcaaggctgcagaggctggaggatgagctgaatcgtgcaaaatcaactctagaggcagaaaccagggtgaaacagcgcctggagtgtgagaaacagcaaattcagaatgacctgaatcagtggaaggactcaatattcccgcaaggaggaggctattaggaagatagaatcggaaagagaaaagagtgagagagagaagaacagtcttaggagttgaggatcnaaagactncaagcagagatcaagagaattgaagagaggtncagggcgtaagctggaggattntaccagggagacaccagtcacagttagnaaccagacgctcccgatttcagaggggaggattgataaacctcagacagcgcccatatngggtcccatcgagaggacccaacttgagtgttgagtggacc

SEQ ID NO: 9625 - DNA, 885 bp, Homo sapiens
  misc_feature 345, 445, 514, 547, 576, 627, 645, 657, 671, 674, 692, 697,705, 711, 760, 770, 787, 799, 808, 822, 833, 841, 845, 852,853, 858, 861, 864, 868, 875: n = A,T,C or G
tttttcctttactatagggcgaattgggccctttagatgcatgctcgagcggccgccagtgtgatggatatctgcagaattcgccctttcgagcggccgcccgggcaggtaccaccgtagcaggcattggtggtatctatgccctcaatatcagtattgcctgaatcctggaagagttccatgagcactgttttgacagctttggacttgtcaatgatggtcttaagtgcctacttccagcctgcccacagagtcccatgggagctgtatgcgctccatcagccgttgcaccaccgtcaggcacagggagttgatgtcctcttggactgagcagaagcccatacnggtctggcccaacccactgtatactttcctgcttccacattgttatacttctccaggtcaagtttggtccacatattgggctgggaaagtagacctccanggccaggatgcccacgttcttttggccaaatatcttgttttggccaggggggacagcagaagcttgtanaaaacctttggtgggctactgggagcaagccancaagtgtgaaggaagtttccttgcaccgntcttgtcaagttgcaaaatgccccttcactggaatcaacaaacctgcattnttcagaaggaccaggcanaaacccaaccanttcaaaaaacccancanaaacctttgaaagggatncccgngttccttnggccgngaacacccttaaggcgaattcaacccacttgcgggcgttcttatggatnccaactcggnccaaacttggggtaatnatggcatactgnttcctgtgngaaaatggtatccnttacaaatccnacaacatncaanccggaannttaangtnaancctnggggccnaagaggaact

SEQ ID NO: 9626 - DNA, 784 bp, Homo sapiens
  misc_feature 5, 6, 7, 9, 16, 34, 495, 496, 497, 498, 499, 500, 501, 502,503, 504, 505, 506, 507, 508, 509, 510, 511, 512, 513, 514,515, 516, 517, 518, 519, 520, 521, 522, 523, 524, 525, 526,527, 528, 529, 530, 531, 532, 533, 534, 535, 536, 537: n = A,T,C or G
  misc_feature 538, 539, 540, 541, 542, 543, 544, 545, 546, 547, 548, 549,550, 551, 552, 553, 554, 555, 556, 557, 558, 559, 560, 561,562, 563, 564, 565, 566, 567, 568, 569, 570, 571, 572, 573,574, 575, 576, 577, 578, 579, 580, 581, 582, 583, 584: n = A,T,C or G
  misc_feature 585, 586, 587, 588, 589, 590, 591, 592, 593, 594, 595, 596,597, 598, 599, 600, 601, 602, 603, 604, 605, 606, 607, 608,609, 610, 611, 612, 613, 614, 615, 616, 617, 618, 619, 620,621, 622, 623, 624, 625, 626, 627, 628, 629, 630, 631: n = A,T,C or G
  misc_feature 632, 633, 634, 635, 636, 637, 638, 639, 640, 641, 642, 643,644, 645, 646, 647, 648, 649, 650, 651, 652, 653, 654, 655,656, 657, 658, 659, 660, 661, 662, 663, 664, 665, 666, 667,668, 669, 670, 671, 672, 673, 674, 675, 676, 677, 678: n = A,T,C or G
  misc_feature 679, 680, 681, 682, 683, 684, 685, 686, 687, 688, 689, 690,691, 692, 693, 694, 695, 696, 697, 698, 699, 700, 701, 702,703, 704, 705, 706, 707, 708, 709, 710, 711, 712, 713, 714,715, 716, 717, 718, 719, 720, 721, 722, 723, 724, 725: n = A,T,C or G
  misc_feature 726, 727, 728, 729, 730, 731, 732, 733, 734, 735, 736, 737,738, 739, 740, 741, 742, 743, 744, 745, 746, 747, 748, 749,750, 751, 752, 753, 754, 755, 756, 757, 758, 759, 760, 761,762, 763, 764, 765, 766, 767, 768, 769, 770, 771, 772-784: n = A,T,C or G
agttnnnangtatacnactactatatggcgaatngggccctctagatgcatgctcgagcggccgccagtgtgatggatatctgcagaattcgccctttcgagcggccgcccgggcaggtacgctaggccgcggccttcttttctcccagaaaggtgaccctccccaccctgcgtcctgctccttccgtccatactgatgtttgttttgctggaggccagtagcaactggacagtagctctaggggaggagaatccacctgcggcgaagggtgggatttgttttctttgagccttctccagtgtggggcagctggcgcatctccacttagcgccgggggtccgggatcctacatcgcagggactggggatctcctgggttctgtacctcggccgcgaccacgctaagggcgaattccagcacactggcggccgttactagtggatccgagctcggtaccaagcttggcgtaatcatggtcatagctgtttccctgnnnnnnnnnnnnnnnnnnnnnnnnnnnnnnnnnnnnnnnnnnnnnnnnnnnnnnnnnnnnnnnnnnnnnnnnnnnnnnnnnnnnnnnnnnnnnnnnnnnnnnnnnnnnnnnnnnnnnnnnnnnnnnnnnnnnnnnnnnnnnnnnnnnnnnnnnnnnnnnnnnnnnnnnnnnnnnnnnnnnnnnnnnnnnnnnnnnnnnnnnnnnnnnnnnnnnnnnnnnnnnnnnnnnnnnnnnnnnnnnnnnnnnnnnnnnnnnnnnnnnnnnnnnnnnnnnnnnnnnnnnnnnnnnnn

SEQ ID NO: 9627 - DNA, 758 bp, Homo sapiens
  misc_feature 2, 3, 4, 5, 6, 8, 15, 17, 18, 21, 24, 26, 440, 680, 723, 730: n = A,T,C or G
gnnnnntngaatacnanntanttntngggcgaatggggccctctagatgcatgctcgagcggccgccagtgtgatggatatctgcagaattcgcccttagcgtggtcgcggccgaggtacaacaggcttcagatgttactatagataatcacaaggaacactgcgcttggggcatgactgccctcagcaacccttctggcggcagacacagttgttagttttccaacatcctgctttcatgagaacagttttctgtttgctcatatagccttcagtggtatactgagttggtcacgaccttcattctttcggcctgtaacatctccccatttttgtttttgcattaattgaataaaggtaattgcaggttgtgcagctctcaattgccgtttggtggtccagctgattttgcagacttatatcagctgtcagcagactcntcgcagggtttctcattctcgttcttcttgtcagtgtcagtttctctgctccagcagacctccactcacgtccctgtcctaggtgccagttgtcgctgttggttgttatgggagtgaacgaagggggatgaatgcagaaacgaagacaaagacaaaaagtatttttggaagaaggggtcagggggctccttctagtgagcaagggcccccgccgtacctgcccgggcggccgctcgaaanggcgaattccagcacactggcggccggtactagtggatccganctcggtnccaagccttggcgtaatcatggtcataa

SEQ ID NO: 9628 - DNA, 797 bp, Homo sapiens
  misc_feature 480, 620, 677, 732, 735, 741, 743, 748, 758, 761, 764, 773,797: n = A,T,C or G
gggcgaattgggccctctagatgcatgctcgagcggccgccagtgtgatggatatctgcagaattcgccctttcgagcggccgcccgggcaggtacctgcaggcctcctacacctacctctctctgggcttctatttcgaccgcgatgatgtggctctggaaggcgtgagccacttcttccgcgaattggccgaggagaagcgcgagggttacgagcgtctcctgaagatgcaaaaccagcgtggcggccgcgctctcttccaggacatcaagaagccagctgaagatgagtggggtaaaaccccagacgccatgaaagctgccatggccctggagaaaaagctgaaccaggcccttttggatcttcatgccctgggttctgcccgcacggacccccatctctgtgacttcctggagactcacttcctagatgaggaagtgaagcttatcaagaagatgggtgaccacctgaccaacctncacaggctgggtggcccggaggctgggctgggcgagtatctcttcgaaaggctcactctcaagcacgactaaaagccttctgagcccaacgacttctgaagggccccttgcaaaagtaatagggcttctgcctaagcctnttccttcagccaataggcagctttcttaactatctaacaagccttggaccaaatggnaataaagctttttttgatgcaaaaaaaaaaaaaaaaaaaaaaaagtacctttggncgngaaccncncttanggcgaaattncanccncactgggcnggccggtacttagggggatcccan

SEQ ID NO: 9629 - DNA, 671 bp, Homo sapiens
  misc_feature 2, 4, 9, 13, 34, 35, 36, 416, 431, 437, 456, 520, 523, 529,537, 547, 572, 578, 601, 614, 618, 623, 624, 627, 628, 629,630, 631, 632, 633, 634, 635, 636, 637, 638, 639, 640, 641,642, 643, 644, 645, 646, 647, 648, 649, 650, 651, 652: n = A,T,C or G
  misc_feature 653, 654, 655, 656, 657, 658, 659, 660, 661, 662, 663, 664,665, 666, 667, 668, 669, 670, 671: n = A,T,C or G
tncntactncctntaggtcgacttgggccctctnnntgcatgctcgagcggccgccagtgtgatggatatctgcagaattcgccctttcgagcggccgcccgggcaggtacgcgggggaaggttcgtttacgcgcccgcttcgccgtgcaggtggtggcgaagcgctcctccgaaaggtttcggaagctggtggtagctctgaagataacgctgcgttagggcatactgcggcggaggatggaactccgattgaaagcagttgctggagtggagcacgaatttcaacaagccgcatgttgaagtgtgaggcgtgaaagggtatgtctgatatttgctttaaaatgctccagcaaagaaattaagggatggatgaagcaaaagagccaggtatggtggctcatgcctctaatctcancactttgggaggccnaagcangcagatcacctgaggtcangagtttgagaccatcctgaccaacatggtgaaactcgtctctactacaaacataaaaaaaatanctnggcgtngtacctcngcccgacccnctaaggcgaatttcacacactggcnggcgtnctagtggatccagctcgtaccancttggcgtatatngtanctttnnccnnnnnnnnnnnnnnnnnnnnnnnnnnnnnnnnnnnnnnnnnnnnn

SEQ ID NO: 9630 - DNA, 852 bp, Homo sapiens
  misc_feature 3, 614, 643, 649, 680, 710, 711, 742, 764, 791, 802, 804,808, 828, 850: n = A,T,C or G
atntatcgactcactatagggcgaattgggccctctagatgcatgctcgagcggcccgccagtgtgatggatatctgcagaattcggcttagcgtggtcgcggccgaggtacagcatgcactgcatttaatgtgtatatcaggacaaaaaatattaatgagagaacacacacagttttcttcctccccgaccagccaaattctccaccctccagccccattcaaataaaggagagaagagtctttcttggtggataagaagcttgattgttttacataatacaagaatagagaaaaaagcgggaggtggggaggtgagagggaaaagagagcctgatgagctcaacaggaagtgagtatagacagagaagagaagaccagggactaagccctgggaccctcctttggtaataggtcagagagaagaagaaaagcaaagaagcctcagagaagtaacccggtaaggtaggaggaaaaccaaagagcatggtgtcctggaagctcagtgaagaactggatcaaggaggaggagtgaccagccaggtcaaaagctactgatgcatcaaggaggatgaagaccaagaactggcccgttgggatttaacaaccttgaanggcattgctggtctcaccaaacaattttngagganttgatgggggccaaagctgattggactgggnttaagaagagaaaagaaagggaaagaattnnagacccgggggtgcttgacaattttttttangatttttgcttgcaaaaggganccaggtaaattgaaatggaaactgganggagaaattangnccangggagggatttttaaagtcngaaaacatccaccatttttccntg

SEQ ID NO: 9631 - DNA, 858 bp, Homo sapiens
  misc_feature 6, 448, 463, 471, 494, 509, 518, 519, 529, 647, 648, 651,655, 658, 672, 690, 693, 695, 696, 697, 698, 706, 733, 746,753, 755, 763, 765, 766, 767, 768, 769, 770, 772, 773, 774,776, 778, 780, 781, 782, 784, 785, 787, 790, 791, 793: n = A,T,C or G
  misc_feature 794, 797, 799, 801, 806, 809, 816, 821, 822, 825, 827, 832,834, 839, 844, 845, 848, 850, 851, 853, 855, 856, 858: n = A,T,C or G
ggcgantggggccctctagatgcatgctcgagcggccgccagtgtgatggatatctgcagaattcgcccttagcgtggtcgcggccgaggtaccatggaaggcacagaaatcgagcaaggaagaaaatattagttattttgatctacatctttttctaaagaaaagtggagcttgcctccagttcaattcacaagagcattttccctcccatgcccaccttttcttgtggctgtcgctaggaaggatgcagaggctgtgtggtttaccaaatgccttaacttagcagtgaatgacaactgtcaaacacatgttgagggaaaatttttactgattcacaaaaaggaagacagtttgcccactcttagtggcacaaatcaaagctgcatgcactacattatccaaattagtcgtaaccaaatagttaaaaaattctgctggggcacgggngggctcatacctggnatcccaanctctttgggaaggcccaagcagntggatcacccttgangttaggagnntttgagaccnacccctgggcccaaccaggggtgaaaacccctgtctcgtcttaaaaaaataccaaaaaattagcccgggccgtggtgggtgcatgcctgtagtcccaaggtacctgcccggggccggnncgntctnaangggcgaattcccancccacttggcggcccggntcntnnnnggatcccnagctccggtacccaagctttgggcggnaatcatggggccntagcctngnttttccgnannnnnnannnananannngnnanggnngnnatntngngaaanaancggcaantcggnnaangntgganantgtangtgannaangnngnannan

SEQ ID NO: 9632 - DNA, 801 bp, Homo sapiens
  misc_feature 6, 568, 577, 578, 579, 580, 581, 582, 584, 585, 586, 587,588, 589, 590, 591, 592, 593, 594, 595, 596, 597, 598, 599,600, 601, 602, 603, 604, 605, 606, 607, 608, 609, 610, 611,612, 613, 614, 615, 616, 617, 618, 619, 620, 621, 622: n = A,T,C or G
  misc_feature 623, 624, 625, 626, 627, 628, 629, 630, 631, 632, 633, 634,635, 636, 637, 638, 639, 640, 641, 642, 643, 644, 645, 646,647, 648, 649, 650, 651, 652, 653, 654, 655, 656, 657, 658,659, 660, 661, 662, 663, 664, 665, 666, 667, 668, 669: n = A,T,C or G
  misc_feature 670, 671, 672, 673, 674, 675, 676, 677, 678, 679, 680, 681,682, 683, 684, 685, 686, 687, 688, 689, 690, 691, 692, 693,694, 695, 696, 697, 698, 699, 700, 701, 702, 703, 704, 705,706, 707, 708, 709, 710, 711, 712, 713, 714, 715, 716: n = A,T,C or G
  misc_feature 717, 718, 719, 720, 721, 722, 723, 724, 725, 726, 727, 728,729, 730, 731, 732, 733, 734, 735, 736, 737, 738, 739, 740,741, 742, 743, 744, 745, 746, 747, 748, 749, 750, 751, 752,753, 754, 755, 756, 757, 758, 759, 760, 761, 762, 763: n = A,T,C or G
  misc_feature 764, 765, 766, 767, 768, 769, 770, 771, 772, 773, 774, 775,776, 777, 778, 779, 780, 781, 782, 783, 784, 785, 786, 787,788, 789, 790, 791, 792, 793, 794, 795, 796, 797, 798, 799,800, 801: n = A,T,C or G
caactnactatagggcgaattgggccctctagatgcatgctcgagcggccgccagtgtgatggatatctgcagaattcgccctttcgagcggccgcccgggcaggtactctgtttcaggccctcactgggtgccggagatccactagaatacaagatctgtttctgtgtctttgagggacatgtatccagcaattagttacatcagtcccttgtagatgtcaattccagtgtcacaaatttcttgttttgcaacgttgagcaagtttttttcaatgtttctaagcctcagttttttgccctacaaaatgtggtaataatatttaaccattagtaatgttgtgaaaattaagcaaaaatacatgtaatatatttaacaatgcttggtgttcgttaatgctttaatatatgctaactacttatattattgttgttgttgtgttaaacatgcataagacagcaggtacctcggccgcgaccacgctaagggcgaattccagcacactggcggccgttactaagtggatccgagctcggtaccaagcttggcgtaatcatggtcatagctgnttccggggnnnnnnannnnnnnnnnnnnnnnnnnnnnnnnnnnnnnnnnnnnnnnnnnnnnnnnnnnnnnnnnnnnnnnnnnnnnnnnnnnnnnnnnnnnnnnnnnnnnnnnnnnnnnnnnnnnnnnnnnnnnnnnnnnnnnnnnnnnnnnnnnnnnnnnnnnnnnnnnnnnnnnnnnnnnnnnnnnnnnnnnnnnnnnnnnnnnnnnnnnnnnnnnnnnnnnnnnnnnnnnn

SEQ ID NO: 9633 - DNA, 904 bp, Homo sapiens
  misc_feature 30, 40, 437, 477, 492, 501, 504, 519, 529, 533, 538, 554,558, 570, 579, 590, 602, 605, 617, 621, 634, 654, 657, 670,676, 686, 708, 711, 713, 737, 744, 757, 768, 769, 774, 796,797, 800, 803, 811, 812, 817, 824, 826, 827, 833, 834: n = A,T,C or G
  misc_feature 835, 852, 853, 854, 855, 856, 857, 858, 859, 860, 861, 862,868, 869, 874, 876, 877, 878, 879, 885, 886, 887, 888, 891,892, 896, 897, 898, 899, 900, 901, 902, 903, 904: n = A,T,C or G
actcactatagggcgaatggggccctctanatgcatgctngagcggccgccagtgtgatggatatctgcagaattcgcccttagcgtggtcgcggccgaggtacgcggggaggcattgaggcagccagcgcaggggcttctgctgagggggcaggcggagcttgaggaaaccgcagataagtttttttctctttgaaagatagagattaatacaactacttaaaaaatatagtcaataggttactaagatattgcttagcgttaagtttttaacgtaattttaatagcttaagattttaagagaaaatatgaagacttagaagagtagcatgaggaaggaaaagataaaaggtttctaaaacatgacggaggttgagatgaagcttcttcatggagtaaaaaatgtatttaaaagaaaattgagagaaaggactacngagccccgaattaataccaattgaagggccatgcttttanattaaaatgaagggnaccttaaangcnttaaagttttatttnaaaagttgtngggngaatnaaaaaaatttgaaggngaantttttaaaaaanaaatttaancccaagggggnttaaaaaaaccnttnaaattcttttancccnggggaaaattgcnttttttttaaagcccttttnacnctttttttttaancccccnaacaaaaatngggaaaaaaattatttgggggnggngnggggaaaaaaaaaaattttggganaaaaaanaaaaatttttaanggggaaaaaannggganaaaaaaaaaattttcttggggnnggnaancccttttnnggggnaaatttncnncccccnnngggggggcgtttttttnnnnnnnnnnnccctcnnccccnannnngggggnnnnaanngggnnnnnnnnn

SEQ ID NO: 9634 - DNA, 594 bp, Homo sapiens
  misc_feature 1, 5, 27, 32, 35, 38, 45, 46, 69, 319, 355, 385, 395, 401,414, 416, 420, 424, 425, 427, 428, 429, 430, 431, 432, 433,434, 435, 436, 437, 438, 439, 440, 441, 442, 443, 444, 445,446, 447, 448, 449, 450, 451, 452, 453, 454, 455, 456: n = A,T,C or G
  misc_feature 457, 458, 459, 460, 461, 462, 463, 464, 465, 466, 467, 468,469, 470, 471, 472, 473, 474, 475, 476, 477, 478, 479, 480,481, 482, 483, 484, 485, 486, 487, 488, 489, 490, 491, 492,493, 494, 495, 496, 497, 498, 499, 500, 501, 502, 503: n = A,T,C or G
  misc_feature 504, 505, 506, 507, 508, 509, 510, 511, 512, 513, 514, 515,516, 517, 518, 519, 520, 521, 522, 523, 524, 525, 526, 527,528, 529, 530, 531, 532, 533, 534, 535, 536, 537, 538, 539,540, 541, 542, 543, 544, 545, 546, 547, 548, 549, 550: n = A,T,C or G
  misc_feature 551, 552, 553, 554, 555, 556, 557, 558, 559, 560, 561, 562,563, 564, 565, 566, 567, 568, 569, 570, 571, 572, 573, 574,575, 576, 577, 578, 579, 580, 581, 582, 583, 584, 585, 586,587, 588, 589, 590, 591, 592, 593, 594: n = A,T,C or G
ntatncgccagacgcgcattaaccctncactnaanggnaacaaannctgggtaccgggccccccctcgngtcgacggtatcgataagcttgatatcgaattcctgcagcccgggggatccactagttctagagcggccgaggtactggaccggccattggaccatttgttccaaaacccataaattgttgcctaaatttataatgatcatgaaaccctaggcagaggaggagaaattgaaggtccagggcaatgaaagaaaaatggcgccctctcaatttagtcttctctcattggccatgtttcagattttgacctanaaatgcgagctgtggttaggcttggttagagtgcancaagcaacatgacagatggtggcacgctgnttttacccanccctgnctgtacctgcccngncggncgcnncnnnnnnnnnnnnnnnnnnnnnnnnnnnnnnnnnnnnnnnnnnnnnnnnnnnnnnnnnnnnnnnnnnnnnnnnnnnnnnnnnnnnnnnnnnnnnnnnnnnnnnnnnnnnnnnnnnnnnnnnnnnnnnnnnnnnnnnnnnnnnnnnnnnnnnnnnnnnnnnnnnnnnnnn

SEQ ID NO: 9635 - DNA, 490 bp, Homo sapiens
  misc_feature 1, 264, 319, 348, 405, 421: n = A,T,C or G
naactactattgggcgaattgggccctctagatgcatgctcgagcggccgccagtgtgatggatatctgcagaattcgccctttcgagcggccgcccgggcaggtacgcgggaaaagataaaatttgaaatctggttaggctggtgttagggttctttgtttttggggtttggcagagatgtgtttaagtgctgtggccagaagcgggggggggtttggtgaaaattttttgttatgatgtctgtgtggaaagcggctgtgcanacattcaattgttattattatgtcctacaagcattaattaattaacacactttantaaagtatgttcgtctgtaatattgaacntaggtgcgataaataataggatgaggcaggaatcaaaagacagatactgcgacatanggtgctccggctccancgtctccaatgctatcgcgtgcacaccccccaacgaaataccaaatgcatggagagctcccctgagtgg

SEQ ID NO: 9636 - DNA, 570 bp, Homo sapiens
  misc_feature 2, 3, 11, 20: n = A,T,C or G
gnncgagttcnggtcgttcncgcgtccgggggagggttggtggtatatttttcccctcttttttccttcctctcctacatctcccttttcccccgatccaagttgtagatggaatagaagcccttgttgctgtagatgtgcgtgcagtctggcagccttaagcccacctgggcacttttagataaaaaaaaaaaaaaacaaaaaacaacaccaaaaaaacagcagtgatatatatattccaggtggtttttagtctttactgatgaaagggtgttcatgttagtttcttcaaaaccctatctaatactaggcaaagtagccaagagccttttgttttgtttttattttgataaattagtggagaaatggcattttaagaggagtctcttctcaacttacctgagagtcgaattcttctcttccctaaccaatgaagctaagtggttatcccagaaacttgtcttctaaaagggaggactccaggccatcaataaagatgtccagggcagtgagcgtactttttacaccctgtagaaattgtgggctgtagcgttactctgattttctggc

SEQ ID NO: 9637 - DNA, 591 bp, Homo sapiens
cccgcgtccggccatctgttagcattgatttctggaatggagcagctttctcaagtttggtcttgctagtcatgaggtcatgtcagtgtcttaggtcactgctgctcaccttccttacccagggagtatactgcataggtttctgaacacctgttttcattattcactgttcctctcactgccaagaatggagggaccctcagttgaagatcaaattgactctgaagaaaaactggagatgtttctcttggagtttggatagagtattcacttgataacatgtttttcccctgccttgctcttcacaagaacatctggccaggcattaacaattagtaaatttttttgcatatgaacagtatttttctggtcatgtagatgggtgcacatgacactaaacagcattgtttagtgttatccctcttaactggtgggttgtatttggggtggaggctgtagccgaggagaagacattcacctctgtactcgagaaactttgtgtaggaatttagtttatttttttattttttttaattttttattttttactacttttactgttagcacaatgctataattgagctaatcttt

SEQ ID NO: 9638 - DNA, 620 bp, Homo sapiens
  misc_feature 3, 8, 21, 22, 24, 34, 69, 444: n = A,T,C or G
ggngtcgnccacgcgtccggnnantcttataagnaatcacgattttctacacctgtcattgagccaagnaaagtccagtttatgacacgtatgtactagtgaacaccgtcctcgatctgtacgaaatgtgaaatgtttagggacatctccatgctgtcacttgtgatttgccctcttatgtattttggtcatattgccaactggaaagtcaaaattttctaacaactttaagtaagttctttgaagacttagtgctgtttttaatccagtttagaaagtaacttaattttaataccactactaaaaattcgaaaatttcttctttaatcacattcaatatggttaaaagaacaacactaattgacattgcgtgggctttttctccctttgtttaaaatgtcatttgttgagcaagagttgtatagtattatctacttacttgangctgttaatttttcattacagtgttttgtaaatgtatccacgagaccatgatgcattgttttgtgctcaacttgtgttttgtatttaaagcattttgaatgaagtgtattttataagcatttaatatttatgctctttagaatggaacacagaaaacaaaccttataagtcctgat

SEQ ID NO: 9639 - DNA, 613 bp, Homo sapiens
  misc_feature 2, 10, 19, 25, 26, 32: n = A,T,C or G
tnctggtacntcactctgngggccnnattggnacctccaccgcggtggcggccgcccgggcaggtacgcgggttgaccgcgatgatgtggctttgaagaactttgccaaatactttcttcaccaatctcatgaggagagggaacatgctgagaaactgatgaagctgcagaaccaacgaggtggccgaatcttccttcaggatatcaagaaaccagactgtgatgactgggagagcgggctgaatgcaatggagtgtgcattacatttggaaaaaaatgtgaatcagtcactactggaactgcacaaactggccactgacaaaaatgacccccatttgtgtgacttcattgagacacattacctgaatgagcaggtgaaagccatcaaagaattgggtgaccacgtgaccaacttgcgcaagatgggagcgcccgaatctggcttggcggaatatctctttgacgagcacaccctgggagacagtgataatgaaagctaagcctcgggctaatttccccatagccgtggggtgacttccctggtcaccaaggcagtgcatgcatgttggggtttcctttaccttttctataagttgtacctcggccgctctag

SEQ ID NO: 9640 - DNA, 635 bp, Homo sapiens
  misc_feature 3, 10, 11, 15, 17, 30, 41, 466, 490, 544, 553, 558, 572,596, 598, 601, 630, 632: n = A,T,C or G
tantcctatnngtcnanttgggccctctanagcatgctcgnccggccgccagtgtgatggatatctgcagaattcgccctttcgagcggccgcccgggcaggtacaggtgggtctcagcggggtgggatggggcacggagtgggagacagatccatctaagggcctgttagacaaatgggggaataggcagggaggagggtctctagacaaattccagggctagaggctgagacttagtgactgaggtgctgggggttgtggggctgtgacaggcagagggaggtgtcagataccaggacaagggtgttgtgaatgctacctcctgcccctactcttgggatggctccaagggctgaggtgtgaatccccagtgtgctccaggaatggggctgtgtgggctgggagtggtggctcacgcctgtaatcccagcactttgggaggctgagctgagcggatcacctgangtcaagagttcgagaccagcctanccaacatggtgaaaccccgtctctactaaaaatacaaaaaaaaatttatcccancgtgggggngggcnccctattatcccanctcctggggaagctgacccaggantntcnctttgaacctgggaagtggaaggttgctntnaac

SEQ ID NO: 9641 - DNA, 736 bp, Homo sapiens
  misc_feature 5, 9, 10, 11, 12, 13, 14, 32, 38, 494, 514, 622, 646, 665,693, 700, 726, 729, 730, 736: n = A,T,C or G
tgtgncatnnnnnntcctcgattccccaagancacganctcaaggaaatgatagaaacccttgctcggaagctgaatgagaaatccaaagagcaaatggaacttcaccaccagaatctgaatctccaagaaacactgaagagagtagcaaattgttcagctccttgtccgcaagactggatctggcatggagaaaactgttacctattttcctcgggctcatttaactgggaaaacagccaagagaagtgcttgtctttggatgccaagttgctgaaaattaatagcacagctgatctggacttcatccagcaagcaatttcctattccagttttccattctggatggggctgtctcggaggaaccccagctacccatggctctgggaggacggttctcctttgatgccccacttatttagagtccgaggcgctgtctcccagacatacccttcaggtacctgtgcatatatacaacgaggagctgtttatgcngaaaactgcattttagctgncttcagtatatgtcagaagaaggcaaacctaagagcacagtgaattgaaggctctggaagaaaagaaaaaagtcttgagtttattctggaattaaactatctttgtcnctgggtggcaaacatgagagccanaaactgcattaactggtgnagaactccttgcagaaactggggtcagngcctggncctttttgcacattttgatctagctnccnnatattn

SEQ ID NO: 9642 - DNA, 814 bp, Homo sapiens
  misc_feature 10, 18, 616, 627, 656, 660, 672, 681, 695, 699, 707, 712,716, 744, 751, 752, 756, 757, 762, 763, 764, 765, 766, 767,768, 769, 770, 771, 772, 773, 774, 775, 776, 777, 778, 779,780, 781, 782, 783, 784, 785, 786, 787, 788, 789, 790: n = A,T,C or G
  misc_feature 791, 792, 793, 794, 795, 796, 797, 798, 799, 800, 801, 802,803, 804, 805, 806, 807, 808, 809, 810, 811, 812, 813: n = A,T,C or G
taactgctantgggcgantggggccctctagatgcatgctcgagcggccgccagtgtgatggatatctgcagaattcgcccttagcgtggtcgcggccgaggtactgtaaacaactcacacatggttgtaactagccagggcccagaactggttaggcagcttttctcccaaggccacagtgaagaatcagtctcagccaaaacacaggagtcctggaaagaagacttgaactccctcttttctggcaggagaatggggaaagggaggctaaacagattaccttttaactaacaactttatctaaacggattaacattgaagattaaccttcctggagccacagagctgaatccccactcctagggtgcatggctgagtggaagctggtctctgctctcagccaggatctggttccaacctctgtctgaaacggagggcagtatcttagctaacttccttttaaaggtgctctctcaagtctctccagaatgggctccatggaaagttaatcccacaggctaaggggtctcatcttcacagtatccaactgcagcatttaaatgcacttcatcttccctggaacaacaggaaaatacagtgaaagctcaaaatgangcaggtgacanggactgggaagaaaggcttgtacctgccnggcngccgctcgaaanggcgaattncacccacttggcgnccgntctaagtnggatnccangctcggtaccaacttggcgtaatcatgncataacnngggnnttcgnnnnnnnnnnnnnnnnnnnnnnnnnnnnnnnnnnnnnnnnnnnnnnnnnnnnc

SEQ ID NO: 9643 - DNA, 813 bp, Homo sapiens
  misc_feature 18, 727, 728, 729, 730, 734, 736, 737, 738, 739, 740, 741,742, 743, 744, 745, 746, 747, 748, 749, 750, 753, 754, 755,756, 757, 758, 759, 760, 761, 762, 763, 764, 765, 766, 767,768, 769, 770, 771, 772, 773, 774, 775, 776, 777, 778: n = A,T,C or G
  misc_feature 779, 780, 781, 782, 783, 784, 785, 786, 787, 788, 789, 790,791, 792, 793, 794, 795, 796, 797, 798, 799, 800, 801, 802,803, 804, 805, 806, 807, 808, 809, 810, 811, 812: n = A,T,C or G
actactatagggcgaatngggccctctagatgcatgctcgagcggccgccagtgtgatggatatctgcagaattcgcccttagcgtggtcgcggccgaggtacgcgggggtagtttgtagcggacaacatggcggccttcatgctgggctcgctgctgcggacgttcaagcagatggttccttcatcagcttcaggccaagttcgaagtcactatgtagactggagaatgtggcgcgatgtgaagagacgaaaaatggcctatgaatacgcagatgagaggctacgtattaattcactcaggaagaataccattttgccaaaaattcttcaggatgtggctgatgaagaaattgctgccctcccccgggatagctgtcctgttagaatcagaaatcggtgtgttatgacgtcccgtccgcgtggtgtgaagcggcgctggaggcttagtcgtatagtcttccgtcacttagctgaccatgggcaactttctgggatccagcgagcgacatggtaaatgagctccagaacctattgagcttgcagggaagccaagcttgcagttccagcaagcaaagattttttttaatagaccaaaccctaatctctacaggggcccagtacctgcccgggcggcccgtcgaaagggcgaattccagccactgggcggccgttactagtggatccgagctcggtaccaagcttggcgtaaatcatggtcatagctgnnnnttcngnnnnnnnnnnnnnnnaannnnnnnnnnnnnnnnnnnnnnnnnnnnnnnnnnnnnnnnnnnnnnnnnnnnnnnnnnnnc

SEQ ID NO: 9644 - DNA, 850 bp, Homo sapiens
  misc_feature 490, 494, 495, 517, 593, 615, 627, 634, 658, 662, 682, 684,689, 691, 692, 695, 702, 704, 713, 714, 725, 726, 730, 732,735, 738, 753, 784, 800, 805, 815, 816, 836: n = A,T,C or G
ggcgaattgggccctctagatgcatgctcgagcggccgccagtgtgatggatatctgcagaattcggcttcgagcggccgcccggggcaggtactgtggcccagctgtggaataagccattggtgggtgtgaaccactgtataggccacattgagatgggccgcctcatcactggagccaccagcccaaccgtgttgtatgtgagtggaggaaatacgcaggtgattgcatactcggaacatcgttaccgtatctttggggaaaccatcgatattgcagtgggtaattgtctggatcgttttgctcgagtgctgaagatttctaacgacccaagtccaggatacaacattgaacagatggcaaagcgaggcaagaagctggttgagctgccatacactgtaaaggggatggacgtctcattctcagggatcctgtctttcattgaggatgtagcccatcggatgctggccacaggcgagtgtacctcggnccgnnaccacgctaagccgaattccancacactggcggccgttactagtggatccgagctcggttccaaagctttggcgtaatcattggtccatagctgtttncttgtgtgaaaattgtatccgnttacaattccanacaacantacttttcccggaaagcattaaanttgntaaaagcccggggggtggcntntttangnnaancttttananaatttttanncaagggttttnnaatngnttnccncgtttttttaaaccnggaaatttccaaagcccaggggggccctaanttccaaaacttttttntttgntttttttccnnaccaagattttttttttttnaaaacaataaaaat

SEQ ID NO: 9645 - DNA, 493 bp, Homo sapiens
  misc_feature 2, 3, 4, 5, 6, 7, 8, 9, 10, 11, 27, 32, 34: n = A,T,C or G
gnnnnnnnnnnggatacaactgctatntggcnantggggccctctagatgcatgctcgagcggccgccagtgtgatggatatctgcagaattcgcccttagcgtggtcgcggccgaggtacatgttaaggtttggtgaatgcatgcattcacggaactaccactccagttgtgttagtttcccatggcagctttaacaaattactgcaaatttcatggcttaaacgaacacacatttatgcttacacagttctggcagctaaatgaccaatgggtttcattgggacaaaatcaaggtgatggcagagccctgcttcttttgggggctctagagtccatctgcttccttcccttctccagcatctggaggtcacctcatttattggcttgggtccctgaactgcatcaccttttctttcttgtgtccattgttttctcatcttcctcctcatctgtctgcaaatctccctctgcctccctttcataaagacaca

SEQ ID NO: 9646 - DNA, 496 bp, Homo sapiens
ctatagggcgaattgggccctctagatgcatgctcgagcggccgccagtgtgatggatatctgcagaattcgcccttcgagcggccgcccgggcaggtacccaggtggaaagaatgatgagatggttgacactgccaaaccttgagtgatggtgatgttcacagtctctgaagacacatttttactcccaaaaagccccctgcagaagtaggagccgctgtctttgagtgtggcttttggaatgtagaagtcagaattatgatgaaaatacttcctgcctttgccattctgtaaatatgtgaccttatgcagagcagtgttcttccagctgtgacacctcaggtgaatagggtcttcctccttgaacacccaccgaggggcctggagcaacagccagccgatatggacttctagctgcaccgggtcactgagggtggagaggtttgtctggcacctgtacctcggccgcgaccacgctaagggcgaattcagcact

SEQ ID NO: 9647 - DNA, 832 bp, Homo sapiens
  misc_feature 2, 3, 4, 5, 7, 8, 346, 479, 537, 594, 615, 630, 643, 659,702, 716, 722, 727, 733, 738, 744, 754, 755, 761, 775, 799,805, 818, 824, 830, 831: n = A,T,C or G
gnnnngnncgcgcgtaatacgactactataggggcgaattggagctccccgcggtggcggcccgcccgggcaggtaccggttggaaggcactccctggtgtaatctgagatactgcacagacccatccactgtggaggacaagtgtgagaaggcctgccgccccgaggaggagtgccttgccctcaacagcacctggggctgtttctgcagacaggacctcaatagttctgatgtccacagtttgcagcctcagctagactgtgggcccagggagatcaaggtgaaggtggacaaatgtttgctgggaggcctgggtttgggggaggaggtcattgcctacctgcnagacccaaactgcagcagcatcttgcagacagaggagaggaactgggtatctgtgaccagccccgtccaggctagtgcctgcaggaacattctggagagaaatcaaacccatgccatctacaaaaacaccctntccttggtcaatgatttcatcatcagagacaccatcctcaacatcaacttccaatgtncctacccactggacatgaaagtcagccttcaagcttgccttgcagcccatttgtaanttccctgaaacgtcaagtgtngaccgggaatggaanagttcattgtcanggatggccctctttcnagaccagaacttccaccgaattccttaccaaagggggatccantttgaacttttttnttgaantccgngctttnttgtngggtgnccatctttgnnaacaanggggacaccttccngttttaaacctggttgttgaaggnacctgntttgcccccccanttaaanaaaagnnt

SEQ ID NO: 9648 - DNA, 506 bp, Homo sapiens
  misc_feature 2, 3, 4, 5, 6, 9, 11, 16, 28, 504: n = A,T,C or G
gnnnnnggnanaactnctttggcgaatngggccctctagatgcatgctcgagcggccgccagtgtgatggatatctgcagaattcgccctttcgagcggccgcccgggcaggtactaccggacctgtttcatctctgcttcccaagcctcaggcctgggcctcagggattctctccagtgcataccttaggctacagctatagggcagctgtggttagggaaggtccctatttagaatagttggtcaaaaagcacatcacttctgtccctttcttgcagaactggttgctgctctggaatgaaagtttgattggtctgttagccatgcccacctggatttgggaaagccaatagaaagaatcttctgctctcctatctgctgttgctttttaacctgtagcctaaaaaatggcattatactgaacaaatacggtatgaacagaccttatacaatgctggaactggcgccggataagctcatgagtccatgctgtgctacataanga

SEQ ID NO: 9649 - DNA, 617 bp, Homo sapiens
  misc_feature 82, 614: n = A,T,C or G
ccacgcgtccgccaaataaaaattgaaaaataaaaaccataaacatttgcaccacttgtggcttttgaatatcttccacagnagggaagtttaaaacccaaacttccaaaggtttaaactacctcaaaacactttcccatgagtgtgatccacattgttaggtgctgacctagacagagatgaactgaggtccttgttttgttttgttcataatacaaaggtgctaattaatagtatttcagatacttgaagaatgttgatggtgctagaagaatttgagaagaaatactcctgtattgagttgtatcgtgtggtgtattttttaaaaaatttgatttagcattcatattttccatcttattcccaattaaaagtatgcagattatttgcccaaagttgtcctcttcttcagattcagcatttgttctttgccagtctcattttcatcttcttccatggttccacagaagctttgtttcttgggcaagcagaaaaattaaattgtacctattttgtatatgtgagatgtttaaataaattgtgaaaaaaattaaataaagcatgtttggttttccaaaaaaaaaaaaaaaaaaaaaaaaaagggcggccgctanact

SEQ ID NO: 9650 - DNA, 411 bp, Homo sapiens
gattgaatacgactcactatagggcgaattgggccctctagatgcatgctcgagcggccgccagtgtgatggatatctgcagaattcgccctttcgagcggccgcccgggcaggtacattgtcagttgcttccctcggttcacctgcagtcggcggtccaccaggttctgaactttttccagtccagcagtggtgaaaagcgtgtccagttcctcttgtgtgaagaagtaaactctggttccatcacctctcacatagaaatttccagatagacactgaccttttttaaaccgaagctgagccatgtcatagcggccgtaatctcgcagaagtacctcggccgcgaccacgctaagggcgaattccagcacactggcggccgttactagtggatccgagctcggtaccaag

SEQ ID NO: 9651 - DNA, 759 bp, Homo sapiens
  misc_feature 3, 21, 263, 413, 414, 415, 416, 417, 418, 421, 422, 423,424, 427, 428, 430, 434, 437, 439, 443, 447, 448, 449, 450,451, 452, 453, 454, 456, 459, 460, 461, 463, 464, 465, 466,467, 468, 469, 470, 471, 472, 473, 474, 475, 476, 477: n = A,T,C or G
  misc_feature 479, 480, 481, 483, 484, 485, 486, 487, 488, 489, 490, 492,493, 494, 495, 496, 497, 498, 499, 500, 501, 502, 503, 504,505, 506, 508, 509, 510, 511, 512, 513, 514, 515, 516, 517,518, 519, 520, 521, 522, 523, 524, 525, 526, 527, 528: n = A,T,C or G
  misc_feature 529, 530, 531, 532, 533, 534, 535, 536, 537, 538, 539, 540,541, 542, 543, 544, 545, 546, 547, 548, 549, 550, 551, 552,553, 554, 555, 556, 557, 558, 559, 560, 561, 562, 563, 564,565, 566, 567, 568, 569, 570, 571, 572, 573, 574, 575: n = A,T,C or G
  misc_feature 576, 577, 578, 579, 580, 581, 582, 583, 584, 585, 586, 587,588, 589, 590, 591, 592, 593, 594, 595, 596, 597, 598, 599,600, 601, 602, 603, 604, 605, 606, 607, 608, 609, 610, 611,612, 613, 614, 615, 616, 617, 618, 619, 620, 621, 622: n = A,T,C or G
  misc_feature 623, 624, 625, 626, 627, 628, 629, 630, 631, 632, 633, 634,635, 636, 637, 638, 639, 640, 641, 642, 643, 644, 645, 646,647, 648, 649, 650, 651, 652, 653, 654, 655, 656, 657, 658,659, 660, 661, 662, 663, 664, 665, 666, 667, 668, 669: n = A,T,C or G
  misc_feature 670, 671, 672, 673, 674, 675, 676, 677, 678, 679, 680, 681,682, 683, 684, 685, 686, 687, 688, 689, 690, 691, 692, 693,694, 695, 696, 697, 698, 699, 700, 701, 702, 703, 704, 705,706, 707, 708, 709, 710, 711, 712, 713, 714, 715, 716-758: n = A,T,C or G
acnactactatagggcgaatngggccctctagatgcatgctcgagcggccgccagtgtgatggatatctgcagaattcgcccttagcgtggtcgcggccgaggtacatgggtctgagtgcgtatttattttgtgagccaaggtttatgccttcttctataattttctttcaccgaaaattacctggagagctagaaactccatttttgtcagtgtaagaagctttagaatctatatccagaccaaggccatggaacaatgtanattcactcagtaaaaactcactagcggccttctttgtacctgcccgggcggccgctcgaaagggcgaattccagcacactggcggccgttactagtggatccgagctcggtaccaagcttggcgtaatcatggtcatagctgtttcctgnnnnnnctnnnncgnnancacnctnanggcnaatnnnnnnnnantgnnngnnnnnnnnnnnnnnncnnncnnnnnnnnannnnnnnnnnnnnnngnnnnnnnnnnnnnnnnnnnnnnnnnnnnnnnnnnnnnnnnnnnnnnnnnnnnnnnnnnnnnnnnnnnnnnnnnnnnnnnnnnnnnnnnnnnnnnnnnnnnnnnnnnnnnnnnnnnnnnnnnnnnnnnnnnnnnnnnnnnnnnnnnnnnnnnnnnnnnnnnnnnnnnnnnnnnnnnnnnnnnnnnnnnnnnnnnnnnnnnnnnnnnnnnnnnnnnnnnnnnnnnnnnnnnnnnnnnnnnnnnnnnnnnnnnnc

SEQ ID NO: 9652 - DNA, 552 bp, Homo sapiens
  misc_feature 15, 18, 248, 306, 329, 333, 348, 357, 403, 423, 431, 432,433, 434, 435, 440, 450, 455, 458, 460, 461, 464, 467, 487,489, 490, 500, 502, 505, 507, 509, 514, 526, 539, 547: n = A,T,C or G
cctggggcagaggcncanggacagactaggagggagccgggaggatgggcgtgcagctgtggaggagggtttcagaggagagaggtcggagagcagaggcctgagaagccagaggcaggtggagagagggtggaaaagtgagcagcgggctgggctggagccgcacacgctctcctcccatgttaaatagcacctttagaaaaattcacaagtccccatccacaaaaaaaaaaaaagaaaaatatcanggaataaaaatagactttgaacaaaaaggaacattttgctggcctgggggggcatctnaatttctatagcaccagtgattncctncccaccccacccatnacatagatntagcaccttttggtaccttcccccgggcggcccgttctatgaactnatttgatccccccgggctgnaaggattnnnnnttcangcttattcgntcccntcncnntcntangggggggcccccggttcccnannttttgtttcncnttnantnagggntaaattgccccncttgggagaattnatgggcantagct

SEQ ID NO: 9653 - DNA, 391 bp, Homo sapiens
  misc_feature 2, 12, 62, 144, 177, 208, 210, 238, 244, 245, 266: n = A,T,C or G
tnctatagggcnaattggagctccccgcggtggcggccgaggtacttgcgcttactttgtanccttcatcagggtttgctgaagatggcgggtatataggctgagcaagaggtggtgaggttgatcggggtttatcgattacanaacaggctcctctagaggggtatgaagcaccgncaggtcctttgagttttaagctgtggctcgnantgttctggccgagcagttttgttgattnaactgnngaggtttagggctaagcatantggggtatctaatcccagtttgggtcttagctattgtgtgttcagatatgttatagccactttcatagtctattttgcgtcaactgcccgcgtacctgcccaggcggccgctctagaactagtgg

SEQ ID NO: 9654 - DNA, 804 bp, Homo sapiens
  misc_feature 1, 2, 3, 4, 7, 8, 9, 10, 11, 12, 13, 14, 15, 16, 17, 18,19, 21, 39, 602, 683, 685, 686, 687, 688, 689, 690, 696,697, 698, 699, 700, 701, 702, 703, 704, 705, 706, 707, 708,709, 710, 711, 712, 713, 714, 715, 716, 717, 718, 719, 720: n = A,T,C or G
  misc_feature 721, 722, 723, 724, 725, 726, 727, 728, 729, 730, 731, 732,733, 734, 735, 736, 737, 738, 739, 740, 741, 742, 743, 744,745, 746, 747, 748, 749, 750, 751, 752, 753, 754, 755, 756,757, 758, 759, 760, 761, 762, 763, 764, 765, 766, 767: n = A,T,C or G
  misc_feature 768, 769, 770, 771, 772, 773, 774, 775, 776, 777, 778, 779,780, 781, 782, 783, 784, 785, 786, 787, 788, 789, 790, 791,792, 793, 794, 795, 796, 797, 798, 799, 800, 801, 802, 803,804: n = A,T,C or G
nnnnagnnnnnnnnnnnnngnagtactatagggcgaatngggccctctagatgcatgctcgagcggccgccagtgtgatggatatctgcagaattcgccctttcgagcggccgcccgggcaggtacagcccacggaactgtgagccaattcaatcccttttctttttcaattacccactctcatgtatatctttatagcagtgtgagaacagattaatacactcctcctcagaaagcattcaatttagctgtgtctaaagtatgccaggtgtcctagggtgttatcttagccaataattcttcctcttcagcaagatctatttgcctatgacagcttgacctacagttcctaccatacttgtcagtaacaagtagcccataacatctgaagggacttcattgaaatcacagaggttctttagttctttacctcattagtaggcattagggaagcacatcaactttctaatttaataaggtgcctgttgctttgaaaaactgctcaaaaaaagataggagaggcttacttaaagatatcactataggcgtggcatgctgcttcacgcctgtaatcctagtacctcggccgcgaccacgcttanggcgaattccagcacactgggcggccgtactagtggatccgagctcggtacccagctttggcgtaatcatggtcataagcngnnnnnntcgggnnnnnnnnnnnnnnnnnnnnnnnnnnnnnnnnnnnnnnnnnnnnnnnnnnnnnnnnnnnnnnnnnnnnnnnnnnnnnnnnnnnnnnnnnnnnnnnnnnnnnnnnnnnnn

SEQ ID NO: 9655 - DNA, 635 bp, Homo sapiens
  misc_feature 5, 8, 23, 30, 36, 38, 390, 391, 395, 396, 401, 402, 409,410, 413, 426, 427, 428, 439, 440, 444, 447, 448, 449, 453,455, 456, 458, 463, 464, 469, 486, 501, 504, 505, 513, 514,526, 538, 541, 545, 547, 550, 555, 558, 559, 560, 561: n = A,T,C or G
  misc_feature 562, 563, 564, 565, 566, 567, 568, 569, 570, 571, 572, 573,574, 575, 576, 577, 578, 579, 580, 581, 582, 583, 584, 585,586, 587, 588, 589, 590, 591, 592, 593, 594, 595, 596, 597,598, 599, 600, 601, 602, 603, 604, 605, 606, 607, 608: n = A,T,C or G
  misc_feature 609, 610, 611, 612, 613, 614, 615, 616, 617, 618, 619, 620,621, 622, 623, 624, 625, 626, 627, 628, 629, 630, 631, 632,633, 634: n = A,T,C or G
gcgtnctncgtacttcactctgngggcctnattggnanctccaccgcggtggcggccgcccgggcaggtacgcgggaggcattgaggcagccagcgcaggggcttctgctgagggggcaggcggagcttgaggaaaccgcagataagttttttttctctttgaaagatagagattaatacaactacttaaaaaatatagtcaataggttactaagatattgcttagcgttaagtttttaacgtaattttaatagcttaagattttaagagaaaatatgaagacttagaagagtagcatgaggaaggaaaagataaaaggtttctaaaacatgacggaggttgagatgaagcttcttcatggagtaaaaaaaaaaaaaaaaaaaaaaaagnncccnngcccnnttaaaanntgnggttcccccgggnnngggggattttnnattnaannntttntnntncccgnnccccnggggggggggcccgggnccccatttttttccnttnntggggggnnaatttccccccnttggggaaaaanggncatntnttnccccnggnnnnnnnnnnnnnnnnnnnnnnnnnnnnnnnnnnnnnnnnnnnnnnnnnnnnnnnnnnnnnnnnnnnnnnnnnnnnnc

SEQ ID NO: 9656 - DNA, 819 bp, Homo sapiens
  misc_feature 7, 604, 677, 710, 722, 736, 739, 764, 782, 784, 801, 819: n = A,T,C or G
tatgtgnatcactactatagggcgaattgggccctctagatgcatgctcgagcggcccgccagtgtgatggatatctgcagaattcgccctttcgagcggccgcccgggcaggtaccaaggaatgattgagattgtggaggagggcgatatgaaaggtgaggtctatccatttggcatcgttgggatggccaacaaaggggattgcctgcagaaaggggagagcgtcaagttccaattgtgtgtcctgggccaaaatgcacaaactatggcttacaacatcacacccctgcgcagggccacagtggaatgtgtgaaagatcagtttggcttcattaactatgaagtaggagatagcaagaagctctttttccatgtgaaagaagttcaggatggcattgagctacaggcaggagatgaggtggagttctcagtgattcttaatcagcgcactggcaagtgcagcgcctgtaatgtttggcgagtctgtgagggccccaaggcttgttgcagctcctcgacctgatcggttggtcaatcgcttgaaagaatatcactctggatgatgccagtgctcctcgcctaatgggttcttcgtcagccaangggaccaaatactcaatggggtttggtgcaaaaaaaaagatccgtcaagctggtgtcattgactaaccacttncacaaagcacaccattaatccactttgatcaanttggggggaatnttggtgaaagggtnttnaatttttccctctttattccttccnaaactggaatacttattntnttgagctttaacaccantttaacacctttcttttn

SEQ ID NO: 9657 - DNA, 645 bp, Homo sapiens
  misc_feature 2, 3, 4, 5, 9, 13, 638: n = A,T,C or G
gnnnnagtnagcnccaccgtccggtggaagtgacatcgtctttaaaccctgcgtggcaatccctgacgcaccgccgtgatgcccagggaagacagggcgacctggaagtccaactacttccttaagatcatccaactattggatgattatccgaaatgtttcattgtgggagcagacaatgtgggctccaagcagatgcagcagatccgcatgtcccttcgcgggaaggctgtggtgctgatgggcaagaacaccatgatgcgcaaggccatccgagggcacctggaaaacaacccagctctggagaaactgctgcctcatatccgggggaatgtgggctttgtgttcaccaaggaggacctcactgagatcagggacatgttgctggccaataaggtgccagctgctgcccgtgctggtgccattgccccatgtgaagtcactgtgccagcccagaacactggtctcgggcccgagaagacctcctttttccaggctttaggtatcaccactaaaatctccaggggcaccattgaaatcctgagtgatgtgcagctgatcaagactggagacaaagtgggagccagcgaaaccacctgctgaacatgctcaacatcttccccttctctttgggctgncatccac

SEQ ID NO: 9658 - DNA, 620 bp, Homo sapiens
  misc_feature 2, 4, 20, 26, 27, 33, 35, 93, 456, 503, 524, 563, 571, 579,594, 603: n = A,T,C or G
cntnctggtactcactctgngggccnnattggnanctccaccgcggtggcggccgagtacaatgacagtaacagccgcgtggtgctgccaggnactgcccttgggcatatcagtgacagcccaaatgtgggtggaggaaacctgtaatttccttcttaacatgtgtttgaaataccaagtgaataatactgttctggaaaaaaatgataaactagtggaaattaaagaaattaagggttttatataatagacaggccccacctctcaaaatatttttagaagtctttttgtaaactaatttcttttgatcactattttgcatcagtaaaatgatttttttaaaaccaataaatcatcaattattagaaatagttgtctcacagtgatactggtttttcttttgtgctgttatgatttaacattgacaggaacactattttaaatccttacgttcangtgtttgtaacttggccttataattaggctgaattattggcttcaanggctaccaatttatgtgtatngttcacagcctaacttctatttaccttttgaaaatacanatttttanccactttnggattcttttttaantatatggtnggcctttcctttttaac

SEQ ID NO: 9659 - DNA, 655 bp, Homo sapiens
  misc_feature 497, 499, 500, 501, 502, 503, 504, 505, 506, 507, 508, 509,510, 511, 512, 513, 514, 515, 516, 517, 518, 519, 520, 521,522, 523, 524, 525, 526, 527, 528, 529, 530, 531, 532, 533,534, 535, 536, 537, 538, 542, 570, 586, 621, 625, 629: n = A,T,C or G
  misc_feature 631, 633, 637, 644, 654: n = A,T,C or G
gcgcaattaaccctcactaagggaacaaagctgggtaccgggccccccctcgggtcgacggtatcgataagcttgatatcgaattcctgcagcccgggggatccactagttctagagcggccgaggtacagtggccccccgtgaaagacaggattgtggttttcctggtgtcacgccctcccagtgtgcaaataagggctgctgtttcgacgacaccgttcgtggggtcccctggtgcttctatcctaataccatcgacgtccctccagaagaggagtgtgaattttagacacttctgcagggatctgcctgcatcctgacgcggtgccgtccccagcacggtgattagtcccagagctcggctgccacctccaccggacacctcagacacgcttctgcagctgtgcctcggctcacaacacagattgactgctctgactttgactactcaaaattggcctaaaaattaaaagagatcgatattagaaaaaaaaaanannnnnnnnnnnnnnnnnnnnnnnnnnnnnnnnnnnnnnnntttnaaaaaaaaaaaaaaaaaaaaaaaaagtncctgcccgggcggccncccccgggggggagctcaattccccctataggggncgtntacncncnctcntggccgnggtttaaaang

SEQ ID NO: 9660 - DNA, 493 bp, Homo sapiens
  misc_feature 2, 3, 339, 340, 341, 402, 415, 423, 450: n = A,T,C or G
gnnagatcactacttagggcgaattgggccctctagatgcatgctcgagcggccgccagtgtgatggatatctgcagaattcgcccttagcgtggtcgcggccgaggtacgcgggctgaactgacaattaacagcccaatatctacaatcaaccaacaagtcattattaccctcactgtcaacccaacacaggcatgctcataaggaaaggttaaaaaaaggtaaaaggaactcggcaaatcttaccccgcctgtttaccaaaaacatcacctctagcatcaccagtattagaggcaccgcctgcccagtgacacatgtttaacggccgcggtactttnnntttttttttttttttttgagtcaaatcaataggtctttatttcatatctgtaatggtttanctctgcgggaagngttagcanctttttgaattaggaagaatttagaanacaatccctaaacacatgaaatgtccaagtaagaagataacat

SEQ ID NO: 9661 - DNA, 855 bp, Homo sapiens
  misc_feature 1, 6, 657, 659, 683, 702, 711, 726, 739: n = A,T,C or G
nagtgnatacgactactatagggcgaattgggccctctagatgcatgctcgagcggccgccagtgtgatggatatctgcagaattcgcccttagcgtggtcgcggccgaggtacagtggtccttttcagagttggacttctagactcacctgttctcactccctgttttaattcaacccagccatgcaatgccaaataatagaattgctccctaccagctgaacagggaggagtctgtgcagtttctgacacttgttgttgaacatggctaaatacaatgggtatcgctgagactaagttgtagaaattaacaaatgtgctgcttggttaaaatggctacactcatctgactcattctttattctattttagttggtttgtatcttgcctaaggtgcgtagtccaactcttggtattaccctcctaatagtcatactagtagtcatactccctggtgcagtgtattctctaaaagctttaaatgtctgcatgcagccagccatcaaatagtgaatggtctctctttggctggaattacaaaactcagagaaatgtgtcatcaggagaacatcataacccatgaaggataaaagccccaaatggtggtaactgataatagcgctaatgctttaaagaatttggtccactctcacctangngagcgcattgagccagtggtgctnaaagctacatctccactgnaatggttanggagaagatgatccnattaaaaaaattnaaaccaatttaaaaaaaagacccaggagattccagctacttgagtaagaataaacagaatccctttatttaactttacaaaaaagtaacctgactaatttgaggtacccatgtttt

SEQ ID NO: 9662 - DNA, 642 bp, Homo sapiens
  misc_feature 91, 381, 615, 616, 637: n = A,T,C or G
cgtatacgactcactatagggcgaattggagctccaccgcggtggcggccgcccgggcaggtacttttttttttttttttttttttttcgnccaataggagtatactctttaatagaactgtatttgaataagaattccatacaaatagaatatataccttaacacaagaaagcaagaaaagaatattttacattacatagaacattcaggtgattcgatcaaattatccctccaactaaatacttattttccctatttactacaaatattgcagtcagtcagtatatgccaataatcatatagttttaacatctagtagtgtgaagtacaccacaatggctgagcacttcctgacgttgctggtagtgcctgccatcaanaaagattatggttcccaggaagacttcactcaagtgtggaacaccaccatgaaagggctcaagtgctgtggcttcaccaactatacggattttgaggactcaccctacttcaaagagaacagtgcctttcccccattctgttgcaatgacaacgtcaccaacacagccaatgaaacctgcaccaagcaaaaggctcacgaccaaaaagtagagggttgcttaatcagcttttgnntgacatccgaactaatgcagncaccg

SEQ ID NO: 9663 - DNA, 666 bp, Homo sapiens
  misc_feature 3, 6, 562, 585, 650, 664: n = A,T,C or G
ggntgncttttactcagggcgaattggagctccccgcggtggcggccgaggtacgcgggggcagaagaggaagatttctgaagagtgcagctgcctgaaccgagccctgccgaacagctgagaattgcactgcaaccatgagtgagaacaataagaattccttggagagcagcctacggcaactaaaatgccatttcacctggaacttgatggagggagaaaactccttggatgattttgaagacaaagtattttaccggactgagtttcagaatcgtgaattcaaagccacaatgtgcaacctactggcctatctaaagcacctcaaagggcaaaacgaggcagccctggaatgcttacgtaaagctgaagagttaatccagcaagagcatgctgaccaggcagaaatcaagaagtctggtcacctggggaaactatgcctgggtctactatcacatgggccgactctcagacgttcagatttatgtagacaaggtgaaacatgtctgtgagaaagttttccagtccctatagaattgagagtccagagcttgactgtgangaaggggtggacaccggtaaggngtggaggaaaccaaaatgaaagaaccgaggtgtgctttgagaagctctggaaaagaaccaagaanccagaattcacctntg

SEQ ID NO: 9664 - DNA, 629 bp, Homo sapiens
  misc_feature 4: n = A,T,C or G
actnctatagggcgaattggagctccccgcggtggcggccgaggtacccttgtcctcttcttcagtgacttaaaacaattccaggatcagaagagaagccaacgtgacatcctcgataaaactggggataagctgaagttctgtctgttcacgaagtggttgaaaaacaatttcgagatccagaagtcccttgatgggttcaccatccaggtgttcacaaaaaatcagagaatctctttcgaggtgctggccgccttcaacgctctgagtaagcattgctgggtgtcaggagagaaaagccaaagaagcgggtgccagacagctctgtgcaacctctaggccatgagtgggatagataccactgctgctttaaaaaatgggagaccatagaccctcaggagaaaagaatcccttctaccctggactcgctctcttctctggaactaacttctcccccataccctgattgtctttggagaaaatgttctggattctagaatctaaggcagagccttttaagccatactgtacctgcccgggcggccgctctagaactagtggatcccccgggctgcaggaattcgatatcaagcttatcgataccgtcgacctcgagggggggcccggtc

SEQ ID NO: 9665 - DNA, 517 bp, Homo sapiens
  misc_feature 2, 6, 9, 12, 456, 460, 461, 471, 472, 473: n = A,T,C or G
gntacngcnccncgcgtccgcttggctcctgtggaggcctgctgggaacgggacttctaaaaggaactatgtctggaaggctgtggtccaaggccatttttgctggctataagcggggtctccggaaccaaagggagcacacagctcttcttaaaattgaagggtgtttacgcccgagatgaaacagaattctatttgggcaagagatgcgcttatgtatataaagcaaagaacaacacagtcactcctggcggcaaaccaaacaaaaccagagtcatctggggaaaaagtaactcgggcccatggaaacagtggcatgggttcgtgccaaattccgaagcaatcttcctgctaaggccattggacacagaatcccgagtgattgcttgtacccctcaagggatttaaactaacgaaaaatcaataattaaatgtgggatttgtaaaaaaaaaaanaaannaaaaaaaaannngggggcggccgctgacctagtctagagaaaaaacctcccacacc

SEQ ID NO: 9666 - DNA, 574 bp, Homo sapiens
  misc_feature 29: n = A,T,C or G
gccagcgcgcattaaccctcactaagggnaacaaagctgggtaccgggccccccctcgaggtcgacggtatcgataagcttgatatcgaattcctgcagcccgggggatccactagttctagagcggccgaggtacgcgggggagatctgtgtcagaacgtgcgtgtgagcggatacaaaacccgagagaggcgtgagcagcgctgtgtttgcgagcgggagcgaggggcgccggctggggtgtgtgctcctgagctcttcagaaaccaggctgctttcaggaacattgctgtggattcccagctttcagacaacacatgactaagacagaatgagaccactctagttgcctcatgggaaactcgggaaaagactgcaaaaacaacattgtttctccctttggaattctggagttataaggcagaggtcccccatcttcccgaactggcctattccactagaagcaagatggctgaactcaatactcatgtgaatgtcaaggaaaagatctatgcagttagatcagttgttcccaacaaaagcaataatgaaatagtcctggtgctccaacagt

SEQ ID NO: 9667 - DNA, 495 bp, Homo sapiens
  misc_feature 4, 15, 477, 478, 479, 480, 481, 482, 483, 484, 485, 486,488, 489, 490, 491, 492, 493, 494: n = A,T,C or G
tacnactactatatnggcgaattgggccctctagatgcatgctcgagcggccgccagtgtgatggatatctgcagaattcgccctttcgagcggccgcccgggcaggtactgcaccacattctccagctatactgcccaggaatcactctacctcccccatccctgttgctgctgcacctcaacctgctacttgaaaccacaggcccagcaaagaaactgtgctccaagtgcccaaaccaattcagttccctgttccgcaggaatcagagcttcagcatagggaagcagccatgaccccagcatcgaagcccatgctgtgccttgcccttaggagaccaggtgctctcatctagtggaaaagctgtacctcggccgcgaccacgctaagggcgaattccagcacactggcggccgttactagtggatccgagctcggtaccaagcttggcgtaatcatggcatagctgttctgggannnnnnnnnnannnnnnna

SEQ ID NO: 9668 - DNA, 582 bp, Homo sapiens
  misc_feature 2, 3, 4, 5, 6, 7, 13, 16, 19, 20, 533, 567: n = A,T,C or G
gnnnnnnaggggnagnttnnactcggtttcgaccacgcgtccgtgaagttggggacctattgcagctgaagtattcccgtcatcggttggtacctctactggacaggccctttgacgagacgacgtatgaagaaacagaagactgagcctttttggtgctccctcagaggaactctccctcacccaggacagcctgtggcctttgtgagccagttccaggaaccacacttctgtggccatctcacgtgaaagacattgcctcagctactgaaggtggccacctccactctaaatgacattttgtaaatagtaaaaaactgcttctaatccttcctttgctaaatctcacctttaaaaacgaaggtgactcactttgctttttcagtccattaaaaaaacattttattttgcaaccattctacttgtgaaatcacgctgaccctagcctgtctctggctaaccacacaggccattcccctctcccagcaccttgcagacttgggcccatcaagagctactgctggccctggctncgcagctggatacttacctggcccttcttcctanggagcaagtgccttc

SEQ ID NO: 9669 - DNA, 616 bp, Homo sapiens
  misc_feature 363, 368, 389, 392, 424, 430, 438, 443, 444, 458, 478, 479,489, 492, 494, 497, 501, 502, 507, 514, 516, 517, 519, 521,526, 528, 531, 532, 534, 535, 536, 555, 558, 560, 561, 562,563, 571, 572, 574, 575, 578, 579, 581, 582, 584, 585: n = A,T,C or G
  misc_feature 591, 595, 597, 600, 601, 602, 604, 605, 607, 612: n = A,T,C or G
cctctggatgcatgctcgagcggccgccagtgtgatggatatctgcagaattcgccctttcgagcggccgcccgggcaggtacttttttttttttttttttttttgctccaagaatgtatttatttacatgaaaacaccattttatacaaattgaagacacatcttaaaagaagggtttgtccaggcatgccttcctcatccccttatattgccacttccattttcatcttcttttgtatcataaatgaaacttcagactggttaaagaaaattgaatctgcctcttctccccacccaaaattacttcgattatttaatgtctgtagtcatccttcaaagaaaagtcttgcccggggttattntattnaatttatttatgtaatacagngtngaaagcgatcatgtcataagcaatgattgtgnacctanggccgcgnccacnnttaggggcgaattnccagcacactggcggcccannctagtggatnccnanctngggnnccaanctgggcntnngnantgggnantgnntnnnagctgagggaaatggtggngcntnnnncagtggcnncnntgnntnngnnccgtangctncnatnnnanncnctctngggg

SEQ ID NO: 9670 - DNA, 881 bp, Homo sapiens
  misc_feature 6, 7, 22, 25, 26, 27, 29, 30, 275, 379, 558, 559, 570, 589,607, 648, 654, 658, 660, 665, 708, 733, 745, 748, 752, 755,761, 775, 791, 808, 812, 813, 822, 852, 854, 857, 867, 868,869, 870, 874, 876, 877, 881: n = A,T,C or G
gccccnnttaattatttcattncannncnnttcctatagggcgaattgggtaccgggccccccctcgaggtcgacggtatcgataagcttgatatcgaattcctgcagcccgggggatccactagttctagagcggcggccgcccgggcaggtacagatgtgcaggaatgctaggtgtggttggttgatgccgattgtaactattatgagtcctagttgacttgaagtggagaaggctacgatttttttgatgtcattttgtgtaagggccgcanactgctgcgaacagagtggtgatagcgcctaagcatagtgttagagtttggattagtgggctattttctgctagggggtggaagcggatgaataaagaagattnctgctacaactatagtgcttgagtggagtagggctgagactggggtggggccttctatggctgaggggagtcaggggtgggagacctaattgggctgattttgcctgctgctgctaggaggaggcctagtagtggggtgaggctttggatttaaccgttttagaaaggctattttgttnntggggtcttcnatgaagtttgggagtgtanggaataaatcattgcttnaagggccgaaggattggaaaaccccgattatcccccggatnacccgntttntnttaanggatttgccttggaaatgggcttgcttgtggtttgggcaattnttgctttcggggccgtattcattcnacctggattgangcnaagnaangggatnttattttcctaccnccccttttaagcccantgaaacaagttgggaantaannttggtttangcgggtaaccttaaaaattaagttttggtnanttnaggaaaaatnnnnttgnanntttn

SEQ ID NO: 9671 - DNA, 757 bp, Homo sapiens
  misc_feature 577, 585, 586, 587, 588, 589, 590, 591, 592, 593, 595, 596,610, 633, 641, 650, 651, 654, 662, 679, 680, 686, 703, 706,707, 720, 728, 732, 734, 735, 736, 739, 745, 751, 752, 754,757: n = A,T,C or G
gtccgcttgatctccgtggctttggtttaaaagacacacttgtcccataggtttagagataagagttggctggtcaacttgagcatgttactgacagagggggtattggggttattttctggtaggaatagcatgtcactaaagcaggccttttgatattaaattttttaaaaagcaaaattatagaagtttagattttaatcaaatttgtagggtttctaggtaatttttacagaattgcttgtttgcttcaactgtctcctacctctgctcttggaggagatggggacagggctggagtcaaaacacttgtaattttgtatcttgatgtctttgttaagactgctgaagaattattttttttcttttataataaggaataaaccccacctttattccttcatttcatctaccattttctggttcttgtgttggctgtggcaggccagctgtggttttcttttgccatgacaacttctaattgccatgtacagtatgttcaaagtcaaataactcctcattgtaaacaaactgtgtaactgcccaaagcagcacttataaaatcagcctaaccttnggaaaaannnnnnnnncnnaaaaaggcgggccntccactcactatagggaatctanaatcaccnagccgggcnnttnactagtcnagaaaaaaaaaccttcnncccccntccccttgaaacccttnaannataaaaaaggaanggccaagnggcntnnnggntaaccncggaanncntgn

SEQ ID NO: 9672 - DNA, 497 bp, Homo sapiens
  misc_feature 2, 3, 4, 5, 17: n = A,T,C or G
gnnnnggtttcgactcnactactactatagggcgaattggagctccaccgcggtggcggccgaggtaccaatcttcatcaaagcttttgaacccaagtctcagattgcctttgatcagaagcctggtttgtcccccagtgcagaaatgtaggaactgtgtgagagaaagagaaagagggagagaaggagggaagaaagaggagagagagaaaaagaaaggggaggaggagcaggagagagaagcctgtctcgcctactatagaattttcttctctcctctcaaaacaagttccttacacatttggctgaccgcatggtacacgtggctggtgtcagggttctgtctgaactctgtgattgaggagaccaacctgcaggagccactttgaagatgcttactactgacagggcaggatcccatgaggcaggcatttcagggctaccttgtccttggaattcacatttcttggagccctggaaggggaccagctgttcag

SEQ ID NO: 9673 - DNA, 1179 bp, Homo sapiens
  misc_feature 1174, 1175, 1176, 1177, 1178, 1179: n = A,T,C or G
gagtcgacccacgcgtccggcgttggtctggccggagcccttgggtgaaattgttaggcgtggagagggagtgatgtcttccagactcggtgctgtacccgccacttcgggacccacaacctttaagcagcagaggagcacgaggatcgtgggagctaagaatagcaggacccagtgctccataaaggataatagtttccagtacactatccctcatgatgactccttaagtggttcatcgtctgcatcttcgtgtgaaccagtgagtgattttccagcatctttccgaaaatctacctactggatgaagatgagaagaatcaagccagctgctacttctcatgtcgaagggtcaggtggagtatcagccaaggggaaaaggaaacccaggcaggaagaagatgaagactatcgagaatttcctcagaagaagcataagctttatgggaggaagcaacggcctaaaactcagcccaatcccaaatcccaggcccgtcgtattcggaaggaaccaccagtttatgcagcaggcagtttggaggagcaatggtacttagaaatcgttgataaaggcagtgtctcctgccctacctgccaggcagtggggaggaagaccatagagggtttaaagaaacacatggaaaactgcaagcaggaaatgtttacttgtcatcattgtgggaaacaacttcgttcactggcagggatgaagtatcatgtcatggcaaatcataatagtttgcccattttgaaagccggagatgaaatagatgagccaagtgagagggaaaggctccgaacagttctaaagagactgggaaagctcaggtgcatgcgtgagagttgctccagtagcttcaccagcatcatgggatatctctaccatggtcagaaaactgtggcaaaggggctgcagagctggaaaagatgaccctgaaatgtcacactgtgggaaaaccatataggtcgaaggtgggattggatatcacctgaggtcagagcatgggctatatctttcttcaagagtcggaaagcagaagtgttaggagagaactagagtcaagagtggggcggttaagagtggcagaagtgttacactaaggtgtgttgggaaggagaggcaagaggtcgacggctgggacagaaataggggaatgagagtaatgaaagtaannnnnn

SEQ ID NO: 9674 - DNA, 2171 bp, Homo sapiens
  misc_feature 1826, 2030, 2170, 2171: n = A,T,C or G
gcactattggagcaagttcttgaatgccaaatgaaggcataaatcagtaagaggcataataaaaggctgagcagtgcttggctttttacgaactgatcctgataggagcagctgttcaacaaagttgccaggtcaccgttacatagtccctgccttctaggggctcactgcctactgggagagacagtctgaaagttggtggagcatgtaactgttggatgaggagtttgagcctgtggactgtgggacccccgaggagggtgtggctactctaggcagaacaatcccacagtttatttatatttaaccttgaaattcattagaggatttttcagcagaggtttggtacttgttaatgttaaggtttgcattctctagaacctcaaggaaagctgtaccgtgcataatgtaccctcttatgttaatgttgtgtactgtgatcctgtttcagggacttgcacttatgaatctgttacagtgagcacagaatcagacctgtgggctcatagtcttcaccctccacccatatatacaagatgaacagagtggaggttaaacaacttgactaaacaacattggcagctccacgcggtggcggccgaggtacctgcccatccactgccttttccatgtatcctggaactgagcatagacctcttcccaggcagagctgacagcaagtaaaggagatcataatcaggggaccaaacaactttgtctaaagtgtgaatgtcacctaaggagaagctgtgagatcagaagggtggggcagaggagcagacaccatgagggagagtccttgggggtacatctgccagactgacactgtctggcctgggcagtggaggggctagcaggaaccacaggtactggtggtgtggctactaccgttacaactgcctgtgcttggacatggaccctctgcaatatgcggcagtttcattcattgccccctacattctacaccaagtagaaatggaaggcaattggatacttcacagacaagatctaagtggagaaggaatgcgtcctgtggctgcagagatccttggagcttggaggggagagcttgagccccactgatgatgacctcccacagctcgccaactcagccctccctaagtccccatcgggggccaattctcactctggggttggggggactccaccatagctcatccatcatagggatgttggtatctactgtgggttgggtagggccgatgtgctgaggatggctcccccacaagcaagagatgtggatttggggagcttcccatcttgtgttgaaggaacataactcagaataataagagccaactataacaaacccacagccaacatcatactgaatgggcaaaagctgcaggcattccccttgaaaagtggcacaggataaggaagccctttctcaccacgtcctattcaatatagtgttgaaagtcctgatcacagcagtcaggcaacagaaataataaagggcatccaaataggaagagaggaagtcaaactatccttgtttgcagacagtatgattctatatctagaaaacccatagcctcagcccaaaaggtccttcatctgataatttcagcaaagtttcaggagacaaaatcagtgtacaaaaatcactaacattcctatacacagtcgccaagccaagagccaaatcaggagcacaatcccattcataattgcaaaaaaaagaattaaatagccagggaatgcgttaaccaaggaagtaaagggtcttctacatgagattcacaaagctggtcaaaggaatcggagatgacgcaacattggaaaattgtcaggtcacaggntagggagaatcttccatacgtgggcgatttacccaaggcatatagaatcaggatgccattaaggtcactacattttcccggaccgtcgaaaagttaagttctcttgggccccaaaggtgggagagcaaggggaccctcgacacggacacgcgggggggcaatactacaagcgacgaagggtgaccgacacacaaccgggcgggnggacagagcagccaagggcagatgagacaagacagaagcagacgcacggttacaagaacaaggggcggctatagaggagggcgcagcagccgcgcagactaagcacagcacacagcaccagaaaaaaacactcgcgagann

SEQ ID NO: 9675 - DNA, 549 bp, Homo sapiens
  misc_feature 1, 530, 531, 532, 533, 534, 535, 536, 537, 538, 539, 540,541, 542, 543, 544, 545, 546, 547, 548, 549: n = A,T,C or G
nctgatctttcacggtcaagccccgggggggacccatccctgcggtcaccttgaccgaaccctgtgaaagctactgaaatataggaaccagcacttactctgaaacacacaaactctggtgcctttgaggctggcctgcctgaatgcacacctgaactccggattcacagcaactagtcggatgatccacagtggaagaagccaaatgccatgctatgaggatactcaagcaacttcatggagatgtatgtatggagagaaactgaggcctcctgccaacagccagcactaacttggcaagcatgtttgagagccacctgggaagtggagccctcagccccagttaaaccttcagatgagactgcagtcctggccaccatttggactgcaacttcacaagagcttctaaaccaaagccatgcagatggattcttggcccccaaaaattgtgccactacatttttgggaaatttattatgcaaccatagattaccaatacacttactattttttttttttgatgccatacnnnnnnnnnnnnnnnnnnnn

SEQ ID NO: 9676 - DNA, 2165 bp, Homo sapiens
tttttttttttttttgcattgacatttttttatatttggtatttgtaagtctttaaaaaaatgttttcaggccattttttccttaaaaaaaaaaaaaagcaaccaacagcaatactctgtacaagtataacaaacattagaaatatgcatcattccaaaatagttacaggaaaattacagtttagagtccacatcaacacatcctatttgtatgtgcccccaagggagaaaaagctacagtatgttaaacacacagctgctacacagtagtctgaaaacccaggacttaaaacttttgaggcaaatcaacaacagtcaccaagacttgtttagctcaataagtacaatcaagcatttcaaaagagaaccaggctttttcatcccagatgaaaaacacacgtgatgggctgcatagctgacccccgcccctcgatccccaacccccgggagcctctgactcaacagagcacaaatccagtggagtcaattaggcggaagtctggctggaggtcacagtatggctgcagtgggcagacaccaaatgtcatttcctgctggtgctgatcatcactagatccaactttggaggcaaaaagtcgttgttcctgggagatgctatcaatggcccaaatcccccaaaccagctggccaccagtctttggccctttcattgacacccaaacccataccagctgcttttctgtatgcaattgtcaaagactgaacaggggcgctcacaccatccccccgattccactggactcttccaatttgagctcattgttcctgggaggggttgaagctcagaggcaccctcctcttgcctctgaccaacccccagcctgtgtgtcctttatatttacacattaatcttcccttttcaagcactgtgctataaatacccttaccacccccactggccctgtccccagcccttttcaggatgcagagaagcatcgtgaccttcgtgtgacctgcccatttggaatcccagaccgctcccccgcaagagttcctcccatgattgctggggccgcttgcccatttcccaagcccacaccaggcggaagggaagagggttcctgtgtttttcatttttatacgatatgtttacagttatgttgctttaatcttttaaagtatttaaccttttaaaggattttttagcaacaagtcccttcctctgacttctctgtggcagtgatgtgggcagagcagggcttaggagctccctgggatttgccacccatcacaatggtttcggacatattggaggggagagggccacagcccacagaactgctgcctgaacagggacctatgaatgaagtaccgaccgctccgagatctgtatgagttggaggcaggccagtgtgaaggtgtgggaggaatccgcccacacccagcttcatacagcaccctgaggacaatgtggcttccctgattcacacctactgagccaaggccccctctgaagttaggtcaagagggcccaccctagccgggccaactcattcctttgaggacctgatactcaatgaactgcttactaccaaaaaaatgcaaaggattcagcaaaaagtgcaatttccatttgagaagtaagattctccccaaaacatgacaccaccttttcatcctttcagtacctcggccgaggtggactaactgcaacggagagactcaagatgattccctttttacccatgttttctctactattgctgcttattgttaaccctataaacgccaacaatcattatgacaagatcttggctcatagtcgtatcaggggtcgggaccaaggcccaaatgtctgtgcccttcaacagattttgggcaccaaaaagaaatacttcagcacttgtaagaactggtataaaaagtccatctgtggacagaaaacgactgtgttatatgaatgttgccctggttatatgagaatggaaggaatgaaaggctgcccagcagttttgcccattgaccatgtttatggcactctgggcatcgtgggagccaccacaacgcagcgctattctgacgcctcaaaactgagggaggagatcgagggaaagggatccttcacttactttgcaccgagtaatgaggcttgggacaacttggattctgatatccgtagaggtttggagagcaacgtgaatgtt

SEQ ID NO: 9677 - DNA, 1035 bp, Homo sapiens
  misc_feature 1029, 1030, 1031, 1032, 1033, 1034, 1035: n = A,T,C or G
accttcactggagcacttggaaaacagaagaaatcaaagggcagtcaggactctcccagcaggcagggaccaggtcagagtcaggatgaagacaaagcaccctgagcaagaagcaatggaagagatgcttgtgacccgagctgatggggaaggttgagggcaacgcagagaccccactgccgacttgccaagaaaacgtgcaggaaatgagggaaggctccattttcctgagaaaagggatggaggaacataagcagcatcaagctccagctactggctctttgagaatgtagtcgggacttgccccagtcacccttgccctgagaactcagtgactggggctaatgtcaccctggctgtccttgacctgtgcagaaagcactgccaaccctggacagtgggggaagggccttatgtgcccaggccccagcaggagacacctaccaggaatctagtgggacaaggtttcagggatcctggaatcctgcccacacccaacagctggaacagttccctcagctggcgagtggacaggtggtctgatgagctcatatgttattgatgatgatgttaaagaccatgttcccatagaaataattcccaaagcattcagaagactgagaagaagtgatgataagaattgttctgggcaggagtgtgtagttttgatttttacttgtgataaagcagaggatttgcttgaattcactcaaacttgctttttctctctcttcaaaacaactttggctgaccagtgtctcatagacactcaatttgccttttcatggaactcaaaattttgtgtatccatacatgctaccatagtttcaggcactgggcatttcaaaaatgtgatatttagaacctttctatttccgtgatgactgttggcatagatgctgctggagatttcgatgacatgttggattcagtccacgcaagttttcatgcatattcccttaatttcatgagcctttagagttagagttttataattgagagtacctgggccgctctagaatagtggannnnnnn

SEQ ID NO: 9678 - DNA, 865 bp, Homo sapiens
  misc_feature 1, 2: n = A,T,C or G
nnagatgtcaccggcagcatagatatcaggaagggatgtgtgcatatgatcatccactttcaggccaccatcttctcctagatcaaaactgttaccatggagaaaaggttctacatttggtgtaactcctgtagcactgacaatgaaatcgcagccatatatcttttcattggtcaattccacatagacaggccacatctctgtatcagctgtaactgacttatggtctcttggaaaagtgaaggactttttcttcaaaattctaaactcatcctgaaggtagattttctttacttcacacatagtttcaaggtgaatcttatgagaaaactcttttgttcctttaagattcaagccttcatgccaatctggtcccaatgcacttcctacattatctgctttagatttgcttctagcttcctttttccttccttcagttgtatatctggttcttttatgtgcaattttagcctctgatttttcagcaatgagctttgaagtcaagaattcagctgctcctgcatcgaagaaagtattccctatagctttatctttaatggcccaaatcacttcacagccttcaatttcatacctaaaaacaatgttaaagttactaagagtgatttcaaaagtctaagtaaaaaatctttgcatttgcaaataatgatctcctgaagcaaaagtagggaatacatttttaaggctaactgggaaagattgattataaagaggaatattaacgttctttacagatattaagaattaaaaattgaatagtaaaagaatctgaagcagtttacagaaagaacctttaagtgacaaatacatgtacctcggccgccaccgcggggagctccaattcgcc

SEQ ID NO: 9679 - DNA, 1842 bp, Homo sapiens
  misc_feature 1, 2, 3, 4, 1427, 1841, 1842: n = A,T,C or G
nnnnaatacgactcactatatggaatttggccctcgaggccaagaattcggcacgagggcaaaaagcactaattagtttaaaatgtcacttttttggtttttattatacaaaaaccatgaagtactttttttatttgctaaatcagattgttcctttttagtgactcattgtttatgaagagagttgagtttaacaatcctagcttttaaaagaaactatttaatgtaaaatattctacatgtcattcagatattatgcgtggcttctagcctttattctgtacttttaatgtacatatttctgtcttgcgtgatttgtatatttcactggtttaaaaaacaaacatcgaaaggcttatgccaaatggaagatagaatataaaataaaacgttacttgtatattggtaagtggtttcaattgtccttcagataattcatgtggagatttttggagaaaccatgacggatagtttaggatgactacatgtcaaagtaataaaagagtggtgaattttaccaaaaccaagctatttggaagcttcaaaaggtttctatatgtaatggaacaaaaggggaattctcttttcctatatatgttccttacaaaaaaaaaaaaagaaatcaagcagatggcttaaagctggttataggattgctcacattcttttagcattatgcatgtaacttaattgttttagagcgtgttgctgttgtaacatcccagagaagaatgaaaaggcacatgcttttatccgtgaccagatttttagtccaaaaaaatgtatttttttgtgtgtttaccactgcaactattgcacctctctatttgaatttactgtggaccatgtgtggtgtctctatgccctttgaaagcagtttttataaaaagaaagcccgggtctgcagagaatgaaaactggttggaaactaaaggttcattgtgttaagtgcaattaatacaagttattgtgcttttcaaaaatgtacacggaaatctggacagtgctgcacagattgatacattagcctttgctttttctctttccggataaccttgtaacatattgaaaccttttaaggatgccaagaatgcattattccacaaaaaaacagcagaccaacatatagagtgtttaaaatagcatttctgggcaaattcaaactcttgtggttctaggactcacatctgtttcagtttttcctcagttgtatattgaccagtgttctttattgcaaaaacatatacccgatttagcagtgtcagcgtattttttcttctcatcctggagcgtattcaagatcttcccaatacaagaaaattaataaaaaatttatatataggcagcagcaaaagagccatgttcaaaatagtcattatggggctcaaatagaaagaagacttttaagttttaatccagtttatctngttgagttctggtgagctactgacctcctgagactggcactgtgtaagttttagttgcctaccctagctcttttctcgtacaatttgtgccaataccaagtttcaatttgtttttacaaaacatttatttcaagccactagaattatcaaaatatgacgctattagcagagtaaatactctgaattaagagaccgggtactagctaaactccaaggagatcgttaagcaagcatacagtccacaaaacacttaagtgggccacaatatttagagagaattaaaagggtgtttaacttgaagctgtgtttatgcaataggccgaaggggccggtaaataatcacttggcccgtagcatattttaaaattattttaaaggattcagacaccccccgggagggggaaaaaacacggnn

SEQ ID NO: 9680 - DNA, 373 bp, Homo sapiens
  misc_feature 371, 372, 373: n = A,T,C or G
acacaccagggattgggggccctgcagcttctacgcccagggacatttgcttcggggactggagtccttgctgtggcgtgaggctgtgtctggcgtctgggaggaggactgtgtggggtctgggttccccagccctaatgacccagctggttgaaggcagcagatgaaaggagacaaatgaccacgcaaaccctgggtggcctcatgaacaggtggcggacaagggtgatccctgttgagcaaggtcctgcactgcggtgggtccaaggactaagctgccagcattcatttctgactgtcacttaccagcttcctgtgccattttctcatctgaaaacagctggacccatctcatggatggccgtgaggannn

SEQ ID NO: 9681 - DNA, 1852 bp, Homo sapiens
  misc_feature 1, 2, 3, 4, 5, 6, 7, 8, 9, 10, 11, 12, 13, 14, 15, 16, 17,18, 53, 1850, 1851, 1852: n = A,T,C or G
nnnnnnnnnnnnnnnnnnaaaaactgttactactaggttggagtagcctaagncagtagggcaaggaggtgggcccaggctggtctgtggggagctggagaatggtgactcgagtgaccagtggacaggcaggacccaggccagcattacaagcggggatgtcaggcaggagcaggggagcttctccgcttggcagctggtttatggtacacttttgaaaagtaagctcccagggcctggccctcacatgctcagtgaatatttgactgaagggtcccctcatagcttgggagtattcacaggcctaaatgttagttatactattagctaagcctggtcctttgttacgaaatttaaaaatgaaattgcaacattcttgtggaaattcaaagacatcattttctttcaacaaattcacacattcgttcatgcttcttctataccttttacccctaaagtcatccactcctgagttcctcctgctggtttcccaaactgcgcaatgactgccccatcataggcagtggtccgtggagtcggcctcactttcgcctttccccgcatctacttgtttccaaggccagtggtacttaactgggtcaagttgcctgtggaccttcaggaacagaattgccatgttcctcactgcctgcaggaaaggctccattccaagcccagtgaagatgtgtgcctatccagccgcccaccaaggatgtcatctgtagaatgggtggagggcaggggtttatttggtgtatatttttacattaaaatgcacttaatatcactttgtaaagcccagatgagtgcaaatgtgcctgtaacttcctcctttaatctgtccaggtagtatttagtctttagtcttacattttctttctccctttatttcatgaaattccttgagaaaacttcaacagtaaagaaagaaatttcgttcatctcacaactcttccaaacgaggaaacttagtgaaatatttcagagcttctagatgtgaggtacaaaacttgggatcaaatggaatcttgattcactaaccaatttaagatctgacttctaattttaggaactttgggttatgaacgcttccattttatacctgtgtctagttagtttctgcctatctatccaagaagcttttatcaagggtccaccatgtgccagccactgaagtagatataaatacaaggatgtgtaaggtatggatgatggtatacgaactgtcatcttactggatttgtccgctctgttaaagatacggttccgaaaactttttaaagccctagagagggctttaaggcaatgtagcatcatatatagaggcatcaacctgttcatatctttctatttaacagaactgtgcacctgggcacaagggtgtgcacaacaggatgtgtacagcagcactgttaaagtgtagcacatccatactacaggatcttatgcaactgttggaaagaatgaagcgatgctgcactgtggtcatgcagtgatctctaagacatattaactagaaagcaaaaggtttaacaatgtatagcagctgggcgcagtgactcgcgcctgtaatcccagcactttgggaggctgaatagggcggatcacctgaggtcaggagttggagaccaccggcatgtcgggaaagcgccgctatcaaaataacaaaattagtggggttgtggccggccggacacaccgcaaccgaaggcgaagacgagcaacagctgaaacggaagagtttgacagcagaacacccacgaccagcgcacgggcccggcagaaaccgcccaaaaagacaaccgcgcgcgcaacaaagagaagacacaacgcacacacagaaagaaacnnn

SEQ ID NO: 9682 - DNA, 528 bp, Homo sapiens
  misc_feature 1, 2, 3: n = A,T,C or G
nnnccagatgatgcgagaaccggaaggcagaggttgcagtgagcggacgcactgctgaactccagcctgggcgacagagtgagactctgtcacaaaaacaaatcaataattaaaataaaaaataaacaagtaatatgcaccagctccatgaaacagtaatagttttacctttcctgcttaatgaaaatgcttgagcacactttaaagcaacttacacccaaattttattagaagtacaaaaataaaatttaccttagaaacaatgtcaatttgttatacttgcctcatctaagggatccacatctgttttcctcatcttaataagtacatcatatgcctgctgaagtgctctgactttaggatgagaaactctaacataggccggaagacaaataaaccataaactgtaacaatgactaaacagacacttggcccactgtggtggatttgtataacatctcttcgccaatttatgagctgtttttatttcctgtttagttctcttagccatgagaggtggactctttg

SEQ ID NO: 9683 - DNA, 802 bp, Homo sapiens
  misc_feature 1, 797, 798, 799, 800, 801, 802: n = A,T,C or G
ngtgaatcaacgcaagtcaaaatgaaatttacactgaaggcttccaaaccaaagggaaggacaggatgtgtcatcaaatatgttttgtcaccttgtattatacaaaatgttattttctaaagagtcagagaaaatctgtgaaacttattgtgcggcccccttgtaattaaatgttaactcccttgtatttaattttcaacactacattaagaattaagtggtttcagtttgtggacataagcaacacttattaatatcaaggtgtttaagaactcaggaggtcaaacatatgaataccaacagagatcagtattttcaaaataaacattatttatacaaaatagtttttaaattagatcagaaagtatttaaaataattaattttactgtataaagaatttgctttattttagctatgtaattctatctttcagaaaacagaaagctgatgctcccaagaagttcatcccttaccatttagctttatgtttgaaatcaatgacataagcagctaattcatattcatgtgaaggttgatgcaaaatcaatcacaaaggaatctgcagagggcagagttgttaaaaggaaatattacctatgtagcttttagtttttaaaaaaaatcaatgtgataaaaacactgataatagaacttatacattaatttagtgattcattgtaggaactcccatcccagtcatcatctgtgggcctgtgtagtgactatcgtacgtttggtttattcctaccaccatttagtgagaaaacaattctacacttttggtcacaatagtaannnnnn

SEQ ID NO: 9684 - DNA, 507 bp, Homo sapiens
  misc_feature 1: n = A,T,C or G
ngcccgggcaggtacagaaatgccaatgccatatattttatcttttaactcagtgggatacaattcaagtttcttgtcctgaaaaaacaaaggcagaatgttgctttgtgactcatcatataccaggttcaacgagtctggttttgtgactcattcttggatatgagctaccccatcagaagtggttacccaattttggacaagactacagaaaaaatgcaattttggtttatttaatcttttgcttccagtttatatttcacatcctgttcagcttcattaatatgccatgggtcacaaaactcagtgcaataaaatgtgtatgaaagaaacacccttcagaaaagatgagactctttcaagtgtaaatactctaaactaatataagtcaaaatatattttttgtgcccagtgatttttaaaaattacccagtcaaccatttcctcaataattcaaatactcaagtgtccatttatatttttggaataagcgagagtgatcgtagt

SEQ ID NO: 9685 - DNA, 2017 bp, Homo sapiens
  misc_feature 1, 2, 2017: n = A,T,C or G
nnctcagaggattaccgacccacgcgtccgcaacatcctggcttagtattgtgtgcaaaatcagagaggggtgcaagatcctgatttttcaggagttcaagcgacaatggcagcccaatacggcagtatgagcttcaaccccagcacaccaggggccagttatgggcctggaaggcaagagcccagaaattcccaattgagaattgtgttagtgggtaaaaccggagcaggaaaaagtgcaacaggaaacagcatccttggccggaaagtgtttcattctggcactgcagcaaaatccattaccaagaagtgtgagaaacgcagcagctcatggaaggaaacagaacttgtcgtagttgacacaccaggcattttcgacacagaggtgcccaatgctgaaacgtccaaggagattattcgctgcattcttctgacctccccagggcctcatgctctgcttctggtggttccactgggccgttacactgaggaagagcacaaagccacagagaagatcctgaaaatgtttggagagagggctagaagtttcatgattctcatattcacccggaaagatgacttaggtgacaccaatttgcatgactacttaagggaagctccagaagacattcaagacttgatggacattttcggtgaccgctactgtgcgttaaacaacaaggcaacaggcgctgagcaggaggcccagagggcacagttgctgggcctgatccagcgcgtggtgagggagaacaaggaaggctgctacactaataggatgtaccaaagggcggaggaggagatccagaagcaaacacaagcaatgcaagaactccacagagtggagctggagagagagaaagcgcggataagagaggagtatgaagagaaaatcagaaagctggaagataaagtggagcaggaaaagagaaagaagcaaatggagaagaaactagcagaacaggaggctcactatgctgtaaggcagcaaagggcaagaacggaagtggagagtaaggatgggatacttgaattaatcatgacagcgttacagattgcttcctttattttgttacgtctgttcgcggaagattaaacttaatgaaaatctgtttgtattttctgcatattctctggcaaccttgccccatacttacttatttagcatagtcgagtgctctagtttctgtctctcaggcactcgtaactaaggaccaccattggccattggtagatgtttgattgacttaacaagagagggacaaattttcaatttgtgaaactccaaagcagaaagtattggtgcttgctaccttgtgaattcttccttagacatgcagagaaaatgtatgcaagagaccaaaaagatggctccaagctatgtcatgttacctgtaataaaatcttttcttctagattctttctatgttggcagataatctccccttgtagcttccactcacttattcttgcattcagagtcacaatgatcatcttacccatgtggtttttgagaaagaaagatcaattctttgtttgcagtaggtaatcttagagatggagatgattgtagaattattcctagatgagtgtcaatttatttaattccattgtcatataaggagtcaaattgtttcttatcatttgttcattgaagaacagagacctgtctggaaaatcgatctctacaaattcaattaaataatgatccccaaatgctgaaaaagtgaaatacagcaattcaacagataatagagcaatgtttagtatattcagctgtatctgtagaaactctttgacgaacctcaatttaaccaatttgatgaatacccagttctcttcttttctagagaaagatagttgcaacctcacctccctcactcaacactttgaatacttattgtttggcaggtcatccacacacttctgcccccactgcattgaattttttgcttatgttgtttataataaaacttttcaattatctcaaaaaaaaaaaaaaaaaaaaaaaaaaaan

SEQ ID NO: 9686 - DNA, 1012 bp, Homo sapiens
  misc_feature 991, 992, 993, 994, 995, 996, 997, 998, 999, 1000, 1001,1002, 1003, 1004, 1005, 1006, 1007, 1008, 1009, 1010, 1011,1012: n = A,T,C or G
gcgtccatagagacccagaaagcaactcaataatcaataacctgtctgcagatatctttatatagatagatatctgcagacaggttattgattatagagacccaagaaagcaactcaataattgttcaaagttttcctcaataacctgtctgcagatatctatctatataaagatattatatataaatataaatttacatatatatgcacatgtatatatagttgtacatatatgtgtgtatatatatacttaaatgtaatatttacaaaataaaactgtgatctcgtctagagaaaatgtattcatattacaaactgctcttccatatttatgtaccatattatacctttttattattgttataattattatgggtatttctaattaatatgatgttgaaacctgtttggcaccttctggaagctaccaaaaaaatgacactccattgaagtgcttaaaagctgttctcataagaattctactggcctattgtaaaaaagaaaaaaaaaaagaaaaagaagaaagacacaaagaaaataatctaaacaccaaaaactaaacacaattccaatcctttttctgtacctcacgcgcataaatttgctgctcctatttttttttctgtttatgtgtttttatggatctaagttaaatcttttggcaatatataaaaatgtaaatagtaaactttatttattaagaatgtcatcttttttaatttatatttacacaattgttcatctaatttattttttctatacagttttaaatactcagacatattttgctgttcatgatatttttatcctgttctcatggatttgttttcccatactgttttctctgatctcaattacaggttggatctcacaaataataatgtcagagacagaaatattttgccactgttgattactatactttaaagttctatattatgaaaatatataatagcttgtacgctggaatgaaaaggcacggagccgtggnnnnnnnnnnnnnnnnnnnnnn

SEQ ID NO: 9687 - DNA, 2473 bp, Homo sapiens
  misc_feature 1, 2470, 2471, 2472, 2473: n = A,T,C or G
ngatctctaaggatccccgaatacagaggctacagaaactttaattagctgactttagttgagcttagcagtggtgtaactaggtctaaggtccttttgaatcactgtagcgatcttaattttgctagatttggagttcaataaattgagtatcctgagttgcccttgcgacccacgcgtccgctgcacagggcccagggagagatttgttcttgtgtgacttagagctgggtgtgggtactaattagcttttttcgactttgtcttgggatagacagtggctatgggaggattggacttttgagttgggctctgggtctcttggacaactttacaatttactggcttccaagacttcctgcttcaaaacccccagccagactattcatggcccattcagatcttcatgttcatcccacaagtgcaagaacagttaacctttcttaattgatttttgtaattggaggtttatattgtcttgcctaatgcatattctctttttttttttttttttgagacggagtcttgttctgttgccaggctggagtgcggtggtgcaatctcagctcactgcaatctccacctcctgggttcaagaggttctcctgcctcagcctcctgagtagccggggagctacaagcatgcaccaccacacccagctaatttttttttttttttgagaggagtctcgctctgtcgcccaggcttgagtgcagtggcgcgatctcggctcactgcaagctctgtctcctgggttcatgccattctcctgcttcagcctcccgagtagtcccaggagtagctgggactacaggtgcccaccaccacacccagctaatttttttgtatttttagtagagatggggtttcaccatgttatccaggatggttttgatctcctgacctcgtgatccgcccgccttggcctcccaaaagtgctgggattataggcgtgagccaccgcccgggcaaatttttgtatttttagtagagatggggtttcaccgtgttggccaggatggtctcaatctgaccttgtgatctgcccacctcggcctcccaaagtgctaggattactggcgtgagccaccactcctagccttaatgcatattcttaaatatacaaaggtagatttgttatgaaaattgctttggggctctaataacctaccttttaagaatgagaaactgctgggcttaagggagttcagtatgaatcaagattgaaccattcaaatgtggctgtgatttctgcatatatcatagatgggatccttctgagaatactggaatagggaattaggacaccaagccaattcagctgtgaaccttattcttgtacttttctttcttgctggtaattttatggagcaggttaagaaggctgctctgtgttaggataaactgtataccaataatgttgacaacctgtaatgagtgttgcattttacttcttgtatcttttccttcctaccttgatgccagtaatctataagggatctttatagtttgaatgtatttgaataacttcagtatactttagttctacttttttatttgactcacaaccattcttaggtctcaagtattcccatgtgttttaaaagcctgaagtcagtgagatgaaattcaacatcaagaatttgaagtaacttgtaaggaaaaataatataaagataccattggggcagtggctcacgcctgtaatctcagcactttgggaggctgaggtggaaggatcacttgaagccagagtttgagaccagcctgtgcaacacagcaagaccccgtctctacaaaaacttaaaaaattagctggctgtggtgttgctcacccatagttccagctactcgggaagctgaggcagtaagatcacttgagcccaggaggccgatgctgcagtgaactgtgattgttccactacagtccagcctgggtgacagagaaaagaaaaagaaaacattacataatttggctagagcataataatttgattttctggtttttgaaaatttgagttgcaataaaaggatatttcagtgtgcgaaaaaaaaaaaaaaaaaaaaaaaaaaaaaaaaaaaaaaaaaaaaaaaaaaaaaaaaaaaaaaaaaaaaaaaaaacaagagggggggggggcgctcgctgcaaaaaatcccccgcgcgaggacgggacaccagatggattaggacgacacacccagccagtgctagtcagctgacagacggggaggcgccccccaggcagggtgggcagtttaaccaaaaaacgacgagcggcaggccgccgctgcgtacaaaacaacccgggcgacgagtgacaaaaaggcgtcgacgagcacactcgtgggagaagagagacaccccattgcgggggggagggcacaaatgtggggaaacccaccacccagagaaaatgaagccgccgcggggagataaaaccacgaggaggtccttgggggtcaccgacnnnn

SEQ ID NO: 9688 - DNA, 6331 bp, Homo sapiens
  misc_feature 1, 6318, 6319, 6320, 6321, 6322, 6323, 6324, 6325, 6326,6327, 6328, 6329, 6330, 6331: n = A,T,C or G
naattcccgcgcctgggggtgcgcatgaccattcgcgactccctctgcggcccgcgggcctgggacttgcacaggcgtgctgcgtggaacctcacgaagcggagcttttgggttcccgccccgccccgccccgccccgccccgccggcggcggaggcagcgagcgcgagagcccagcggagtcgctgggagcctgaggcaccgagacacaaaggcaggcgggatgcgggagcaggcaaagggaaagcgaaagccgcgcgcccggccggtgactgggtgaaggcgccgcgcagctttcccgacgccggctgtaccgggacctcctggtcgagcctggcgcgccgcagccatggccatcgctcacctggccacggagtacgtgttctcggatttcttgctgaaggagcccacggagcccaagttcaaggggctgcgactggagctggctgtggacaagatggtcacgtgcattgcggtggggctgcccctgctgctcatctcgctggccttcgcgcaggagatctcgattggtacacagataagctgtttctctccaagttctttctcctggcgtcaggctgcctttgtggattcatattgctgggcggctgttcagcagaagaactcactgcagagcgagtctggaaacctcccactgtggctgcataagtttttcccctacatcctgctgctctttgcgatcctcctgtacctgcccccgctgttctggcgtttcgcagctgctcctcatatttgctcagacttgaagtttatcatggaagaacttgacaaagtttacaaccgtgcaattaaggctgcaaagagtgcgcgtgaccttgacatgagagatggagcctgctcagttccaggtgttaccgagaacttagggcaaagtttgtgggaggtatctgaaagccacttcaagtacccaattgtggagcagtacttgaagacaaagaaaaattctaataatttaatcatcaagtacattagctgccgcctgctgacactcatcattatactgttagcgtgtatctacctgggctattacttcagcctctcctcactctcagacgagtttgtgtgcagcatcaaatcagggatcctgagaaacgacagcaccgtgcccgatcagtttcagtgcaaactcattgccgtgggcatcttccagttgctcagtgtcattaaccttgtggtttatgtcctgctggctcccgtggttgtctacacgctgtttgttccattccgacagaagacagatgttctcaaagtgtacgaaatcctccccacttttgatgttctgcatttcaaatctgaagggtacaacgatttgagcctctacaatctcttcttggaggaaaatataagtgaggtcaagtcatacaagtgtcttaaggtactggagaatattaagagcagtggtcaggggatcgacccaatgctactcctgacaaaccttggcatgatcaagatggatgttgttgatggcaaaactcccatgtctgcagagatgagagaggagcaggggaaccagacggcagagctccaaggtatgaacatagacagtgaaactaaagcaaataatggagagaagaatgcccgacagagacttctggattcttcttgctgatgatttttttccttgagctgtaaatctgtgacttctgcgacatgggatttaatttggctaaagcacccctgttggtttcacagctggtttgcaataaatggttcttggtggagatactgagcatgtcttattgagtccctaatggaaatggtgatcaacaaaaggttatggaagaatggtttatgaacttcccataggaagcacctgagagatagtaaactgcagcaagtaactatgtgtaagtcctcatcaaatgaaaagcagaaagacaagaacaattagtcaagagcagtagccctgtcagagcctcggagcaatacctttctgtacccgtggtgagacaagacccagagctactggaaaacaagcactttggaagatttgttttgttttcatggaataataatatgtcaggatataatttaacgtgagtttcttatgtgcccttaaagactgttagacaagaaaagcattcactggctaataatccataggtcgacctatgtcctaagttaggtgtaaggtccgatgccttggcccacactcgagctctctttacattgttagttgtcaaccttggctgatggaaatcccgtaaccactatttgttgcactgtgccttgaagggcagcaggcccaagtgctgctctgactgaaaactgagttaacaagacgaaatctaaaggatattcacagtgacttcaattcaggaagaatgcttccaaaagagcccagtggggaaatctgacatcacagaagacattaattcagtcactttcaaagagtttgtctacaggcggtttctctgttatcaaaggcatttgaaataggattttacttaaacaataatggaacacaggagtatttaaagtgaagaacactttgcctgaatgtgatcagggcacataagtgacattggcgtgcttcatatggcgtgcttggagccagaaaaacttagcggtttattttgtttatatttaagcacagctttaaaaaattcattatcgtttattcagtgtccgaattgaggccatttgggaagaaaattctagcactggtggagaattatagaataaagattataaatggttggataagacaaatgtaagcttatttcataaacatttaaagctgattcagaacatgttaaaaactgttcccaattccaactatgtaaatagatcctatgttcacattttacacacacacacaaaaatctttaacatctgtggaacttcccagttttagtcttagaaagttagcatgttgcataagttcagtaatcctcaggaacctccaagtttacttttagctcttacggacagttgtttacataatctaattactgttttctgaagaacggaaattatataagctgctgtctgccttttggaatattcagaaaagcagattttatttgtacttctgtgatgttttctgaaatggaaagctgatgataaatatcaaagtagcaatcagtgcgttaaattattctgttacatgatatttattactgttgaattattctgtgacttagaaatggcagtaacctaaataatggaatttgcaaaattattatattgccgtatctgagatgttccatcacaagtttctacactggtttcttttgaaaatttaaaaagatttacgagatacattttctaggatatgattttttttttacaaaaagcttcatcttctgtagactatccttaatttctattttgaaacggtaaaaattgatattttaggacaccaggaagtctccaagccattcccactctctgaactccagtagggtctgtgatgtcccaggcaccagtaccaagttggatgtgcagatatgcataggcaggtcccatccttgaggacttcagagtccagtaaaaggcagcagaaacatgggctggtgcctaagaggagaaagcgtagccacagtaaaggctatgccagaaaactcctagcaaatgctctgtgttcttgggagagggcacattgtttttgttttctctcctatagttcctgtaactgctggttttgagaatatagtaatcatttttcccagaggcagatgaccaccttaaggttctttagctgcaaatcctctaggttgaagtttgtgtgaaatagtcacagtgattttgaatagtaaggaatccagttgccttttgaaccttccctcacagggatgagagaacaagcctgtggaggttgtggagctactggtaaacaactgtcagggccccagaaggctgatgtggaggcctggggatacatttcatctaataaaagtattactaggtatcagtatcagtaataaaagtattataataaagtatcagtaataaaagtattataataaaaagtattattaggacaggtaaactcatccatctactgtgagctgctggcttggagaacgacttttgaggagccagtttcctgaggagaaatgcttttataaagcactcattgctttgtaaaaggagacaaaactgatcctaaatgaccactccagggttgctgattttgtttctggctcatgtctgcctagtaaaccaccagcaagctgctgaaccaggctggaaacaacattgttgcaactgggagggacatagagtactgtgaaagcagcgttccaacacatcttcacttttacaaagggataggcagagacttccaacatagaggttcttaaacttcgaggggttacaatccccttgcaaatatttttatagctatggaccctctcctcagatctacagccaacattttcagtgcaccttaggaggtcattttagtccacgcctctgaaaaagctgcactccaacggctgaagagcaagccatacggccgagaatggggctccctttgccttcatgaaagctacttcccccaacactaagactcagctgtacgtttgcttagctcagtcacatttacattcttctgggtgaactgtaccttttgagtacctgccttcattttctagaatcagacctaacaaggtcagtagaagcctgggcagcagcgggcctggaaagacgaggcagccagcatgaactgctgttctctccctgaccacaaggcgtcgtcttcctccagggtcaagtaattgttcttgttccgcctcacaggaatgtggggaggaaggacgttaacactataaaatgctgcgtcctaccttaaacttgtactgtgagaaagctggaaacttccacctgtacagtgggtctggtttgcatgtttagtttcatttgtgggaactgcttgtccaagagtgagctcaggtcagggcagtttgtgcctatgagaattagctcagctatcaggcaggtttttagacacctttttaaaatgtgctcgtgtctggtttgttttatgtcagtcctgttttttcggaaggggtttaaaaacagagactggcccagatgaggcattcttcaaatgtttgttgaaatgaatggacaaactcttaggataaatcctaatttgttggcaactgttatttgattttagaaggcaaactgattttattttagagaggggaaggggaggggaggctcattagcctcttggtagaaagaggactatttctgcaaatgaataggtttccaccttaagtagtgacagtccttaacttcttattatggagtgagtcttgaccgctttccaagttcaatagaagttcaagattgcctctcagtgattagggaaattgaagcttttaaagctcctggtctcagtaattcctcagaataaacctctttaaaagggatattgatggaaatgtacaattaccagtaattgaggttttatctgaggggatggagatgatgaaatggttccttcttggaagttgttggcattttggctttatttttcacaaataaagtgaaaccatttaaaacgattgacaacgattatatagtgccatgtggaatacaatagatattaatttgtggttggtttttctgcctgctttaaatgaaatgtattatgtttctgggttccttttttagctgtaaaaatacttcgtcactaaagcatgaaatttaatcagcagttgttcttcaagttcctgaaagctataaaagtttctcatgacttgagtggttttttccctgcccaccagaggagaaagcccttgtagaattctgcagtgttacaagtgttccctacaaaaactgaaaccatcagctcctctttaacaagttggctttttaaaagcacgtaattacaatttaatggtattctgtaaagtggtgctctaggcataatttaaattctttttaatgactatatttcttcaaaactttgaaagaaaaatgtgttctttttgctgcatcctttgtaagaagactgccaacagaggaaaaaggactttacaaattaagaccatcttggtttcatttccacaaagatgagaacaaatcatggtgttaggaaaggatccttagaagaacacaagaatttgaaagcccttggtggttatcactactatatttcatatttccacagaagtgacttagccaagctctgcattttgagcctgctgactttcatttaaaaggaatgaaaggctgaaaatccaggctgctgtgtctgtagataaaggtcaaaccatgtttgagttcttcactgttgtgtccacctaaataaaactgagtaagtaatgaataaaactannnnnnnnnnnnnn

SEQ ID NO: 9689 - DNA, 1033 bp, Homo sapiens
  misc_feature 1, 2, 3, 4, 5, 6, 7, 8, 9, 10, 11, 1028, 1029, 1030, 1031,1032, 1033: n = A,T,C or G
nnnnnnnnnnnagctaatttttgtatttttagtagagacggggtttcaccatgttggccaggctggtctcgaacacctgaccttgtgatccacccgcctcggcctcccaataatttgtaagttatgttagcgggatcctcaaggccttgctctgccccgtggagacgcttgctcggatgagctcaggaaacagtaccggctgcgtggcaggtctgggtgttgtgtgcgaggacgtggcctttgaacaccgctgtgttctcagaggtccttaggagatatttttttttgtcttagggggactgtgttaagttcagacaaatcatgctgggtgtggagagagtgtgaaatacgtcagtgaagtaagtagcagtgagcgattgtgaatgtgtaatgtaaatggaaaaccgggttttaccgtgttaagttattcactagggagccagtcgtagttctttgtaatcctctttcttccaaacctgctttgctgaaagttgcagaaaaggaagtgtgtggagagaaacagaacccttcagggtgggtcagaggacgccatccacagtggattcgtgttcgtttgcaggtggaagcagtgatttttaggacccactgattaaaaacaaacattcccaagtgtctctgagagatgctgtttatttgttaattaaaaagcttttttctctgtcttttaaattatggctttcatgtaataaggatatttttagtgaaaaattgttttcctttcaaattacagaccttttaaaaaaacttaatttgagcgagtaccttttcatttgacacttttcctgtttctaaccttaggaaaccagaatagcgtttggcagacacgacgttttcagtttacctttgacacctgccccactccattttgctttgtgatgtcttcatttaacaataaattatctgacaaaaaaaaagggggggctaaataccgggggccagttcgtccgtttgtaagggcccaagggggtaaaagaggggggtaaaggggagaagggcttggacccccnnnnnn

SEQ ID NO: 9690 - DNA, 2957 bp, Homo sapiens
  misc_feature 2947, 2948, 2949, 2950, 2951, 2952, 2953, 2954, 2955, 2956,2957: n = A,T,C or G
ccccattcgggggtaaccgtgtcatttgcttgcaacactggcacctctgccctgcaccccgggagtgagcagtgagtgaggctcgggtctgggcgctggctccgaatcttcgggctgggagagactccaccatctgggggcggcctgggggagcagccttagtgtcttcctgctgatgcaatccgctaggtcgcgagtctccgccgcgagagggccggtctgcaatccagcccgccacgtgtactcgccgccgcctcgggcactgccccaggtcttgctgcagccgggaccgcgctctgcagccgcagacccggtccacacggccaggggctacgacccttgggatctgccctccgctcagctcgagcttccctcgtggccgacggaacaatgaaggattgcagtaacggatgctccgcagagtgtaccggagaaggaggatcaaaagaggtggtggggacttttaaggctaaagacctaatagtcacaccagctaccattttaaaggaaaaaccagaccccaataatctggtttttggaactgtgttcacggatcatatgctgacggtggagtggtcctcagagtttggatgggagaaacctcatatcaagcctcttcagaacctgtcattgcaccctggctcatcagctttgcactatgcagtggaattatttgaaggattgaaggcatttcgaggagtagataataaaattcgactgtttcagccaaacctcaacatggatagaatgtatcgctctgctgtgagggcaactctgccggtatttgacaaagaagagctcttagagtgtattcaacagcttgtgaaattggatcaagaatgggtcccatattcaacatctgctagtctgtatattcgtcctacattcattggaactgagccttctcttggagtcaagaagcctaccaaagccctgctctttgtactcttgagcccagtgggaccttatttttcaagtggaacctttaatccagtgtccctgtgggccaatcccaagtatgtaagagcctggaaaggtggaactggggactgcaagatgggagggaattacggctcatctctttttgcccaatgtgaagcagtagataatgggtgtcagcaggtcctgtggctctatggagaggaccatcagatcactgaagtgggaactatgaatctttttctttactggataaatgaagatggagaagaagaactggcaactcctccactagatggcatcattcttccaggagtgacaaggcggtgcattctggacctggcacatcagtggggtgaatttaaggtgtcagagagatacctcaccatggatgacttgacaacagccctggaggggaacagagtgagagagatgtttggctctggtacagcctgtgttgtttgcccagtttctgatatactgtacaaaggcgagacaatacacattccaactatggagaatggtcctaagctggcaagccgcatcttgagcaaattaactgatatccagtatggaagagaagagagcgactggacaattgtgctatcctgaatggaaaatagaggatacaatggaaaatagaggataccaactgtatgctactgggacagactgttgcatttgaattgtgatagatttctttggctacctgtgcataatgtagtttgtagtatcaatgtgttacaagagtgattgtttcttcatgccagagaaaatgaattgcaatcatcaaatggtgtttcataacttggtagtagtaacttaccttaccttacctagaaaaatattaatgtaagccatataacatgggattttcctcaatgattttagtgcctccttttgtacttcactcagatactaaatagtagtttattctttaatataagttacattctgctcctcaaccaaatgcaattttttgtgtgtgtttgaaagctaatttgagaaaatttcataggttacatttcctgcagcctatctttatccacagaaagtgttttcttttttttaaatcaagacttttaaaactggatttcctcccatcactgttttttgaaggtcctccaagtccgtgttaaggtaaatatctgttttcttcctgatgtcacagcctgagcatactctgtgcattaggaagacctgagtgcatttcccaccattgtcctttccacattatgttgtagctggctggctgtcaggcgactacaagactgagggtcttgtgccttatagatctttgtatcccccatggctgacacatagtaggtactcagtaaatggttttataatgaatcagtgaacattttgcttctatagaagtgtaccttctttgtttctatattatgaaacctctttattagaatttgtgattgattctgacagtgtatagatttaccttatattgtctttattttccatgagctactaagtcattagagatactctgaagcatagttagtttaggaaatcacttcatattgattgtattagaattatcttggaattgaagatatatccctagagcaggggaccccaacccccaggccatgggccacacagcaggaagaggtgagtggtgggccattgaggagcttcatctgtatttatggctacttcccatcactcgaattaccacctgaactccacctcttgtcagctcagtggcagcattagattctcatagaagcacaaatcctattgtgaactctgcatgcaagggatctaggctatgcgctccttatgagaatctatgcgtgataacctgaaggggaacaggttaaatcctgaaagcacccttaaacccggagatggggcacaactgcgtccgacaacggggccggggccaaaaagtcgggcaacgtccataaaaagccaaatacagcacacacacgtagaaacggatgtatagaagacaagacaaccagtatcaggcaaacacgacactcannnnnnnnnnn

SEQ ID NO: 9691 - DNA, 959 bp, Homo sapiens
accacgcgtccgctctgctttgtccctcaggtggaaaagagaggtagtttagaactctctgcataggggtgggaattaatcaaaaacctcagaggctgaaattcctaatacctttcctttatcgtggttatagtcagctcatttccattccactatttcccataatgcttctgagagccactaacttgattgataaagatcctgcctctgctgagtgtacctgacagtagtctaagatgagagagtttagggactactctgttttagcaagagatattttgggggtctttttgttttaactattgtcaggagattgggctaaagagaagacgacgagagtaaggaaataaagggaattgcctctggctagagagtagttaggtgttaatacctggtagagatgtaagggatatgacctccctttctttatgtgctcactgaggatctgaggggaccctgttaggagagcatagcatcatgatgtattagctgttcatctgctactggttggatggacataactattgtaactattcagtatttactggtaggcactgtcctctgattaaacttggcctactggcaatggctacttaggattgatctaagggccaaagtgcagggtgggtgaactttattgtactttggatttggttaacctgttttcttcaagcctgaggttttatatacaaactccctgaatactctttttgccttgtatcttctcagcctcctagccaagtcctatgtaatatggaaaacaaacactgcagacttgagattcagttgccgatcaaggctctggcattcagagaacccttgcaactcgagaagctgtttttatttcgtttttgttttgatccagtgctctcccatctaacaactaaacaggagccatttcaaggcgggagatattttaaacacccaaaatgttgggtctgattttcaaacttttaaac

SEQ ID NO: 9692 - DNA, 1606 bp, Homo sapiens
  misc_feature 1, 2, 3, 4, 5, 1606: n = A,T,C or G
nnnnngagttatcagcctgtgtggtgttaactaccttagaaggtacaagctaagaaatgtaacagtatcaaccctcccagttgcttaattatacccataggtaatacaaaaagctctgaagacccaaagatgacattactaatgatgtgatttcaggagccacagaagaaccttaccagcttccctcaaatcagtccttatcctctttctatcttcactcccatcatcatctattttcacactatccagctaagcaaagattcctggaggctgacttgtatcttcagactcacagagtgaattcagctcttctgaatcaagacccacccagtctctttcattcagacctgttgctaacaaatttatatttgccaaggatattaggcaaaagaggctacttgattggtggccaacctcgtgcccacatggaaggtatctttaatagggtcttttcaaaccttagtggaggagggtcagctcaatttgggcaatgcatttgttcccagtttcattttcttcctgggaattaactcgtcatttcattccttcagtcatcttctgtgtaggtgaccggagcactgagaggcagctctgatgcactattgtgtgtcagcagctcaaaggccctaaaacactgaaggttctgcatctgaagtattagattgttagcagcaaaatatgaaagatgaggtggacagtcctctaagccctatttagggaagcttttccaagccacaatcttaactacctacccaaaggatttgcattacccccagattctgtgccaacaaccttttaaggaaatacagtccttgggaaatgagttttgatggtgaattggggtgttaaggaagggaaagattgtcatagatggtagggctttgaaaatgcagggtatcagctgccactcctggcttcaacacattgagtcactgcctagacggttctcttggtcttattcccatcctggccaatgcttaaatactatttgttgaaaataattctttgagacagatttcagctacctcccttccaggttcgatttaacttggttgtaattgtcaatttgttgttataggtcttacctgtgtgaaagaaagaaaaagaaagaaagaaagaaagagaaaggaaattataaggtcaagttaacagttttgaggttttgtgtttttttctggaactacttcaagtgagaaaataaaaaaaaatggtgacaaagctgtacagatagagataatagaagacaaagagattaaaaggaaataaaaatgcatgatttaaaaaactaaggaattagaaaccttaaaaaaaaaaagaactcgcgctatcaaacccctgatgatgacagatacgaacacaatagacgtcatgaaacacagtcggctgctaaacaattacagcggggacgcatacatgcaccagcacgagctgtcaagagagctccaagtaaacttagattacgaaataggggcgataataatgtctcatggcgacgcacatccgcgtctggcccccccttgtgatcctacacacctagagtgtcaccgcacacaaccgtacagagccacatacgctagcgcttctgatgaattacgacgacgcaccn

SEQ ID NO: 9693 - DNA, 2812 bp, Homo sapiens
  misc_feature 1, 2812: n = A,T,C or G
nacgttgttttaagaactgaaggctaattaccccaaggagctggtgcccttactaacctcggtggatccgatcgcgcacctgtggtgggtgtgagggttaatgtgctcttgtccaggtatttgattgaaccctgtgggccaggaaaatccaaactcacctacatgtgcagagttgacttaaggggccacatgccagaatggtacacaaaatcttttggacatttgtgtgcagctgaagttgtaaagatccgggattccttcagtaaccagaacactgaaaccaaagacaccaaatctaggtgatcactgaagcaacgcaaccgcttccaccaccatggtgtttgtttctagaacttttgccagtccttgaagaatgggttctgtgtctaatcctgaaacaaagaaaactacaagctggagtgtaggaattgaccatagccaatttgatacatttttaaagctgcttcctgtttgttgagggtctgtattcatagaccttgactggaatatgtaagactgtgcaaaaaaaaaaaaaaaaatttatgtgtattcttattcagattgcttctgagaagcaaaactctttaaatacattatggaagataatgaagatacttcattctcttgtgatatcagtgtatgcgtacctgtgtcgctttatttgcagtgtgttgagggactggtgtatccactggaatagttggtactcttggatgtgttttctcaccaagatgagcaaagaaaggtttgcacagaggagtgtgaatgtgtgtttgttgctggctgaatggcaatagatgtctaaggtggattcagtgtctggcacactgagacacctccaagaaggagattgatgcatcaggttcagtttaacctggaatatctgactacccctgaatccacccagaaagggggcccaacacccttgtccatttatgggtattttttttcgaagttattaagcatattccttttccacgaacctcttctgtactttgattgtaataggttggctcttacacccattccaaatgcagtttatttttagacccgattgcaaatagtgatgtagttttaaccagtatggattagttcagggatgaactgctccctccagccttactggctctgatccacagggttttgttttgttttgttttgttttttgtttaagtcgagatataaaaactgaacacgataacacttactcttaaatcaagcatcaacactttttccctgttagaattctttgcatttttgtgtttgtaacagaaacgccttaagacactatgtttgggaatataggaaactatgtgtgtcccaaggaaatccctgtaaatttaactcacctacaaaaggctttttccccgcctttggttgttaacggcattcctgaaagccacatgtgtttattcattgggcttgttcttatcagcaaataggttttctggttttatgactttttgtcttattttatttttcctacatttctttttttttttttttcctttagaatgccctggaaatatatttaagtggtaatgaaaaatagtaatcatagtaaaacgcaacaagaagaaaaccaacccaaaccagtgaagttttttagaacctttagaagggtggtctttattcaggttttactgtaatggtaaggattgactcaagagacagtattagtaaatttattgtgtatggatcaaaagtgaataatgtatgaatgagagctgtaagaaggatttttattttgttataatttagttaccattttcagtgttatttcaaaggttctttgaagaattttggggcagggcatcagattagagttttaaaatttgagtattttggatatcagtgttcctcatgaagatatacatggatattcaattttgatggcttccagatttgtaagattgtatgttgtatataccattctattaagaaacatgtccactgtgctttcaaacatagataaagcatgataaagattattatttaagatatacttgtatttatacctcagatattcttttgggttttgtacctcaaggcttttttcttcttattgtaaatacactttacgtgaatacagtctaagtgaagaaaataaataaaaggaagaggtttataacttgctctatatctgtacagattataatcaataagtgcactattattaaatgtttaaagtaagggaaaagtctgggctgccttccttaatattgcatctcactcccacccttaaaaccacagattgcaaagcatagcattttagcatcaactacaatcaaaagagcgatttgctgaaggaaaaatcggactgcaaatcattccaaggccaaactgcaactgagccacccgatgtccgcacaacagggagaaacctggggaaggaccaggacagcacagggaatacagtcgaagcacggtgccggacgaaaggaggcgagcaggagaaagaacacgggcgcgacgcagaaaacgagcaggtgacggccgaaactgcggtaaccaaggtaaatgcccaacaacagcgcctgttacccccagcgattatctaggaacggagcacacatgtaagggggcgtgcaagcgtgaacaaccagcgacggggcatagctgaaggcaaaccaaacatgaggggagcagaacgaaatacagaacagaaaagacggcgacactccaaaataaccccgagggcgtaagatggcagcagccaagaactggagtcaaacacaaaaggcggtactgacgacacacattaccaatgaagacacgaagcgtacgatctacgaacgaggacggaccagan

SEQ ID NO: 9694 - DNA, 1238 bp, Homo sapiens
  misc_feature 1, 2, 3, 1236, 1237, 1238: n = A,T,C or G
nnnatattatataacgagagtgtctatgtcgagtcttttacattatatacggatatctctggtgctcttcatggggttcaatagttttggcgtcggtggatagtgtcctggatatactttgtgccccactattctttccaacctcacgtgatgtctcattgctccttacttctattcccttgttgggccccgggtgtggtagccaatggaggagaatttttaatgctatataagcataactgataactgctattacaaataaattccacaaatttggaaagttattagaggaagaattttttttccttgtaatttccaggtgtttatattagttgggccatagtgaaaattacatggaggaaagaaaataggaaaataagtcacagaaaaagaaaatcaaaacaaatagaaactctggggaacaagtgagttaattaccgctcatgtctcccatccggttctctagctccttgagggttactgtctaatgctccacaaaagtgccttacccagtgcttggtacagagaaggcactgaataaattcacaaaggccgattggttcacccattcttttagagacaacagacacgcaattctgacgaggactcctgttactaaaagacacagcctctgatacaagagagatatccctttgactaaagcattaccagggtccccagggccccctcccactggggcggtaacactacgggtctccccaccatatattccatgtcaaagtatctacacaaatacagaggaaattaagcaagtaaatacggtatgtaattgttatcatttgtatttctttaaggcatatttataaatattttaaagtaaacaatatgagtgagtgcctttcattagctatgatctttcatactgatatattttgactgatctgaataagcaggttactgtggaagcatataacataaaacagctaatatgattccagtgggtacaaccaagtgtcagtacttgatacataactctatcccatcattcgcaattacaggctgctgtgtggagtattaaacatgcatcttagtttttatttgtacacaatggtccaaattttcacttacatataactttccaactgtgtaagtgttttgaagcaattatgtttttcatttggattttttggtgtgtcattttcttctataaaatctctttcttttctttgttttttgtttttttgtttttacatgggatacaataaatcggacgcnnn

SEQ ID NO: 9695 - DNA, 985 bp, Homo sapiens
  misc_feature 1, 984, 985: n = A,T,C or G
nctagagctgttctagagtatccccgtgatgtgttattgttgttgttgggtggggtgggcattttgtttatttgtttggtggcaatcagtggtagtagggagtgggagggcttatattggtttttccagctattaaggggacatattgtgtcgttgtgcttttcacgttataaaatgtttatatttaccagtacagcactgggctttataaagactgcactcagaaccacactgcacagtccagttttttaaaaagctgctacatgacagacaggtaatcccactgagtgagttttgagaaacaaatcaaacgaagtaaacaagaaacataaaaaccaaatagcaaatgaataaaagcctgttcttgtaacttattcaacttttgccaaattcctaccaatcacttgctttttaaaagaaatgtataatagccaaaagagaaattatgtccctgttgtacagaagttagaatttttgactccaggcagcagtttgctcagtgatcttgaacaagttatccaattgcctctacatttgcatcagtttctctagctgcaaaatggggataatactatatacctacctcacagtgggagggcaggagattttgaggccctgaggttttaggtgggctgtgagggccaacgcttgacacaaagtccatgggttattattcaaggaatgcacaggcccatcggcttgtttaggaaagacaagacagggagtgcttgtctgatattcacaggaataatgcggagctcctgaatttgtaggtccaccttaaaagagcagactggatgggagaatattttacttcgtgggaaacttgacttaccctttaccagtctataattgggtacaacgtcatattgctcaaatggcaaggtcggttacggtggctcactaacacttgggcttccactttcaaggaacggctcaaatcttcttgagcgcccatttagaacatcactctgtctcaacgann

SEQ ID NO: 9696 - DNA, 3381 bp, Homo sapiens
  misc_feature 1, 2, 3, 4, 3377, 3378, 3379, 3380, 3381: n = A,T,C or G
nnnncggcacgtggaggaactctgctggaagagaacatgcttcctctcccctcctgccacactcctgaccaggcccccaagcagcagtcctcagggagctgcacccgtgccagtggcccctgccctggccccttgccttggggcgctcgtcctggtccccagccatggtggcaatgagaagggagcgccagggcagaccgtgtgagattcctgcagagcctcactgcctgcgctctccttcttgcagagtcagatatccggcccagcaagctcctgacctggtgccagcagcagacagagggctaccagcatgtcaacgtcaccgacctgaccacatcctggcgcagtgggttggccctgtgtgccatcatccaccgcttccggcctgagctcatcaactttgactctttgaatgaagatgatgctgtggagaacaaccagctcgcatttgatgtggccgagcgagagtttgggatccctccagtgaccacgggcaaagagatggcatctgcccaggagcctgacaagctcagcatggtcatgtacctctccaagttctacgagctcttccggggcaccccactgaggcccgtggattcttggcgcaaaaactatggagaaaatgctgacctcagcttggccaaatcatccatttctaataactatctcaacctcacatttccaaggaagaggactccacgggtggatggtcaaaccggagagaatgacatgaacaaacggagacggaagggcttcaccaacctggacgagccttcaaacttttccagccgtagcttgggctccaatcaagagtgtgggagcagtaaggaaggtggaaatcagaacaaagtcaagtccatggcgaatcagctgcttggccaagtttgaggagagcactcggaaccctcactcatgaagcaggaatctatgcgaaagtcatttcccctttaacctgggaaggcagcgacaccgtgttacttctgtaagacacgtggtgtacgttatctggacggctgacgccgagggcgcacttcttccaccggactcgtccgctgcgcattgttgcccacacttgtgctgggcggctcaacccttgaactgcgatgacgggcaatctcctgggaaggcccccctcattcacccggttcaaccaccctactcagcaacccgcgcgacacacgcgcagcttgaatccacaaccacaaagggcagccaccccacagaaaagacgccccgaaagaccacccaacgatcatgtataagccgtagtgctagcagccgagccaccgaactaatctcgcagtcacacccgctagcagatagcgcgcccaatttacagagccagccctcgtcagccacctgtacctcagacatctaactcatcgaccaactgaattagtactaagtggcacacagcgctaacgccaacacctcctgagcctggggctgccactcctctgggcgttctctgaggtcctggcagccatgtacagggaatctgagggctccctcgagagcatctgcaactgggtgctcaggtgcttcccagtcaagctccgctgacatggctggctgccccaaagtgccttcacatttccagggaggcttcagatggcagtgcgtttgcagtttgctcaggctctggccaggaagcctagcattctctaagcaattagctcaaagccaaagaatttcacatgggccacctccgcctggccttatcagggtgaacatctactcacggtgctagggccagggatgatatgaaggatcttttctatagctttgtgagccatacttctgggtttacatttcaatttttttaattttaattagcccagagaaagcatttttttctatgagtgtcaatttttctaaacatgggtttgaagcttataaccagttttataaaccccttgaacactgcagtgagttatcaaagccactgcctgcaaagtggatgatttaagattttacacgcatgaaaatgagtgtgccatctcctgaccagtgccttttgacttaggtacccagatgccacttgtcagcagcaggatactttttacaacacgaaagcataattattttagaagaagagagtagaagggcagaatagaattcaacttacagaagcacggagtagtgtgtggttggctgttatctgtccccctgggaggaggactgttttgctcccttgttttgatgttaaacagtagcttaaaggctttcccccccataccaactcacagccaaatgacaaagaaccgtggggtttcaacagattctacaaacatgcattttcccttcccactaatgggcactgcagggaaagcccattggcatttgaccatggagctgatgcagtgccaaagatgagctctttcaactgatggcattttagcccctgtggctcccagcggatcccccagcccgggctgcaggctgagccaaggctgtgcaggttccatattggtcaggccaagtggagtggaagactctgtccacttatgtggtgtcctttgggactgagggggtttgttagcacatcaggctattgctgggaagcgtggcctgcccagtgagcattgcctgtggacatcctgactgcttagctgctccgctgccacacatatgtggtcaaaacagaaaccaatttcacactgccctgggaaaggaatgggtctgacctccaggggaagctctaccatatcttgactggcagggaaggctgggagtggaagctatttatggactgatccaaaggacatatgcatgagtaagggtaaaaatgagcatgcaggtccacctgtgttcttactctgggtatctagaagagtcctcagctctccctactccacgctgcctagacatacacagctgcagggtctggctgaacaatcaaggggccgccagagaaaggccatctacggtgcgcagtgtatctggagttgctgggcccaagcatagctctgtggagttatcactagagatgcctctggcattcacctaaagacggtgttgcctgggctgtgggctgagcgagtcagcaaccgtcgcagagcttccgagatggagccgctccctaatggggccgcgcacacaacgcgacgccgccactccctaacccaaagcacccgccccccgcgaacatccccctgggcgcaccaacaccacaagcgccttgcgcccgtgagcccacacacacctcgcagcgcgaacctgcccgaccctccaggacccaccgcggcaggggcccacggctcccaccacgcccccgctcgcacctgcccctacgcggagccgccccacacaaacaccatgacagcgcgaaccatccaccgccccacgcctgcccgcggcagggaacccctcgcacnnnnn

SEQ ID NO: 9697 - DNA, 1424 bp, Homo sapiens
gactcatgagcttcattgtacattactccatctaccgaggcagcgcatggcatgactgaacggcttggaacaaacacagaaattagcaccacaaacattcaggaaccaaatataatctgctatggtcacaccacagacaatgcaggaagaggctttttattgcttgtgtgtgttttcaaatcaagtaggcacaacccagtcctcataacagccctcgggagtggacgcaccggggcgggagagcgcaggagggagtgtgcttggctatcctgcccagtggaaaggaaagtgacgtgcattgatcttagagtccttggcaacagactgtggaggcaataacaggataaagaaagcagggagaacgaggcatggccagggtccccagtgcgccttcaaggagaccttaaaacagatagatagcaccacaagagagccacaagagagaagtgtaaaaaataagcaccaattttcattgagttatcacctacaaaaaatgtggtttccctgccctggacattctcccatcaggctctgcgggaagaaaagcggaaaaaggaagcaaataaaattaatccaaacctgtgttttagtcttaagtgcatgtagaaaaaagaaaattatcaaattttttccctattaaaaaaaaaaaaagtctagagcgaatcaaaaactgtctgaaaaggggcactggtacctgcttttcaatggcagcataaattcttgctgccccggggcaaacttccaatttattgcacgttcttggccagggcgggggtggggagacttcctatttctaatcagaacggtactgcaacccagaatccatgcctcgcccattctgtccgtgggactgagactgggtttccgtgcatgattgaaagccaggcacacttaacatttataacaatacaatacaaatatttacttaaaactcacaaaaacataagcacctttaatccatcgggaaggcacctgcagaatgacatttggcctctaaatggatcgtgttggaggttgttaaaaacggaggctttggtgatggtgggatgacctttacgaggcttaccttggaacattttttgaaggtcaggggaaatacacatcttcaagttgaatttagaaaaaaatatagtgtccaaatctggcagtccctcccccaacccctgagacctattcacgaacaggatgggtcgggcgagctgggggcgcggctccttccctctgttctctccgggctggggtcccacaccccgtggtgccgaggcgtagatgaagtcaggtgggaggggagggagaagccttcactgtccaggatcaggacgtgcacgggacactcacgaacgaatggcatgctgaggtcacgaggttgctctcgggagcccgggctcggcggctcctagcccatgaagcaacccacgagtccg

SEQ ID NO: 9698 - DNA, 884 bp, Homo sapiens
  misc_feature 884: n = A,T,C or G
cgtcaaaattaaccaaatacgaggggtgtgtgcattttttttttttttcagggattgaacacatttttaattattagaaatacatacatgcatataattaacctttaatttatttttaaaaataaattatggtcatgaaaaacaatagtgcttaaaattgaaatttcatagacatgtaattttattccctaaaaatgaaataagatgaaccttatgggtaataatgggatttttaatacttattgaggttatagacagtcttttttatgtctcaatgcataccatgtgagtacttggcatatattaggccttcaaatgatgatggatggatagacagataaaaggcccaatgaatgattgtaaatgtgtcttctcctatgtatccatgatgatattgcctagtttttaatacaagcttaagaatcaataaaatgatagatctgaaatctgtagatgccagtctggctcagtattaatactgacagtagtttttttgttttttaagaaagcaagtatattaaaatatctctgttagaaaagattacaatttgaaaggatcattctacaatcttagaactaaaaagcaatttaaggcaaagaggtacatcaaagaagctattccatagctcagttacagctcaacaaaagctctgtctgtattgtctactggtaagcttgtgccctggtggctaaggatcatatgtaccgctatatccgccagttgatgactgtccatctctagcccctctaaccatgctatgcacccagtgtgtgcagaatggtctcctccgatggatgtcgactgtacaatgctatgacatgtaatacaggatgccgcggcactcttaacatttcacgtaacatgttctggcactggaaaatcn

SEQ ID NO: 9699 - DNA, 9963 bp, Homo sapiens
  misc_feature 9904: n = A,T,C or G
gaggattgagggtatcagggtgagtgagagtgtccagggtgaggagtgagggtatccagggtgagtgagggtgtccaggatgaggagtgagggtatccagggtgagtgagggtcgtccagggtgagtgagggcgtcagggtgagtgaacgcgtccagggtgagtgagggtctacatgcgtgcagatggaggtatccaggcatgaggagtgacggctatcctcggctgagtgagggtatccaggctgaggagtgagggtgtcagggtgaggagtgagggtgtccaggttgagtgagggtgtccaggatgaggaatgagggtgtccagggtgaggagtgagggagtccagggtgaggagtgagggagtccagggtgaggattgagggtgtcagggtgagtgagagtgtccagggtgaggagtgagggtatccagggtgagtgagggtgtccagggtgaggagtgagggtatccagggtgagtgagggtgtccagggtgagtgagggtgtcagggtgagtgaacgtgtccagggtgtgtgagggtgtccagggtgcagagtgaggtgtccagggtgaggagtgacggtgtctggggtgagtgagggtgtccagggtgaggagtgagggtgtcagggtgagtgagggtgtccagggttgagtgcacatgtgtggtgaggaggtgtttgcagtgcttcaggcgcagcaactctttcatctagtttaaaattgtgctctgaggttagattttagtagaacaaaggccttacaaagaatgtgaaaacattgtgcttccctgcttacaggcaattaaaaaggagaatcaagctgagggtgcctggtgtggggtggggtggagaagaccacagagactattgtgtgttttattcaacagtgtcctgggctgctttctccagaaatgtccctgacacatggatgtaagtgtggctagtttactgggagatgatcccagtgatgcaggacacgcgagccctaagattgaagcatagcccgggagggttcttagctttgcccaggaaggaactcaaggcaagccagtggtgttagcaacttttattgaagcggccggctgtgcacagcagcagcagaggcgctgctccttgcaaagcagggctgccctacaggctgtgcgcccacagtagcagctcagaggcagttctgcagtggtatttgtatccacttttaattatatgcaaatgaaggggcagtttatgcagacatttccagggtgagggtgggtaacttctgggtgctgccagagccatgggtgaactgacttgacacaggtcggtgtgtcctatgggaaactaggcatctgccctggggacctattttaggctaggtgctcagtttgggtctgaggtgcctgaggccccacttccagagttgagtcccacctcctacctcatttcccccttcagagattaggatactcctccttaatcttaaggggggttgcagaaggggcggagtcctgcttttccgtaactacttcctgctgagtttatggcacgtaggccctgcctggcactggaggacgtaaaaatttctggatacctgatctaaggagcccagaggcaggacgatttcattctccgtgtcagtggacaggatgggctggaagccttgtgccagcattgtctctggaactgtggtaatctagaatacacaaactttactaagaggttaaagaagcaaggaccaaacatttgtaacaagacagttgtcaaaggtcctagaagaggtgaaaaacaggtgagacttgggaaggcacttttgatggttgaccagatatagttggggcagtgccctggttatatctatgtaactaggtagcttgctcatagatcttttgaatgttaacctcaacctgtccagagttaatatatgtgcagcaggttttattaataactgcacaagaccccaccttgttcagctagtaaataatccaatgctagtctgttatcaacaactacattttccagagtctggggaactcttgaattctctttaatgcctgatctccgttggtggctaaggattctaggatttgagccaagttctttagcgttaactcatggtaggcaaagcaccccagggtgctgctagtcctattgccaccctgattcctgccagaaataagtaagcaagcaacaggacaatgaactccatgttgcccagatcccactgagagtgaacgtgcagtcatgcccataaccgacacacatcccagtccatgtgggtcagtccttcatcaccctccctgccttctgacaacagcagactccagccattccattatcattcacagcccaacccaagcagtcagtggctgaagaaagagaatcaggtatactctatgtccacatataccttcctgccacagggcttcaccaactggcaggattccccccagcccccaactcctcctcatcccttgttcccaggcgggtcaattggagagtgagcagagatagatggcttgcagaagggtatgcaagatggggagactccaccagaccttagggagagaatggcatctttctccaccttttaagagagacagagcctccctgaggtctcaaagatttttcagggcaacacaagaaacgtttccaagcctcagctgcaggtgttcacctttccactctggggtgtgaggagatggtaagctgaggacaagtgtgttccagatgcaggccaactctgttctccaacagtttgaaccaacttggccttggggttccaagggtaggatgaagggtgtcacggcaggacggggcctggcgtgaggcaacagcaagcagagcgaggacacaacagtggcagcagtgtacagacacaggacgtcagcttcaaacgatgcaacagcagggatatcttgggcacggctctgattcgagccactcccaactctcttgcctccaggatggaggcactgtacatgcaacagtccagagaaagattctagccagtccaagcccaggcacatccagagaaggtgggagctcttcgggttgactccaccgaggaaaacaggcatttgggtatttcagattcccgctccacaataaggcaacttttaaaaaaatattatttccaaaaacaaaacaaaaattccagggggagggaattcagcggatcagtcttaagaggagctttttttttagagcgagaaatcatataaaataaaatgaaataaaacaaggaggaaggcaaccagctgttagggggaaaataaggcagataaaggagcggggagagaaattaattgccaaccaggaggagttgggctgtatttttcaaaggtggggagagtggagcacacaccttgaggaggaaagcgagaaagaaaagaaaaaagcaagtgaaggggggctcgcccaagaagggtgaagaagcgaagaaagtcgaggcgccgaggctcccaaagctggcagctccgggtggcggtgcaggggcgaaggggggggcggggggaacgtcggacatgcggctctggagttgggtgctgcacctggggctgctgagcgccgcgctgggctgcgggctggccgagcgtccccgccgggcccggagagacccgcgggccggccgacccccgcgccccgccgccggcccggccacctgcgccacccgcggcccgcggccgccgcgcctcgccgccgccgccgccgccgccgggcggtgcctgggaagccgtgcgcgtcccccggcggcggcagcagcgggaggcgaggggcgccaccgaggagccgagcccgccgagccgggcgctctatttcagcgggcgaggcgagcacctgcgcctccgggccgacctcgagctgccccgggacgcgttcacgctgcaagtgtggctgcgagcggaggggggccagaggtctccggcagtgatcacagggctgtatgacaaatgttcttatatctcacgtgaccgaggatgggtcgtgggcattcacaccatcagtgaccaagacaacaaagacccacgctactttttctccttgaagacagaccgagcccggcaagtgaccaccatcaatgcccaccgcagctacctcccaggccagtgggtatacctagctgccacctatgatgggcagttcatgaagctctatgtgaatggtgcccaggtggccacctctggggaacaagtgggtggcatattcagcccactgacccagaagtgcaaagtgctcatgttagggggcagtgcccctgaatcacaactaccggggctacatcgagcacttcagtctgtggaaggtggccaggactcacgcgggagatactgtctgacatggaaacccatggcgcccacactgctctacctcagctcctcctccaggagaactggggacaatgtgaagcatgcctggtcccccatgaaggatggcagcagccccaaagtggaattcagcaatgcccacggctttctgctggacacgagtctggagcctcctctgtgcggacagacattgtgtgacaacacagaggtcattgccagctacaatcaagctctcaagtttccgccagcccaaggtggtgcgcctaccgcgtggtcaacctctatgaagatgatcataagaacccgacggtgacgcgccgaacaggtggacttccagcaccatcagctggctgaggccttcaagcaatacaacatctcctgggagctggacgtgctggaggtgagcaactcctcccttcgcccgccgcctcatcctggccaactgtgacatcagcaagattggggatgagaactgtgaccccgagtgcaaccacacgctgacgggccacgacggcggggattgccgccacctgcgccaccctgcccttcgtgaagaagcagcacaacggggtgtgtgacatggactgcaactatgaacggttcaactttgatggtggaaaagtgcttgtgacccttgaaatcaccaatgtcacttagacttgctttgaccccgactctccacacagagcctacttggatgttaatgagctgaagaacattcttaaattggatggatcaacacatctcaatatttctttgcaaaatcctcagaggaggagttggcaggagtagcaacttggccatgggacaaggaggccctgatgcacttaggtggcattgtcttgaacccatctttctatggcatgcctgggcacacccacaccatgatccatgagattggtcacagcctgggcctctatcacgtcttccgaggcatctcagaaatccagtcctgcagtgacccctgcatggagacagagccctccttcgagactggagacctctgcaatgataccaacccagcccctaaacacaagtcctgtggtgacccagggccaggaaatgacacctgtggctttcatagcttcttcaacactccttacaacaacttcatgagctatgcagatgacgactgtacggactccttcacgcccaatcaagtcgccagaatgcactgttacctggacctggtctaccagggctggcagccctccaggaaaccagcgcctgttgccctcgcccccccaagttctgggccacacaacggactctgtgacactggagtggttcccacctatagatggccatttctttgaaaggcctcctagagaattgggatcagcatgtcatctttgcctggaagggagaatcctgggtgcagtatgcttccaacgcttcctccccaatggccctgcagcccatcaggacactgggagccctcgtgaagcagaaggtcatcctgatgttgaacagccctgtaagtccagtgtccgcacctggagcccaaattcagctgtcaacccacacacggttcctccagcctgccctgagcctcaaggctgctacctcgagctggagttcctctaccccttggtccctgagtctctgaccatttgggtgacctttgtctccactgactgggactctagtggagctgtcaatgacatcaaactgttggctgtcagtgggaagaacatctccctgggtcctcagaatgtcttctgtgatgtcccactgaccatcagactctgggacgtgggcgaggaggtgtatggcatccaaatctacacgctggatgagcacctggagatcgatgctgccatgttgacctccactgcagacaccccactctgtctacagtgtaagcccctgaagtataaggtggtccgggaccctcctctccagatggatgtggcctccatcctacatctcaataggaaattcgtagacatggatctaaatcttggcagtgtgtaccagtattgggtcataactatttcaggaactgaagagagtgagccatcacctgctgtcacatacatccatggaagtgggtactgtggcgatggcattatacaaaaagaccaaggtgaacaatgcgacgacatgaataagatcaatggtgatggctgctcccttttctgccgacaagaagtctccttcaattgtattgatgaacccagccggtgctatttccatgatggtgatggggtatgtgaggagtttgaacaaaaaaccagcattaaggactgtggtgtctacacgccccagggattcctggatcagtgggcatccaatgcttcagtatctcatcaagaccagcaatgcccaggctgggtcatcatcggacagccagcagcatcccaggtgtgtcgaaccaaggtgatagatctcagtgaaggcatttcccagcatgcctggtacccttgcaccatcagctacccatattcccagctggctcagaccactttttggctccgggcgtatttttctcaaccaatggttgccgcagctgtcattgtccacctggtgacggatgggacatattatggggaccaaaagcaggagaccatcagcgtgcagctgcttgataccaaagatcagagccacgatctaggcctccatgtcctgagctgcaggaacaatcccctgattatccctgtggtccatgacctcagccagcccttctaccacagccaggcggtacgtgtgagcttcagttcgcccctggtcgccatctcgggggtggccctccgttccttcgacaactttgaccccgtcaccctgagcagctgccagagaggggagacctacagccctgccgagcagagctgcgtgcacttcgcatgtgagaaaactgactgtccagagctggctgtggagaatgcttatctcaattgctccagcagcgaccgctaccacggtgcccagtgtactgtgagctgccggacaggctacgtgctccagatacggcgggatgatgagctgatcaagagccagacgggacccagcgtcacagtgacctgtacagagggcaagtggaataagcaggtggcctgtgagccagtcgactgcagcatcccagatcaccatcaagtctatgctgcctccttctcctgccctgagggcaccacctttggcagtcaatgttccttccagtgccgtcaccctgcacaattgaaaggcaacaacagcctcctgacctgcatggaggatgggctgtggtccttcccagaggccctgtgtgagctcatgtgcctcgctccaccccctgtgcccaatgcagacctccagaccgcccggtgccgagagaataagcacaaggtgggctccttctgcaaatacaaatgcaagcctggataccatgtgcctggatcctctcggaagtcaaagaaacgggccttcaagactcagtgtacccaggatggcagctggcaggagggagcttgtgttcctgtgacctgtgacccacctccaccaaaattccatgggctctaccagtgtactaatggcttccagttcaacagtgagtgtaggatcaagtgtgaagacagtgatgcctcccagggacttgggagcaatgtcattcattgccggaaagatggcacctggaacggctccttccatgtctgccaggagatgcaaggccagtgctcggttccaaacgagctcaacagcaacctcaaactgcagtgccctgatggctatgccatagggtcggagtgtgtcacctcgtgcctggaccacaacagcgagtccatcatcctgccaatgaacgtgaccgtgcgtgacatcccccactggctgaaccccacacgggtagagagagttgtctgcactgctggtctcaagtggtatcctcaccctgctctgattcactgtgtcaaaggctgtgagcccttcatgggagacaattattgtgatgccatcaacaaccgagccttttgcaactatgacggtggggattgctgcacctccacagtgaagaccaaaaaggtcaccccattccctatgtcctgtgacctacaaggtgactgtgcttgtcgggacccccaggcccaagaacacagccggaaagacctccggggatacagccatggctaaggaaggacaagaagttgtcaaagaattcccaacgccaggacccacatccctttggtattgatttcacagtcagctgctcaacggaatggcctctccacaccagggatccttagcacccaaccggtctgcctttaattttacccaggaaggactcacattggggcgaatgaaccaagtttcgccatgctggatgatgaaatggattcccatcccaaagtctgagatggattgcatatacagtgtgcagtcccagagcctcctaaaattctagccatttgtcacacaaccacagcaagaaacgtgttctatatctagagtgtgcccatctgtgtttagtacacatgcatgcatacacacccatacaaacatctgtgtgagggcagttctggagatgagcagagagagaccggaataaactcaatcttttctttcccaagctcctagccaacactatccttgggagaaagaaatttgcagaaactgctaagaccaagtgtggagatgtcaagctagttcacactctgaggctcagaatatgtaggacatgcacaattgtgcagtcctttgggattggaagtgaaacagtctgtgatcccctaccttctagggaactaggacctaggaagaggtaaagattatcaggtatgcaaagcgccccaattcttctgctgccatgggggattttaccccaactccagggttcgaggccaatctgagaatggcttaggattgcaatgtcaaggtattatatcagccccttgcttgaggcttgaggtcataatatccctctaggacttacctgttcccccagatcttgccttgggaccacatttgctgctacttttcctgctgctctatcctatacattgaataatccaagatggtagaactaggttaggaaaaattccacacaaccaaacagtctgccttaaaagtgacccacatttttccatagctcctcactttttagcccttctgcaagagaaaaaccctcatgggtccacatggtgagaagttaagtttcctgtaagtgggcctctcaccctggaaaggagttgagggacatcagatgctggaaccctcactgaaagtccagaatgtctaagccagtgttagattttgtaaacaagtggaacagtgttaaatttctatgatgttggagccatccagagactactggaattgtcgagacttttggattattatccttatccttatcctaatcttcctagcccttcaggctagagtaggcttcgatcctgagaaccttgctgttgctctgaggagatataattctgggagaaagaatcttttataagaacagtacagattgttctcaagagggccatcagaaggaagccaaagagttcacagcctcagcaccaacaactcaacatggtcatcatgttttctatatggtttttccagctagcagtactcccttccatacctgtgactgggcagtgctttttctctctcccatgtctagcctnccaaagttaagtgaaaaataatcaactgcccgtggaaacccccaaccatttgggggatc

SEQ ID NO: 9700 - DNA, 4233 bp, Homo sapiens
  misc_feature 1, 2, 3, 4, 5, 6, 7, 8, 9, 267, 383, 402, 405, 408, 414,609, 4230, 4231, 4232, 4233: n = A,T,C or G
nnnnnnnnnagagcggcgctgggacccatgcggccgtgacccctggctccctagaggcccagcgcagcgcagcggacaaaggagcatgtccgcgccggggaaggcccgtcctccggccgccataaggctccggtcgccgctgggcccgcgccgcgctcctgcccgcccgggctccggggcggcccgctaggccagtgcgccgccgctcgccccgcagccccggcccgcagcatggagccacccggacgccggcggggccgcgcgcancgccgctgttgctgccgctctcgctgttagcgctgctcgcgctgctgggaggcggcggcggcggcggcgccgggcgctgcccgccggctgcaacacgatgggcggccccgaggggntggcagggcggcgggcgcncgnagnggcaangtggtgtgcagcagcctggaactcgcgcaggtcctgcccccagatactctgcccaaccgcacggtcaccctgattctgagttacaataagatatccgagctgaagaatggctcattttctgggttaagtctccttgaaagattggacctccgaaacaatcttattagtagtatagatccaggtgccttctggggnctgtcatctctaaaaagattggatctgacaaacaatcgaataggatgtctgaatgcagacatatttcgaggactcaccaatctggttcggctaaacctttcggggaatttgttttcttcattatctcaaggaacttttgattatcttgcgtcattacggtcttttggaattccagactgagtatcttttgtgtgactgtaacatactgtggatgcatcgctgggtaaaggagaagaacatcacggtacgggataccaggtgtgtttatcctaagtcactgcaggcccaaccagtcacaggcgtgaagcaggagctgttgacatgcgaccctccgcttgaattgccgtctttctacatgactccatctcatcgccaagttgtgtttgaaggagacagccttcctttccagtgcatggcttcatatattgatcaggacatgcaagtgttgtggtatcaggatgggagaatagttgaaaccgatgaatcgcaaggtatttttgttgaaaagaacatgattcacaactgctccttgattgcaagtgccctaaccatttctaatattcaggctggatctactggaaattggggctgtcatgtccagaccaaacgtgggaataatacgaggactgtggatattgtggtattagagagttctgcacagtactgtccgccagagagggtggtaaacaacaaaggtgacttcagatggcccagaacattggcaggcattactgcatatctgcagtgtacgcggaacacccatggcagtgggatatatcccggaaacccacaggatgagagaaaagcttggcgcagatgtgatagaggtggcttttgggcagatgatgattattctcgctgtcagtatgcaaatgatgtcactagagttctttatatgtttaatcagatgcccctcaatcttaccaatgccgtggcaacagctcgacagttactggcttacactgtggaagcagccaacttttctgacaaaatggatgttatatttgtggcagaaatgattgaaaaatttggaagatttaccaaggaggaaaaatcaaaagagctaggtgacgtgatggttgacattgcaagtaacatcatgttggctgatgaacgtgtcctgtggctggcgcagagggaagctaaagcctgcagtaggattgtgcagtgtcttcagcgcattgctacctaccggctagccggtggagctcacgtttattcaacatattcacccaatattgctctggaagcttatgtcatcaagtctactggcttcacggggatgacctgtaccgtgttccagaaagtggcagcctctgatcgtacaggactttcggattatgggaggcgggatccagagggaaacctggataagcagctgagctttaagtgcaatgtttcaaatacattttcgagtctggcactaaagaatactattgtggaggcttctattcagcttcctccttcccttttctcaccaaagcaaaaaagagaactcagaccaactgatgactctctttacaagcttcaactcattgcattccgcaatggaaagctttttccagccactggaaattcaacaaatttggctgatgatggaaaacgacgtactgtggttacccctgtgattctcaccaaaatagatggtgtgaatgtagatacccaccacatccctgttaatgtgacactgcgtcgaattgcacatggagcagatgctgttgcagcccggtgggatttcgatttgctgaacggacaaggaggctggaagtcagatgggtgccatatactctattcagatgaaaatatcactacgattcagtgctactcccttagtaactatgcagttttaatggatttgacgggatctgaactatacacccaggcggccagcctcctgcatcctgtggtttatactaccgctatcattctcctcttatgtctcttagccgtcattgtcagttacatataccatcacagtttgattagaatcagcctcaagagctggcacatgcttgtgaacttgtgctttcatattttcctaacctgtgtggtctttgtgggaggaataacccagactaggaatgccagcatctgccaagcagttgggataattcttcactattccacccttgccacagtactatgggtaggagtgacagctcgaaatatctacaaacaagtcactaaaaaagctaaaagatgccaggatcctgatgaaccaccacctccaccaagaccaatgctcagattttacctgattggtggtggtatccccatcattgtttgcggcataactgcagcagcgaacattaagaattacggcagtcggccaaacgcaccctattgctggatggcatgggaaccctccttgggagccttctatgggccagccagcttcatcacttttgtaaactgcatgtactttctgagcatatttattcagttgaaaagacaccctgagcgcaaatatgagcttaaggagcccacggaggagcaacagagattggcagccaatgaaaatggcgaaataaatcatcaggattcaatgtctttgtctctgatttctacatcagccttggaaaatgagcacacttttcattctcagctcttgggggccagccttactttgctcttatatgttgcactgtggatgtttggggctttggctgtttctttgtattaccctttggacttggtttttagcttcgtttttggagccacaagtttaagcttcagtgcgttcttcgtggtccaccattgtgttaatagggaggatgttagacttgcgtggatcatgacttgctgcccaggacggagctcgtattcagtgcaagtcaacgtccagccccccaactctaatgggacgaatggagaggcacccaaatgccccaatagcagtgcggagtcttcatgcacaaacaaaagtgcttcaagcttcaaaaattcctcccagggctgcaaattaacaaacttgcaggcggctgcagctcagtgccatgccaattctttacctttgaactccacccctcagcttgataatagtctgacagaacattcaatggacaatgatattaaaatgcacgtggcgcctttagaagttcagtttcgaacaaatgtgcactcaagccgccaccataaaaacagaagtaaaggacaccgggcaagccgactcacagtcctgagagaatatgcctacgatgtcccaacgagcgtggaaggaagcgtgcagaacggcttacctaaaagccggctgggcaataacgaaggacactcgaggagccgaagagcttatttagcctacagagagagacagtacaacccaccccagcaagacagcagcgatgcttgtagcacacttcccaaaagtagcagaaattttgaaaagccagtttcaaccactagtaaaaaagatgcgttaaggaagccagctgtggttgaacttgaaaatcagaaaatctttggctcaattggctcgaatggccataagcatggcggggccttgtcgccgtccgtccgtggctgttgggccacaccgggcatggggtccgcgaattaccgggcctctcggtggtaaggtgccggcgaatggagtcggtttccccggcggcccctcacttcgcnnnn

SEQ ID NO: 9701 - DNA, 1914 bp, Homo sapiens
  misc_feature 1, 2, 1912, 1913, 1914: n = A,T,C or G
nnacgtttggtggcggtagttggtttggtgttctgtgttgttgtcgcgctttcgtcctgatgttgtgctgtgctggtttcggggtcgtttgtttgctcggattggtgcggggtgtgtctagttgttgcgtctgtgttggtttcgctcggtctacgcgccgtgccagtgttggtaggcttgtggcgatggcctgtatccgtgttggaggctcatatgtgtgatgatatgtgtgaccccgtggagtatgttccccgtgacactacgtgtagctctgatggtggtggtgatattgtttcagtatgacctcgccctgtgtgaacattctgacaagtcgtttgatagtatgtatgctggaagagaataataatcactttcttccacctgttgaatctttaaaacgtggtttgtgctaatgatgaggagtgtatctcgtgtccacacattgtaagacctcatgactgtgcaagatcatggttatatgaaagttattttctgaatagctggatccatcaccttcaagctaatactttaaacagcatggttcataatagatattttctagaaaaattcactctaggatcattttctttgtttatttccatctaatctggctttgctgagaaaatcagcaaggatgctgtaatctgtggtgttaatttattaggtgcaccatgataactcaacattgtttgaaaagaattcagtcaacacatgtactaggttggtagtaaatagtaaagaaagagaaggtaattcacaccagatgaggaatggtgtgaacactaacctaaacaccaaccttattaagtagttttgcactagaagaaaggaaggaattaaagaaggataaagttgctttaaaaatgagataaactattcattgatttcttgataagagatgtgttctggccttctttgcttatgatctaactattcagctatctaactatgcttttatagctacaatcagttcaagtagtagaatacaaactccatgagggtaatgtctatatgctattgatttcttaaaactaacttcctaatctctattgttggttatgtcaacatttatcaaatgaactattaatagagtcttcatcatctttgccaagtaataggtaatgctcattgaaaagctggtaccctttgcctccttttgtggggagatatctggaaaatagctgaacaaactctacatgtggcaaaacaaagtgacagttgttataaaatgtccactaaaattacctgctagcattactacgtataactgaagtttttgcatatccgcataagaagaaatccacattacaaggaaaagtactttgatcattttagagtcaagacatgaaataagggatttctctaacccttaactcttctgctggcttacttggtacctctgatgaatatttattgctctaaatgttttagaaactatcactctttgaaagtgaacaaacactgttttctgctgaaaattcatctttcccaatcataaggggaaaccaaatatgcaacttgaaaaaaaaaaaaggaaacagaatatagtgactgagcactgagtgggattgaagaaaataaatgagcttattttggcagctgctttcatagcacaattccccaaaagcagaactgaaactgcagctttaataaaaagctccaacaattcttttgactaagatatactcattaattgcctccaagtgttcaagactgcttggatttgaggcaagcaagaccacttgcttaggtaaattttatgaagcaacaaaactaatacggtgaagaattttaacccaaggtgtaacttaggtttcccatgtcttcaagagagctgacattgcatgttaccatctagctgatgttacgctctgctttcttgctactgcctgcctctgcctctgccgcgaannn

SEQ ID NO: 9702 - DNA, 329 bp, Homo sapiens
  misc_feature 329: n = A,T,C or G
aacttcggcgccacccaatcgctcacctggaacggcttgcggatcaaccgttgctgcgatgccagatccactttgtcctgcaacttggcgaggaacaccgggtcgagggtcgacgggaaaatctcgctgagtttctggtctttcaaatcattggtcaggatcaccggtggataactcgccagccccgacaccaactggatgtaggcctgcttgttgttgtcatcggtcagccattgcaccgcttgctgctgcgccttgagcaacgtggccacggcttcaggatgctcatcgacaaacttgccgctgcccaccagcacactctggatacn

SEQ ID NO: 9703 - DNA, 1644 bp, Homo sapiens
  misc_feature 1, 2, 3, 4, 5: n = A,T,C or G
nnnnncatcctttacgggtgaacaacgggctcccgccccaaatggaaacccaagggccagcgtattaagggcgcgaaccgttatggccgcgtgggggcactgaaggcgtagttttagaagatggaagaaatacctccgggcatcataatattccaggtaatatcctgtacctccagttataaaccaatataataataataacacgtacaaaataacatcataaataacataaatgagaagttttcaagtatttcaatgtgccttgaaaagtttcaaacagtaattctcacaattggttagacaatcatttttttttcttttcttttcctctcatttagtctcagagcctaaaaagaaatgcctccagtctctgttagccccgatgtttggaatgaaattaacaagattctaccttaaaagagaaaacttatgtgggcttttcaaattgtgaaaatttgttccctcttataaaatataatctttcccctgctgctggtttataaatatgggcatatagcccagagccattataaagaaaaaacaaccaaccacaataaactaaggagcctcatctgatggctaaggttctcaggaaaaaatgagaagagcaccttgatcaggaaaggaaaaaaggatagaggataaaaacagtaacctttaacttctatgccctcactcagccagtaacttacggcaggtgttgctggcaaggccttagctgtatttcttcattaagttgaacatcctgtctgccaactccataccaacccagctgctaataagcatgccctgagcacccaggaaaagaagggaaggctggcagcttaggagctcaaaagtgccatcagagaaaaccagctcaagggagctaaggtatttgctccttagaatagtgctcaaggtggaggctgtcagtggtcaaatcaagcatgaagttccttggatgcttctccagcaagatccatggaattttacaaaaccaactttccacaggttagcatttctttcttagcctacatggcagttagttcattttgccctgttcaaatgtagtatgaaagaacagagatcaaaacacccatgtaagtacatacacatactctagttatgagcacctagggtctttcccatcactcttgcaaaagtgtgtgtgtgtgtgtgtgtatacatacactcacacatacatatgtatacacagacatctatatacagaaataatgtatatgtgtgtctaatgtatatataatatatacacatagacatacacacaagcacatatcatagctcaacctcatctaaacatctagagtctggagaacgtgctggccaacagaatacatgtgcatgtggatgtcatgtgacatgcactaaccaaccatcccgaggtaaaactgttgggaggaggaaactgccaacaatctttgaaaatccagacctaccaggccattatttagatatttgctcccatggaaccctcaaagaaacttaggaaaattggactggaatggggtcccaccctgatgaacactcaaacaccaaaagctatatctagtttatgcgtagaagtgactcacacatggcaggcaacatgaatattaagctacaatgtggataaagcactggagcttaatacagatcaatatt

SEQ ID NO: 9704 - DNA, 2512 bp, Homo sapiens
  misc_feature 1, 2, 3, 4, 2512: n = A,T,C or G
nnnnctaagctcttataatagtcttcggttactacatctcattagatatcacaatgcttctctctcacacacgttctatatttatcctcccttttggggttgtatctttgttaaacattattttcttcaaagttactatatatagtttattctctcttgtatttttcccacatctcctcttttgctaaacacttgttatataactatgtcactcaacaatactttttctaagatcccttcttatgttacctcaaccacttttaattacctttaatgtactaatagacattcagttcaactgccatgcagtctgcctgtcattgccaatgaagtcctcaactgtttaatattttgaactaatattatttataatctatgaatttaatcttttttgaaagactttaataatttgagtctctgagaggatactttcaatttccatgggggacttatttgttggggatcttaaataagattccttttgatctaccggaatatacatgtacagagtacattggatcatgttggaaagaaggcaagtgaaaaggtcagagatgaagtagcgaagttatggaatatcgtggaaaggatactagttgtgaaatggaaagagacaagttatagtaccccaaaagcaaaacaagcaggagatgcaagagatgccccaaaaggacaaagcaacaattttctgttgccacctttataccggaagactctgttgtagaagaaaagaaggctttggtgcaccttatgtgggaggaggaggggcagggcatgctgatgctgagcgtacaggcagacaagagcgtagcctgctgttgcctccatcactatgaaatgacttattttacctgaaggacccatggtttatgttcctctaattcctttcactctccctaagccctctgagagagatgaagatagatgattttattgctactaaattgaagggagcactatttctttttgtcttttgttagcaaaaaattgcaaaaagaattgtacattcttgctaaaaataaataaataaataaaaaattaaaaaaacaagggacctaacaaaactcagcagtgttactgtattttttaaaaatatttttatagactcattttcaggttattaaatgtaagagaaacagatacccctcttttttaaagtaggtaaatcattgatgatttatattaccaatttttagaagtaattttctagtaagcttgtggcatcagaaaatactagaagatttttttagttaaattagttagaacatttatgaatgaatataataaatattttttcagaataaaatatggaccctttgtgtttactaatagataaagccagatataattttttgtttttaaggccacaaaatatggcctttgttaaagaacactaaagttagaaatctaaagttagagcaactttttaatggctatttcctattattgtaagtgttaaaacccctgcagaattcttgataaggtgctatttatactatatttcttattataagataactgtctttagtcttcttagtactagtctttttagtactaaatcaatcagcaaacatcatcatttcaccccaaaattttgtccagaaaagggttcactgaaaattttcagagatcttctttcaagatattttttccggatgaaacttgggtgggcactctgcgaccatgggctgaggacaatgtaacgggcacgatatatagaggagctttgcacacataggacgattttgtgtcgttctctcctcatataagaactgcatcattatataacacatacttctcgaggcacaccaacacgtcaagagatacaacaaagcaaacacaaatatacaaaaaagaaggaagaagcaaggagagagagcagaggccgcaggaacgaaagcaaacagagagaaagagagaggagcacgaggagagaagaacaacaagggagacgcgagacagcgggaggaaagagcaaggagagagagaaggaagaggacgagaggagggcaaaaggacagggcgcgagaggccaaagggagcgaagaagggaagaggagaagagagggaaggagagagagacaacggcgcgagggagcgagaagagagcacagagagagggaggggaaagacgaagcgaggtagaaaaacagggagcggcggacgaaagagagcagagccggcggcagagaaaccacacgcggaaaaggcggacgagagaagcaagaaacagcaatggcaaacagaatcacggacaagaggaaggggaaagacagagaagaacagaacagcggacgagagagaaacgagagaaagaagagagggcgagacgagaataacgacggaaagagagaagagcgggaagagacggaagggagcaaggcagggaagacagggcgaacaagggaggagaacaaggagcggcaagaagagccgaccgccaccacgcacacaacagaaaaggaccaagaaaaccggcacacacgccaacgggcacggagaagcgaacgan

SEQ ID NO: 9705 - DNA, 2244 bp, Homo sapiens
aagtcattttccatgatagttctctgcttaattccctttacagcacgtttttatcagaaacagtatggcaattttatgtgtggtcggcctgctagaatgttagaaagctccaggggagcaaggatcacgcacgctgcctactcataagatcccctaacacattgcaggtacctgatgaatgtcgccgaatgactgaatgagccaatgctgaaatttacttcaattcctctctccacagattcctagagattatgagactagtgctgggcttgcattcctcaaatggccagcaccaaatgggccaatctctcctactgctcgccctcccactgtgtagaagagtattttttttttttttttgattttttaggagcttttattgttttagtaatcttaacataacttaaaataagagaggggaaatgacatctggagatctaggtatgtggcccattgcaattgagcacatttcttgggtctgtttctctatctctaagggcagtctcaaaaccccagctcaaaatacgacactaacatgatgaacatgcatgagctttgaaaagtgctctgtagtcttatgatgatctagaagagcactgtccaatagaactttctgtgatgatgaaaagattctacttctgacctattcaatagggtaaccactaatcatgcatggctctcaagcacttgaaatgttgctagtgtgattggggagctgcgttttgaatgttaactaatttaaatttaaatcttaaaaagttacatgtgggtagtggctgccgtacggaacagtacagcactagaataatgctgtgtcctcctgttacacatactcatggtctctcctactctcccttcatcacacctgtgacatcttgcaatttatatttgattgtgtcattatctaatgtattcctcctggactctaagctccaaatgaacaaatgctttgtctactttgccataactgtgtccccagtgcttggcatgggacctggtgcagagtaaatacatcataaatattttgtgaatgaatgaatgaatgaatgaccatgattaataaaaggatatagctgctcagtctggtgctgataatggtggtagtgatcaaaagggttaaaccacaggtcattaaatgaaaacagctaacttagtgcttacaggaaccatacactccctgtgtataaacatgccggtgtgtgtgtacaggtgtgtgtgtgcaaaagcataatgtgtttgcaaaggtttgcatttgtgtagtcatgtgtagacatgtatgctcatgtgtttttgtgtcaggataataaggtgactaagactaagacacatgcaaatcacccaggaaggcagtttctaagtcattactttttattttgaaggatttgtgaaactcttcacatcatggtgagagtttgtatgattaataagatgtgaagagtttcacaaatctttcaaaataaaaagtaatgacttagaaactgccttcctgggtgatttgcatgtgtcttagtcttagtcaccttattatcctgacacaaaaacacataagcatacatgtctacacatgactacacaaatgcaaacctttgcaaacacattattatgcttttgcacacacacacctgtacacacacaccggcatgtttatacacagggagtgtatggttcctgtaagcactaagttagctgttttcatttaatgacctgtggtttaacccttttgatcactaccaccattatcagcaccagactgagcagctatatccttttattaatcatggtcattcattcattcattcattcacaaaatatgtatgatgtatttactctgcaccaggtcccatgccaagcactggggacacagttatggcaaagtagacaaagcattgttcattggagcttagagtccaggaggaatacattagataatgaacaatcaaatataaattgcaagatgtcacaggtgtgatgatgggagagtaggagagtccttgtgtatgtgtaacaggaggacacagcattagtctagtgctgtactgttccgtaccggcagccacgacccacatgtaactttctacagatttacactttacacttagttaacattcaaaacgcagctccccaatcacactagcaacatttcaagtgcttagagagccatgcatgatatagtggttaccctatttgactaggtcagaagtagcatcttttcatcattcacagacagttctatttggacagtgc

SEQ ID NO: 9706 - DNA, 1757 bp, Homo sapiens
  misc_feature 1, 2, 1753, 1754, 1755, 1756, 1757: n = A,T,C or G
nncgggattgttcacgacagcgtggtttgtcccccgcgcctttttttaattgggtgaggaaacccgcgaccttttcttgcccgcggtttttcttttggggacactcgttttggaccccggtgtcaccgctatacatcatctgggggccccgccgcgcccacaacggaaatgggttctttgagaaagctcttttctccagggggccgaagggcgcgcccgcaacatttgttcatttttgttgtttttttttttttttttttgcagacaaagtaaaatttattgagacagacagaaatgcacctactcaggactacagttaagcatttactattaaccaaagagttgtgttcacattccagataagtctacgtggaaaagcattcagaatttactaggtttttgctacatcactatttcatctacaatagggacaacaaactgacactcaggatttgatgggctctcattacaatgctatacatttaacaggaacaaacatcagtgactttgagaaaaagttataaaaagaccaaaaccacccactgtagaatgggctcttggatgttactgtacagcgtggtcaaggtaacaagaagaaaaaaatgtgagtggcatcctgggatgagcagggggacagacctggacagacacgttgtcatttgctgctgtgggtaggaaaatgggcgtaaaggaggagaaacagatacaaaatctccaactcagtattaaggtattctcatgcctagaatattggtagaaacaagaatacattcatatggcaaataactaaccatggtggaacaaaattctgggatttaagttggataccaaggaaattgtattaaaagagctgttcatggaataagaataaaactgttcattaagaacttttcaaaagtgaattagtgaggattcagcttaatacctgtatcaaatgaggaagtggtttattacaatatttttataatcagtattttatgtgtacttggtcactatacaagtgacttcttgtcactggtacaagtggactttttggaggactatttccaagaagaagaaagcaaacattctacttctaaggataaggtaactcattacaatctttagtactcatggaaagtattaaagatctttaaaaaaatcgaatgctgtcatgtcaaagtgaggcatgaaaagtattattaatgtggctccatcgatttgggggttccaatctgaggagggctttttatttaatgttttaatgaatcaaaatatcttcttagaatgtctctgaaaatggcatctcattaccttactgggaactgtctgttgagcactcttctccatcattaagttaatgctaaggatctttaagtgtcatcttaatttgatacttgtcataagataattaggcaaattaaaatcagtggttcaccctgttcctagaagtttttctaagtgaaatcaatttttcaattttaatttgttctcttgtacattttcctaagctcaaaggagatagtaacaatggttttctttgatgatctaaagtgagattttacaatgtcgtgatttttaatatacttcatagtaattttattgcaattaagcacctgttttctaaattatctcagttttgttcaagagagaaaaaaaatattgaaacaaaggtgatggagttgagatcccaaaacagagtttgcctatggtctgtcttcctatggggaaagtaagtacaaaacctcagggttatttacgaagccaaaggacnnnnn

SEQ ID NO: 9707 - DNA, 5443 bp, Homo sapiens
  misc_feature 5422, 5423, 5424, 5425, 5426, 5427, 5428, 5429, 5430, 5431,5432, 5433, 5434, 5435, 5436, 5437, 5438, 5439, 5440, 5441,5442, 5443: n = A,T,C or G
ggagtcgacccacgcgtccgatggaattaattctggctccacttgttgctcggcccaggttggggagaggacggagggtggccgcagcgggttcctgagtgaattacccaggagggactgagcacagcaccaactagagaggggtcagggggtgcgggactcgagcgagcaggaaggaggcagcgcctggcaccagggctttgactcaacagaattgagacacgtttgtaatcgctggcgtgccccgcgcacaggatcccagcgaaatcagatttcctggtgaggttgcgtgggtggattaatttggaaaaagaaactgcctatatcttgccatcaaaaaactcacggaggagaagcgcagtcaatcaacagtaaacttaagagaccccggatgcttccgttgtttaaacttgtatgcttgaaaattatctgagaggcaataaacatctgctcctttcttccctctccagaagtccattggaatattaagcccaggagttgctttggggatggctggaagtgcaatgtcttccaagttcttcctagtggctttggccatatttttctccttcgcccaggttgtaattgaagccaattcttggtggtcgctaggtatgaataaccctgttcagatgtcagaagtatatattataggagcacagcctctctgcagccaactggcaggactttctcaaggacagaagaaactgtgccacttgtatcaggaccacatgcagtacatcggagaaggcgcgaagacaggcatcaaagaatgccagtatcaattccgacatcgaaggtggaactgcagcactgtggataacacctctgtttttggcagggtgatgcagataggcagccgcgagacggccttcacatacgcggtgagcgcagcaggggtggtgaacgccatgagccgggcgtgccgcgagggcgagctgtccacctgcggctgcagccgcgccgcgcgccccaaggacctgccgcgggactggctctggggcggctgcggcgacaacatcgactatggctaccgctttgccaaggagttcgtggacgcccgcgagcgggagcgcatccacgccaagggctcctacgagagtgctcgcatcctcatgaacctgcacaacaacgaggccggccgcaggacggtgtacaacctggctgatgtggcctgcaagtgccatggggtgtccggctcatgtagcctgaagacatgctggctgcagctggcagacttccgcaaggtgggtgatgccctgaaggagaagtacgacagcgcggcggccatgcggctcaacagccggggcaagttggtacaggtcaacagccgcttcaactcgcccaccacacaagacctggtctacatcgaccccagccctgactactgcgtgcgcaatgagagcaccggctcgctgggcacgcagggccgcctgtgcaacaagacgtcggagggcatggatggctgcgagctcatgtgctgcggccgtgggtacgaccagttcaagaccgtgcagacggagcgctgccactgcaagttccactggtgctgctacgtcaagtgcaagaagtgcacggagatcgtggaccagtttgtgtgcaagtagtgggtgccacccagcactcagccccgctcccaggacccgcttatttatagaaagtacagtgattctggtttttggtttttagaaatattttttatttttccccaagaattgcaaccggaaccattttttttcctgttaccatctaagaactctgtggtttattattaatattataattattatttggcaataatgggggtgggaaccaagaaaaatatttattttgtggatctttgaaaaggtaatacaagacttcttttgatagtatagaatgaaggggaaataacacataccctaacttagctgtgtggacatggtacacatccagaaggtaaagaaatacattttctttttctcaaatatgccatcatatgggatgggtaggttccagttgaaagagggtggtagaaatctattcacaattcagcttctatgaccaaaatgagttgtaaattctctggtgcaagataaaaggtcttgggaaaacaaaacaaaacaaaacaaacctcccttccccagcagggctgctagcttgctttctgcattttcaaaatgataatttacaatggaaggacaagaatgtcatattctcaaggaaaaaaggtatatcacatgtctcattctcctcaaatattccatttgcagacagaccgtcatattctaatagctcatgaaatttgggcagcagggaggaaagtccccagaaattaaaaaatttaaaactcttatgtcaagatgttgatttgaagctgttataagaattaggattccagattgtaaaaagatccccaaatgattctggacactagatttttttgtttggggaggttggcttgaacataaatgaaaatatcctgttattttcttagggatacttggttagtaaattataatagtaaaaataatacatgaatcccattcacaggttctcagcccaagcaacaaggtaattgcgtgccattcagcactgcaccagagcagacaacctatttgaggaaaaacagtgaaatccaccttcctcttcacactgagccctctctgattcctccgtgttgtgatgtgatgctggccacgtttccaaacggcagctccactgggtcccctttggttgtaggacaggaaatgaaacattaggagctctgcttggaaaacagttcactacttagggatttttgtttcctaaaacttttattttgaggagcagtagttttctatgttttaatgacagaacttggctaatggaattcacagaggtgttgcagcgtatcactgttatgatcctgtgtttagattatccactcatgcttctcctattgtactgcaggtgtaccttaaaactgttcccagtgtacttgaacagttgcatttataaggggggaaatgtggtttaatggtgcctgatatctcaaagtcttttgtacataacatatatatatatatacatatatataaatataaatataaatatatctcattgcagccagtgatttagatttacagtttactctggggttatttctctgtctagagcattgttgtccttcactgcagtccagttgggattattccaaaagttttttgagtcttgagcttgggctgtggccctgctgtgatcataccttgagcacgacgaagcaaccttgtttctgaggaagcttgagttctgactcactgaaatgcgtgttgggttgaagatatcttttttcttttctgcctcacccctttgtctccaacctccatttctgttcactttgtggagagggcattacttgttcgttatagacatggacgttaagagatattcaaaactcagaagcatcagcaatgtttctcttttcttagttcattctgcagaatggaaacccatgcctattagaaatgacagtacttattaattgagtccctaaggaatattcagcccactacatagatagcttttttttttttttttttaataaggacacctctttccaaacagtgccatcaaatatgttcttatctcagacttacgttggtttaaaagtttggaaagatacacatcttttcatacccccccttaggcaggttggggctttcatatcacctcagccaactgggggctcttaaatttattgcataatggatatccacatcagccaactgtggctctttaatttattgcataatgatattcacatcccctcagttgcagtgaattgtgagcaaaagatcttgaaagcaaaaagcactaattagtttaaaatgtcacttttttggtttttattatacaaaaaccatgaagtactttttttatttgctaaatcagattgttcctttttagtgactcatgtttatgaagagagttgagtttaacaatcctagcttttaaaagaaactatttaatgtaaaatattctacatgtcattcagatattatgtatatcttctagcctttattctgtacttttaatgtacatatttctgtcttgcgtgatttgtatatttcactggtttaaaaaacaaacatcgaaaggcttatgccaaatggaagatagaatataaaataaaacgttacttgtatattggtaagtggtttcaattgtccttcagataattcatgtggagatttttggagaaaccatgacggatagtttaggatgactacatgtcaaagtaataaaagagtggtgaattttaccaaaaccaagctatttggaagcttcaaaaggtttctatatgtaatggaacaaaaggggaattctcttttcctatatatgttccttacaaaaaaaaaaaaaaagaaatcaagcagatggcttaaagctggttataggattgctcacattcttttagcattatgcatgtaacttaattgttttagagcgtgttgctgttgtaacatcccagagaagaatgaaaactggttggaaactaaaggttcattgtgttaagtgcaattaatacaagttattgtgcttttcaaaaatgtacacggaaatctggacagtgctgcacagattgatacattagcctttgctttttctctttccggataaccttgtaacatattgaaaccttttaaggatgccaagaatgcattattccacaaaaaaacagcagaccaacatatagagtgtttaaaatagcatttctgggcaaattcaaactcttgtggttctaggactcacatctgtttcagtttttcctcagttgtatattgaccagtgttctttattgcaaaaacatatacccgatttagcagtgtcagcgtattttttcttctcatcctggagcgtattcaagatcttcccaatacaagaaaattaataaaaaatttatatataggcagcagcaaaagagccatgttcaaaatagtcattatgggctcaaatagaaagaagacttttaagttttaatccagtttatctgttgagttctgtgagctactgacctcctgagactggcactgtgtaagttttagttgcctaccctagctcttttctcgtacaattttgccaataccaagtttcacatctggtgttttacaaaaacatttattcaagccactagaattattcaaatatgaggctatagcagagtaaataactctgaataagagacccggtactagcctaaatccaagagatcggttaggccgcatcagtccaccaacccttagtggggcccaatattatgagaggacagaacaaggggtttaattgaggacctgtttttatggaaatagggccaggggcaggttctaaaatacatggccggggcgcactctacacaatgtattttaaaacgaacaagcatacccccggggggggagaaacnnnnnnnnnnnnnnnnnnnnnn

SEQ ID NO: 9708 - DNA, 1957 bp, Homo sapiens
  misc_feature 1, 2, 3, 4, 5, 6, 7, 8, 1947, 1948, 1949, 1950, 1951, 1952,1953, 1954, 1955, 1956, 1957: n = A,T,C or G
nnnnnnnnctggtacggtccggaattcccgggatcctgcgcgaccagtgtcgcctgccctccttccgcacagcccgggtttccgcttccctccgggcgcgagaagaggggagccaggccgagccccggccctaccgccgccgccgccatgtggcccccagaccccgaccccgacccggaccccgagcctgccggcggctcccgtcccggccccgcggtccccgggctccgcgccctgctgccggcgcgggctttcctctgctctctcaaaggccgcctcctgctggccgagtcgggtctctcattcatcacttttatctgctatgtggcgtcctcagcatctgccttcctcacagcgcctctgctggagttcctgctggccttgtacttcctctttgctgatgccatgcagctgaatgacaagtggcagggcttgtgctggcccatgatggacttcctgcgctgtgtcaccgcggccctcatctactttgctatctccatcacggccatcgccaagtactcggatggggcttccaaagccgctggggtgtttggcttctttgctaccatcgtgtttgcaactgatttctacctgatctttaacgacgtggccaaattcctcaaacaaggggactctgcagatgagaccacagcccacaagacagaagaagagaattccgactcggactctgactgaaggcctggcgggtgccttggcaacctgagccacacaggcctccacccctgcgcctcacaggggtcgctggcgttggagcggaggcctggacttctgagttgcagagggggctgcggacacagcaggccccctacagcctcaggttctgcctgagcccagcctaccaggcttgcccctcagctcagcactgttgaccacgctgcgtatgagggcatcttgggtatcccactccttctccccatttctgtcccacaggccttcagccctttaacgtctctgccaaaaaccagcacaaggagacaaagcagagccttgtctgtatctgggcagcaggtgttccatgctgctaggtggcgggggtcgggggtcttctgtttcactaacaggaacaaagacagaaaccatgacagggctgccccgccaggccccggtgggtttgtctgcacttggtgctcctgcccacaccagccactttggtgacaatgacccttccaagaatctttggttcaaggagcaccagttccctcttcattcttgaagcagggagaaattgacctttgccttgtcgcccaggaagtggggctcggcacccataactaacacctcccacccttggaaaccatgtcttctgggggtgagatgaccattctgggtctaagactgtttcaaagaagagctcatagactgactggtccagaagacagagggtacaacagtggcatcacagtgacagtgtcatggggagctgggcgggcccagccaaaccctccttcttcctagagcccagccagcaggcaggagttcctggaccctcaggacagtgaacttccagacctcagggcaggtctatgggccactgcaggagatgagaccagccttctgtgttcacctaacgatttatactgtgtatctgtctttgatggaattttgtaactttttatatttttttatgcaaaagcagcttcttaacagatggcattttctgtgactctaggcctcacaaaagagccagagttctggacccatgtttggagcatttgtagccttattctcttgcgtgtgaatctcttaccctgaaaaaaagccataatgaattaagccagactgaccacttgcttggagtgtgtgcttgaaaaaaccagagcaatactgttgggtattgtatcaggcttcagtacaaactggtaacaccaatgtggatcctgacagctttcagttttagcaaaaatacacgtgaaatctgactaccannnnnnnnnnn

SEQ ID NO: 9709 - DNA, 3071 bp, Homo sapiens
  misc_feature 1, 2, 3071: n = A,T,C or G
nncggcacatgcgtgccccagagctgaggggcggccgggccagaacggcttgtgtaactttgcaaacgtgccagaaagtttaaaatctctcctccttccttcactccagacactgcccgctctccgggactgccgcgccgctccccgttgccttccaggactgagaaaggggaaagggaagggtgccacgtccgagcagccgccttgactggggaagggtctgaatcccacccttggcattgcttggtggagactgagatacccgtgctccgctcgcctccttggttgaagatttctccttccctcacgtgatttgagccccgtttttattttctgtgagccacgtcctcctcgagcggggtcaatctggcaaaaggagtgatgcgcttcgcctggaccgtgctcctgctcgggcctttgcagctctgcgcgctagtgcactgcgcccctcccgccgccggccaacagcagcccccgcgcgagccgccggcggctccgggcgcctggcgccagcagatccaatgggagaacaacgggcaggtgttcagcttgctgagcctgggctcacagtaccagcctcagcgccgccgggacccgggcgccgccgtccctggtgcagccaacgcctccgcccagcagccccgcactccgatcctgctgatccgcgacaaccgcaccgccgcggcgcgaacgcggacggccggctcatctggagtcaccgctggccgccccaggcccaccgcccgtcactggttccaagctggctactcgacatctagagcccgcgaagctggcgcctcgcgcgcggagaaccagacagcgccgggagaagttcctgcgctcagtaacctgcggccgcccagccgcgtggacggcatggtgggcgacgacccttacaacccctacaagtactctgacgacaacccttattacaactactacgatacttatgaaaggcccagacctgggggcaggtaccggcccggatacggcactggctacttccagtacggtctcccagacctggtggccgacccctactacatccaggcgtccacgtacgtgcagaagatgtccatgtacaacctgagatgcgcggcggaggaaaactgtctggccagtacagcatacagggcagatgtcagagattatgatcacagggtgctgctcagatttccccaaagagtgaaaaaccaagggacatcagatttcttacccagccgaccaagatattcctgggaatggcacagttgtcatcaacattaccacagtatggatgagtttagccactatgacctgcttgatgccaacacccagaggagagtggctgaaggccacaaagcaagtttctgtcttgaagacacatcctgtgactatggctaccacaggcgatttgcatgtactgcacacacacagggattgagtcctggctgttatgatacctatggtgcagacatagactgccagtggattgatattacagatgtaaaacctggaaactatatcctaaaggtcagtgtaaaccccagctacctggttcctgaatctgactataccaacaatgttgtgcgctgtgacattcgctacacaggacatcatgcgtatgcctcaggctgcacaatttcaccgtattagaaggcaaagcaaaactcccaatggataaatcagtgcctggtgttctgaagtgggaaaaaatagactaacttcagtaggatttatgtattttgaaaaagagaacagaaaacaacaaaagaatttttgtttggactgttttcaataacaaagcacataactggattttgaacgcttaagtcatcattacttgggaaatttttaatgtttattatttacatcactttgtgaattaacacagtgtttcaattctgtaattacatatttgactctttcaaagaaatccaaatttctcatgttccttttgaaattgtagtgcaaaatggtcagtattatctaaatgaatgagccaaaatgactttgaactgaaacttttctaaagtgctggaactttagtgaaacataataataatgggtttatatatgtcatagcatagatgaatttagaaacaatgctcctactgtttaaatacatatggacacatctggtgctgagaaagaaacaaacacattaccattggtgtcaagaaatattactatatagcagagaaatggcaatacatgtactcagatagttacatccctatataaaaagtatgtttacatttaaaaaattagtagataacttcctttctttcaagtgcacaatttcattttgacttgagtcaacttttgttttggaacaaattaagtaagggagctgcccaatcctgtctgatatttcttgaggctgccctctatcattttatctttcccatgggcagagatgttgtaagtgggattcttaatatcaccattcttgggactggtatacataaggcagccgtgaaactggaaagtcattttgatgactgatgtgatacatccagaggtaaaatgcatttaaacatattaaagtatttgccaaagatacaattttcttgctgacataaaaatcacacaaacaagtcccccccaaaccacaactgtctctcaaatagcttaaaaaaattgaaaaacattttaggatttttcaagttttctagattttaaaaagatgttcagctattagaggaatgttaaaaattttatattatctagaacacaggaacatcatcctgggttattcaggaatcagtcacacatgtgtgtgtgtctgagatatagtctaaattagcaaagcacatagtattacatacttgaagggttggtgaacaaggaaaaatatactttctgaaaccaggactgggctgggtaagagaacagctgtgaatttatttgaactgtgaacctgtggcctatagaattggaatttgtttacctaattacgaaatggattacttttggttggggctaaaataatttccaataccgttaatccagaaagatcggcaaggtgggataaggccgcggtatgtgaaagagagacaaaatgacccgggaggaggaagaaccaggan

SEQ ID NO: 9710 - DNA, 1990 bp, Homo sapiens
  misc_feature 1: n = A,T,C or G
ngcgccctatttttccttgttgaaaaatacaccaaggtccaacattctcgcttggggcctcgccaccggggtcccaagccgtctttcccgcttaccccctctcttaaaccccccaggccctttgccagaacgggcctacttggccctcggttgctttggcttttttttttttttttttgagatcatctactcaaagtttattggactgaacaaaggctgaatacagagatccaagccatgaggagtacatgaggtgtggtgcctataagccagggtcggaaactttccagacaaacctagatagctctactaggagggagtcaacgacctattgtatcaattagatcccagcctggacaagggcatgactattgctgtttggggacacgtggctctgtgttgaaggcaatgactgtgtggctgttgccatgtggcctgttctcccctaagccctgaaccaaaggttccaggcccagatgagaaggccactgggaatgcatgccataggggttgatgctggacattccccagccttccattaaatgaaaacattttctataaacttactgctttaaaaaaatgttttaaccaacaaacctaagaactgcaaatgagtttggtatagtataaatattgtcaaatataaaattccaagaaacccatttgagactgatctgatgatctgaagttctaactaatctatcaaactttctaagaaaaggcataggtcaagaaatctttttaaagcaaacattattgcttctgctatagcagagtggagatttggctgagctggtaagaacctcagtgaaaaggtgtcttagcaatgaaagggctgaatccgagattcctctagatgaaaaataaggggaatggtcaagtaaattcctggtactggttctttgctgccctgtaatcaatatggcatctcacccccgacaaccaagccagccacagagagaagtggggttcccagggaaaggggtcggctgaccaccctgacggagctggtgagcacaggtgagctctacctcatttgtctctcattcctcaaagtcttctgtggtttggcttcagtgagggcaaaagaggggagactggagtgaaagtgaactctgcttttaaaatgttctttttatctaaggtgtgcagggtgtgtggatagcaagtttgagtggtaagaaaaatcccagtccagggtctgagctctacctcttaaaactcttcagcttaacaaagtgacccacaggaacagacatgaacatctctacacagggcagggccaaaggtgttcccaggatcctgctagccaagggacaagtcctgattgagggtctagagctcagcagatttatggaggcagcatgcaccctgggagcctgcccagactcctctctggggtttccgttttatctctcaagcttttaagatgccaaaaggaaaagcctttaggaggacgctaaggataacttcgttattcttcagttcaaaaggatttgcaagaatatttgtggctcaggacctaaggaacttgctacagggaagtgaggtcagaggtcagctcaatcctctgctcctcctccagctcctctttggtcatcatcttcttgtactggtttcccctcagcttcccggggctgtatttgaaggagaagccttctccgtcctcctcctcaggcccttccgatgatggccccttctcaccatccaagtcctgctcctcttcctgcctcgcctccaccgcctgctcctccgcctccgctggcgccgccgcgggatcccctggcccttcgggctcccccggtcccgcaggctccccgagctcccccagccccgcgggctctccaggctcctccggccccgcgggcgaggccgccggctcgggggcgcaggggcgggacggcgccggggccccggtggcctcggccgggggcgcgggttccgggggcgcgcgggcaggctccgggctcgcggccgcaagcttattccc

SEQ ID NO: 9711 - DNA, 1271 bp, Homo sapiens
  misc_feature 1, 2, 3, 4, 5, 6, 7, 1270, 1271: n = A,T,C or G
nnnnnnnactaactcatacttctctttattggttgcaagtggcacgcaggaacagagggagagtggggggctggtgggggaggggagatttttttttttttttcttgaatgtgcttcgcaagccaggctatcttccaaggaaggcagacagtgggagagcagagggactgactgcaggcaagcacattgaagaaagacactggcgggtttccccaccctcaccccaaagcagaaaactagcagacgtcagctcagccccgtcctgggcacagacactacacaaggagacgctggaagttaagcaatactttaatactgtaatatgtttgttttctttttctttcttttttttctaccaaaaaaaagtaagtaaactaaaacacaaaaacatataaataaaatccatccctcttgtcggggacctgcaggggggcaaccttaatccaaacacctggctatcaaataatcagaatgtattgtctcagacaggatttcagttccgggaggcaggggcatgatgggggagggggccggaggctgagagacaaaagttccagagcctccctcgaaggttctctactactgtattctgtacataatgtaccatcccatgtggaatctgtgagtgtcctcttaagtagcgtgggctagccaatctgccgttcatggtgtattgtaaactccgaattccatatgtaataggatgcaagtctaagcgtttcatgtggacataaatgtatctaaataaaactttccctagcactgtggctgacctcacccttacttttatactttagtatgaaactgatgagaactttggtagtgagtattttttttatatatatacatatatatgtactatctatatatatatctcaagcatctttcaggtctttgtgtgtggctttcttaaagccctgttgtaaaaaattactatgtggatggcagtctctcacatcacagatgtggaaagtataattttatatttgtattttcaaataaataagtttgtgaaaggtttccatcctctactgtggtccagaaatcaatgtgtttgtctgacaaaaaaaaaaataaaataaaataaactgttttgaccagaaaaagagagccgatttaataagcacggcggggttaaacatcagatgagaaaggaccgcgatctgtcgaacactgtgtcgtgagcaacccccatccagagagtcaatacatattgatgcggtccaagaatatcgtgatcaacatcaatgactcatgatcctgtctctcnn

SEQ ID NO: 9712 - DNA, 1301 bp, Homo sapiens
  misc_feature 1, 2, 3, 4, 5, 6, 7, 1301: n = A,T,C or G
nnnnnnncaacttttgccaaattcctaccaatcacttgctttttaaaagaaatgtataatagccaaaagagaaattatgtccctgttgtacagaagttagaatttttgactccaggcagcagtttgctcagtgatcttgaacaagttatccaattgcctctacatttgcatcagtttctctagctgcaaaatggggataatactatatacctacctcacagtgggagggcaggagattttgaggccctgaggttttaggtgggctgtgagggccaacgcttgacacaaagtccatgggttattattcaagaatgcacaggcccatcggccttttagaaagacaagacagggagtgcttgtttgatatttcaaggaataaagccggagctcctgaattgtagtccaccttaaaagagagacctgtattggagaatattttatttttttggcaaatttgatcttaccctttaccagttctataatttggttaaaagctgattacgtcctacaatgtcaaagtcagctaactgtcgtctacttaagacttctggtcatttccaacttatagaggaagggagtctctaaaatctcttcttcagaaggcacctcacttctcagacttaaaattccacatcaagtgttccattaaaagaagataaggcattctgagtgcaaacaaatgggggcttcttaaactacacaccagcagtcagtgaggaaaactttgaacaattattgagttgctttcttgggtctctataatcaataacctgtctgcagatatctatctatataaagatattatatataaatataaatttacatatatatgcacatgtatatatagttgtacatatatgtgtgtatatatatacttaaatgtaatatttacaaaataaaactgtgatctcgtctagagaaaatgtattcatattacaaactgctcttccatatttatgtaccatattatacctttttattattgttataattattatgggtatttctaattaatatgatgttgaaacctgtttggcaccttctggaagctaccaaaaaaatgacactccattgaagtgcttaaaagctgttctcataagaattctactggcctattggagaacaaaaaatccgagaggggagggccggagttttttaacccacgtaaaccattccaccttttggccacgcgaaaggggcaatttcgggagggtcggcccaaacctggcgcaacgaggcgcagctttcgcggcaaacacaggaattacacgacatggggaacggggaggcctggcaaaccn

SEQ ID NO: 9713 - DNA, 1804 bp, Homo sapiens
  misc_feature 1, 2, 3, 1803, 1804: n = A,T,C or G
nnnctgccccgtcgcttgtgcctgctcgtgccggcgcttgctctctccgtgtcttgctcctgcccggttctcctcggtcgctccgcgggttcgctcgtccgtctcgctccgcctcttcgtctccgcgctttggtgctcggtggccgccctgctctctgttgttccgtgctgctctcccgtcggctgcgtgcagtctggtcgggtcggtgctccccgtcctcctctcgctaccgctcctgcgcctgcgcggggtctggctcgcgtcgtggtgctggttgccctttgccgctcgcgtgcgcgcgggccgggtgcccctcgctttccgtccgcgcgcttccggtgtctggccgctccccgcgctctgtctgcgctctctccctccccgcctcgcggcgctcccgcgccgccccgtcctcccctcctccctcctcccccccccgcccccgccgctgctccgcccccctcgctccgccctgtctcgcgccgggtctgatcgtgcgtgcgtgtcttctcgctgtttctgcttgtcgcgtcttctgcgtcgtctggttctcccatgcgcctcttcgcttcgccccgctttcgcctcgtcgtgccccgctcgcctttttgtttcttcctggcgcgtgcgcgtcgccgttgtccgcgtttccttgtccgctcccccctccccgtccccttccctctgtccgccgccgcgtgtcacgatgtccctgtgtggggtcgtcggtgtgtgtgctgcttgttttgttcgcctgctattgatgtggtgtgcgccgttgcgtggaggaacaatcaagctcaacagagccgagacacagaaagccgagggattgagcacctgacaagagtttccgcgagacctcgcggtcgcgtgaccccgttctgcctgagcattttttcctaaagggaagaatcaatagtttctgactgttttaacagctgaaagctccaactggaggcagaagatgggatggcttttcacacacgtgcgtgcaagtttagccacctccaaaggccttgttcttaaagcaacagtgctgtttgcattatgaaatgtctctggagttcccctttggaaaggctgctggtgggccacatggtcacgatactttcaagtcacaccctactttgtgaccttatcctcagagtaaaggctttagaggaaaagggaccccacagtctcacccattacctggctgtcagcatctccatatgctcctggctgagttttattgagcatcagctggggatgtgagcagaaacctgaatccttgagacaggtggttttcaaaaaggaagccataacaatgagtggcttagtactggcaattgatcagttggtccatgaaatggagccagtcaagttctgtccttccttcccctcccacatactttgtcaagtcccaggacctactgatatgggctcagcaatgacaaatgccagagtgctcagaggacacacccatcccttttcagggtgtgaacccagactggaaaggagaaccaaaggatgggaaaggcaggcccgggacggcttgctgctgctcctgctttcacaggaatcctggtcatgccaggaacactgccgcccacttggggtgggactatgtggaagtctagctagtgctcggcaccccttaacccaatggtgagaaacaggacaaacatgctgggggttcagagggtggaccgcagggatggcccccaaacaggtcccagtgaggtaatgcaaggcctcctctcgggggctgatgaggtcttctaggccaccagactaaacgcatctgcccagcctttagnn

SEQ ID NO: 9714 - DNA, 1084 bp, Homo sapiens
  misc_feature 1, 1083, 1084: n = A,T,C or G
nacgcgtccgtttgtccatatatcttgttccagcagccatatatcttgtggtctacagcctaaagcatgatttcccttgaagtcttggggttgtttaaaggagagtcccttcaatataaaacctctgaaatattagtgagaatggctcactaatgtgaacaatgtttaaattatttatttatatatagaattactgaatattagtactgggaaaatttatagaaatcatctagtcttacccttcatcttacatataagaaaaatggtcttttcttctaatcacatttacaaaatatgatataaaccttgaccatgaatgtatgagcctaattagagaaacagaaaatcagcatgtcagttttccttcattcaaaataacatagtctttctaagcagtcattctggagttaacatgcctagttcagagccgctgtggatgctcaaatcatttctggaattgccttcaggacacaattatgagaaagtcagacttccaatattttgatcatgccttgtgtcttcctaagtgtccttatcccactggattgtgtctcttactcccaagacttattccaaatgattttttgactcttttcattaatcaaattcaccccaaaccagaaagttttgccattagcgtagatattaaaaatattactggctgggaaagcactcctcaaagcagaggttctaaattaatttatctgttcttttaccatttgctcactcactcactcatggacccattcaatcatagaatatttaagatttatatgcccagaattataatagtgcctaggccttgataattagtgaatttgtacttggggtgaatgtgtaagtgtcaaaaggtcactattatgaacgagaaactaatcgatttactctgtaaattctggggaggcatttaaaaaatcagtaatcttcaaggcatatcttgtgtatcatctgtgttggatactctgatctggggggaaagaggctccagacagtttgctaaatactattccgaaagttatccttgggcattgtaaaataccttgcttcataccccaaagaataggacatgacagtctgacatcnn

SEQ ID NO: 9715 - DNA, 4302 bp, Homo sapiens
  misc_feature 1, 2155, 4296, 4297, 4298, 4299, 4300, 4301, 4302: n = A,T,C or G
ncgtcccgatgagcaggcgtgttggggaggagcgcacaaaccctagtgggtttggttgcacggcggctttggcgcattttcggctggtttgattcatccattttgaagagacgggggagcggggggctcgtctgttccaggagccctgaaccaaagagcagcggagtttgagaagccagcagctcggggttcggcagcagcggtcccatcggctgaagttcggggggggtggggcgccgagcgcgcggggtggggggggtcctggtctttggcttctcgactcggtcctgtttcgacagcgaacatgtcgcggcctgtcagaaataggaaggttgttgattactcacagtttcaggaatctgatgatgcagatgaagattatggaagagattcgggccctcccactaagaaaattcgatcatctccccgagaagctaaaaataagaggcgatctggaaagaattcacaggaagatagtgaggactcagaagacaaagatgtgaagaccaagaaggatgattctcactcagcagaggatagtgaagatgaaaaagaagatcataaaaatgtgcgccaacaacggcaggcggcatctaaagcagcttctaaacagagagagatgctcatggaagatgtgggcagtgaggaagaacaagaagaggaggatgaggcaccattccaggagaaagattccggcagcgatgaagatttcctaatggaagatgatgacgatagtgactatggcagttcgaaaaagaaaaacaaaaagatggttaagaagtccaaacctgaaagaaaagaaaagaaaatgcccaaacccagactaaaggctacagtgacgccaagtccagtgaaaggcaaagggaaagtgggtcgccccacagcttcaaaggcatcaaaggaaaagactccttctcccaaagaagaagatgaggaaccggaaagcccgccagaaaagaaaacatctacaagccccccacccgagaaatctggggatgaagggtctgaagatgaagccccttctggggaggattaaaagtgatgatggtctggggagagattttattaaaaaaaaaaagaaaaaaagagggaggaaaaaaaagaacctacttaagatagaacatggttttggctatggcttgactcatgggctttcagtgcttttttccatttgttgaaagtaacatttctctctctctctctttttttttttttttttaaagcaaaccattgtatgtgtaagtgtttaagttacctttttgtctattggtctctttgccagccctcccctttcccaatgaaagccatgtcaaattaatcactggattgactgcttcatctttttatttttaatgaaaggtgtaccacggttgtaaagcaataagatttgagatgaacactattgaaacttcgctttttgctaaaaaatagcaagttgaatagtaatcaaaaaacatagaaagattttagttcaaaatgattgctcctttctctacctggacttttaaaaaatcaattgtcatctaatatgagtttatttgtctatagacacaagtatcaatgtctaaaaaaaatcatgactttaaacttccaccgatgaggcaggtaggagataaagatgaattctgaactgttactaaaagtactcattttttaccttgtagggagggtgggcaatggggttacctgaccttatttgagggtatgggctttcttttttatttcatcacttgttatctcaaagagactcggagccagtgatccttttatcctgctacagtctttagggagctaaaaaaaaaaaaaaagcaggggctgccaaaactcttgatttcatatttccttctctaaatatatatgtatcctgttttttggataaaattttaccaagaatccaaaaaaaaaaaaaccctagaatttaatcaacaagatcagtctacaggtcacagtggatttcttttcaaactgacaatgtttaggttttaagcaaataaagttccagttaatgtgaaactcagaaaaaaaaaaaaaaaaaaaaaaaaaaaaaaaaaaaaaaaaaaaaaaaaaaaaaaaaaaaaaaaaaaaaaaaaaactcgagggggggcccggtacccaattcgccctatagtgagtccgattacaattaactggccgncgttttacaagtacatccctgtgatcctgctgcttcgtagagcaccactgcacaccctaccccgagtgccaaccacctctgctataggacactattttcctggccctattcttcacttacttcccatcctgtccttgactaggaatatgttaaatgctgctcccatacaattcagttagctcttgtctttttatttggtccaacccctgctttactgctcatgctgcttaaagcaggagggactagagaaacaaggcattttaggaggcctgtgtgcagttgaaaaccgacttttacacgccttataaaagcagtcaggagatagatccgtaggtttgatccttcacatctaataccaggcgctaatgggaacaaggtttaaagggtcctggtatgctaataaattgaaaaattagtgaaatttaaacttctgcctttttttcctgccttttaatctagatttgcttcctcaatatcctactttgtggtttactaggaacatgcttactctgatctttttttaaaaaacacacagtggcagagtcatttcactattgcactgtgtgttaaagaatgaataaggagttttcagttacatggccaaaaatatcagaggtgtgacgaacttgtaatgagggtgttaaagattaatctatttgcctaaatgggtttgttcaggtatccatttttaacaaagaagtttgtgttcatatagtaaaagacctatcagtgtttccaccatgcacttctattttttaggagtttataattttaagtcttacattcctagtaacatttgggcttttcttaggttatgtttcgtgaagatttggggggagggctcttttaaaacttcagcctcagttgtttaacagtctctttaatatattaatctgcactaacatctctgtgatatatgcacatattttagaggtaatcatgtcttctagattacttgtgtgcatttgattgggcttcttgtttagggtcccttttaaaattaattcattagattgaaaaatgtattctatatttctgatagactggacagaaggatctgtgtccccaagtgagacaggctctgaataacctttgttttctccactttttattgatgatttaaaacactctagtcttcccctcaaatcatgcatgcaaataggaggacagtggtggtgactcaactggatacaggtgctcaatagtcaggcttgatagtgatgtcaggacgcattacaagctgtaagccgatactgactggccattggcaccatccttgactaaccttcctctttttctctagtgtgcctatggtgaaatggcaatagcattcactgtcgtattttgcagtgctcaggaagtgggacgttaactttgaaggtgcttgtttgtattagctctgctaggtttacctctacaacgtagatttcagcagctatgctgactgacactacattctagttcttaagattttttttccagatccccccttccccagctagacatacgtagcatactttcatcttattcagtctttctgtaacctgctgctgcttttagtcctcctcacctcagatcggaatcaatggagtgggcccagaggatacattttaattccagtaatggtaggtagatttgtcctgctttctaaaaacatctcctcatttcatatttccactccatatatgattccaatcaagggaaacttacaggggtgataccatcatgtaacagaaggtcacgccaaagacgatgtagacatactacagaaatcaatgaggaacaagtaggatgaatcaccatgaaggagcataacacatgacaggataacacacaaccaggatgcgccagaaaaacgccacaaaacaccacatcaacagggcaagggaccaaaatgcctctcctacagtgtacaactacgaaagaaaagaggagaaaaacaagaaaagaaaaaaatagaacatcagaaggcaaacaacagaccttcacaaagcgataaatggtaaacaaaaggtcgtaccaacgagtgagcgaacgcacatacaccacagcccaatagagaaaacaaacaataaagagacaaaaaccacatagaaaagaccaagacaacgccaactatcagcgataccaattagttgtannnnnnn

SEQ ID NO: 9716 - DNA, 846 bp, Homo sapiens
  misc_feature 1, 2, 845, 846: n = A,T,C or G
nnatgcactggatacgaatttatacgactcactataggggaattggccctcgaggccaagaattcggcacgagatcatggtgcttttggcacaggtgcccacaaatacggatgcagtgctgagatagtttatgagacttgtaccatttcacaaactctgaaattgggttccatattggcaaggctgccacagttgttaagaataatcctctatgtttcttcctcacaaaaccatatctcatttatatccagaccattacttcactataattacaaggacaaattattagcaagaaataagaatagtattagaagaattgatcctattttgaacccctctccagtatcttcacactcttgtcaactctccaggcctctctcttgccctgagttatcagcctgtgtggtgttaactaccttagaaggtacaagctaagaaatgtaacagtatcaaccctcccagttgcttaattatacccataggtaatacaaaaagctctgaagacccaaagatgacattactaatgatgtgatttcaggagccacagaagaaccttaccagcttccctcaaatcagtccttatcctctttctatcttcactcccatcatcatctattttcacactatccagctaagcaaagattcctggaggctgacttgtatcttcagactcacagagtgaattcagctcttctgaatcaagacccacccagtctctttcattcagacctgttgctaacaaatttatatttgccaaggatattagcgcaaaagaggctacttgattggtggccaacctcgtgcacatggaaggtatcttaataggttctctgcatactctggann

SEQ ID NO: 9717 - DNA, 1207 bp, Homo sapiens
  misc_feature 1, 101, 1205, 1206, 1207: n = A,T,C or G
naggcaaccaccatgatcccatcaaaattggcatgtccagtgaaataaatctgtttaatctggtctaagcttccccatctttcatgacttttgagttgacnatttggggaaatggaataaattctgtctgtttgaatgcttggtcctcaaaagccaactgatatgttctgttcccctttcctttctgcagtccatggtcctcctgcttcagagccaacgtcagtatatatttgagtatgactcctctgaccgcctccttgccgtcaccatgcccagcgtggccggcacagcatgtccaacacacacctccatcggctacatccgtaatatttacaacccgcctgaaagcaatgcttcggtcatccttgactacagtgatgacggccgcatcctgaagacctcctttttgggcaccggacgccaggtgttctacaagtatgggaaactctccaagttatcagagattgtctacgacagtaccgccgtcaccttcgggtatgacgagaccactggtgtcttgaagatggtcaacctccaaagtgggggcttctcctgcaccatcaggtaccggaagattggccccctggtggacaagcagatctacaggttctccgaggaaggcatggtcaatgccaggtttgactacacctatcatgacaacagcttccgcatcgcaagcatcaagcccgtcataagtgagactcccctccccgttgacctctaccgctatgatgagatttctggcaaggtggaacactttggtaagtttggagtcatctattatgacatcaaccagatcatcaccactgccgtgatgaccctcagcaaacacttcgacacccatgggcggatcaaggaggtccagtatgagatgttccggtccctcatgtaactggatgacggtgcaatatggacaagcaatgggcagggtgatcaacgagggagctaaaactggggccctatgccaataccacgaaagtcacgcctatgactacaatggggagggcagtcagaacagggcgcaataaccgccgactgcggctacaggatgacctaaggagctgcgtgatggaccagcacaggggctaaggctggggtatacccggaacggaccaccggggggggcacaacagccgcagctctgcgccagggcgcagcaaacacaacgggccgaaagaacggcaggggcgccacaaaggagagannn

SEQ ID NO: 9718 - DNA, 3217 bp, Homo sapiens
tatagggagtcgacccacgcgtccgcggacgcgtgggccgcgatgcccgcgcgcccaggacgcctcctcccgctgctggcccggccggcggccctgactgcgctgctgctgctgctgctgggccatggcggcggcgggcgctggggcgcccgggcccaggaggcggcggcggcggcggcggacgggccccccgcggcagacggcgaggacggacaggacccgcacagcaagcacctgtacacggccgacatgttcacgcacgggatccagagcgccgcgcacttcgtcatgttcttcgcgccctggtgtggacactgccagcggctgcagccgacttggaatgacctgggagacaaatacaacagcatggaagatgccaaagtctatgtggctaaagtggactgcacggcccactccgacgtgtgctccgcccagggggtgcgaggataccccaccttaaagcttttcaagccaggccaagaagctgtgaagtaccagggtcctcgggacttccagacactggaaaactggatgctgcagacactgaacgaggagccagtgacaccagagccggaagtggaaccgcccagtgcccccgagctcaagcaagggctgtatgagctctcagcaagcaactttgagctgcacgttgcacaaggcgaccactttatcaagttcttcgctccgtggtgtggtcactgcaaagccctggctccaacctgggagcagctggctctgggccttgaacattccgaaactgtcaagattggcaaggttgattgtacacagcactatgaactctgctccggaaaccaggttcgtggctatcccactcttctctggttccgagatgggaaaaaggtggatcagtacaagggaaagcgggatttggagtcactgagggagtacgtggagtcgcagctgcagcgcacagagactggagcgacggagaccgtcacgccctcagaggccccggtgctggcagctgagcccgaggctgacaagggcactgtgttggcactcactgaaaataacttcgatgacaccattgcagaaggaataaccttcatcaagttttatgctccatggtgtggtcattgtaagactctggctcctacttgggaggaactctctaaaaaggaattccctggtctggcgggggtcaagatcgccgaagtagactgcactgctgaacggaatatctgcagcaagtattcggtacgaggctaccccacgttattgcttttccgaggagggaagaaagtcagtgagcacagtggaggcagagaccttgactcgttacaccgctttgtcctgagccaagcgaaagatgaactttaggaacacagttggaggtcacctctcctgcccagctcccgcaccctgcgtttaggagttcagtcccacagaggccactgggttcccagtggtggctgttcagaaagcagaacatactaagcgtgaggtatcttctttgtgtgtgtgttttccaagccaacacactctacagattctttattaagttaagtttctctaagtaaatgtgtaactcatggtcactgtgtaaacattttcagtggcgatatatcccctttgaccttctcttgatgaaatttacatggtttcctttgagactaaaatagcgttgagggaaatgaaattgctggactatttgtggctcctgagttgagtgattttggtgaaagaaagcacatccaaagcatagtttacctgcccacgagttctggaaaggtggccttgtggcagtattgacgttcctctgatcttaaggtcacagttgactcaatactgtgttggtccgtagcatggagcagattgaaatgcaaaaacccacacctctggaagataccttcacggccgctgctggagcttctgttgctgtgaatacttctctcagtgtgagaggttagccgtgatgaaagcagcgttacttctgaccgtgcctgagtaagagaatgctgatgccataactttatgtgtcgatacttgtcaaatcagttactgttcaggggatccttctgtttctcacggggtgaaacatgtctttagttcctcatgttaacacgaagccagagcccacatgaactgttggatgtcttccttagaaagggtaggcatggaaaattccacgaggctcattctcagtatctcattaactcattgaaagattccagttgtatttgtcacctggggtgacaagaccagacaggctttcccaggcctgggtatccagggaggctctgcagccctgctgaagggccctaactagagttctagagtttctgattctgtttctcagtagtccttttagaggcttgctatacttggtctgcttcaaggaggtcgaccttctaatgtatgaagaatgggatgcatttgatctcaagaccaaagacagatgtcagtgggctgctctggccctggtgtgcacggctgtggcagctgttgatgccagtgtcctctaactcatgctgtccttgtgattaaacacctctatctcccttgggaataagcacatacaggcttaagctctaagatagataggtgtttgtccttttaccatcgagctacttcccataataaccactttgcatccaacactcttcacccacctcccatacgcaaggggatgtggatacttggcccaaagtaactggtggtaggaatcttagaaacaagaccacttatactgtctgtctgaggcagaagataacagcagcatctcgaccagcctctgccttaaaggaaatctttattaatcacgtatggttcacagataattctttttttaaaaaaacccaacctcctagagaagcacaactgtcaagagtcttgtacacacaacttcagctttgcatcacgagtcttgtattccaagaaaatcaaagtggtacaatttgtttgtttacactatgatactttctaaataaactctttttttttaaaagtctggtctttccttcaatgttacagcaaaacagatataaaatagacaataaattatagtttatatttacaaaaaaagctgtaagtgcaaacagttgtagattataaatgtattatttaatcagtttagtatgaaattgccttcccagtacatgattgtgaaaaagacatttaggaaaatattctaaaatttaatctgagcctcactttctacaagggggaaatcatgatttccggttcataaacagga

SEQ ID NO: 9719 - DNA, 6147 bp, Homo sapiens
  misc_feature 6135, 6136, 6137, 6138, 6139, 6140, 6141, 6142, 6143, 6144,6145, 6146, 6147: n = A,T,C or G
cacccacgcgtccggcgggcggggacggctgcagcccttgccggagagggcgggccggggtcagctgcggcgggcgggccggcgcggggagctgtgggcggcagctgcgtctcctgccaccgccctccctccgccacgatgccggggatcgacaagctgcccatcgaggagacgctggaggacagcccgcagacaaggtctttactaggtgtatttgaagaagatgccacagctatttccaactatatgaaccagttgtatcaagctatgcatcggatttatgatgcacagaatgaattaagtgcagcaacacacctgacctcaaaacttttaaaagaatatgaaaaacagcgttttccattgggaggtgatgatgaagttatgagctctacattgcaacagttttcaaaagttatagatgagcttagctcttgtcatgcagtgctttcaactcaacttgctgatgccatgatgttccccattacccagtttaaagaaagagatctgaaagaaatactaacattaaaggaagtatttcagattgcaagtaatgatcatgatgctgcgattaatagatatagccgtttatcaaaaaaaagagaaaatgacaaggtgaagtatgaagtaacagaagatgtgtacacatccagaaagaaacaacaccagaccatgatgcattatttttgtgcattaaatactcttcagtacaagaagaaaatagcattgttagaacctctacttgggtacatgcaagctcagataagtttctttaagatgggttctgaaaatcttaatgaacaactggaagaatttttagctaatattggaacaagcgttcagaatgttcgcagggaaatggacagtgatatagagaccatgcaacagacaatagaggatttggaagtagccagtgatcccttatatgtgcctgacccagaccccaccaaatttcctgttaatcgaaatttaacccgaaaggctggataccttaatgctaggaataaaacaggcttggtgtcatctacctgggacagacagttttacttcacgcagggtggaaatttaatgagtcaggcccgtggggatgtagcaggaggcctggccatggacatagacaactgttcagtgatggctgtggactgtgaagacagacgatattgttttcagatcacctctttcgatggaaaaaaatcttcaattttgcaagcagagagtaaaaaagatcatgaagagtggatctgtacaataaacaacatatctaaacaaatatacttaagtgaaaatccagaggaaactgctgcacgagtaaatcaatcagctctggaagctgtcactccttccccatctttccagcagaggcacgagagcctgcggccagcagcaggacaatctcggccaccgacagctcgaaccagcagttcaggatccttaggatctgagtctacaaatttggctgccctctctctagattctcttgttgccccagacaccccaatacagtttgacataatttctcctgtgtgtgaagatcagcctggccaggcaaaagcctttggccagggaggcaggcgtacaaatccatttggagaatctggaggaagtacaaaatctgaaactgaagattctattcttcatcagttatttattgtccgattccttggttcaatggaggtgaaatcagatgaccatccagatgttgtttatgaaactatgcgccaaatcttagctgcccgggccatccataacatctttcgtatgacagaatcgcatttattagtcacttgtgactgtttaaagttaattgatccacagacacaagttacaaggctcacgtttccattaccttgtgtagttttgtatgctacacaccaggaaaataagcgcctttttggatttgttcttcggacatcaagcgggagaagtgaaagtaatctgtcatcagtctgctatatatttgagtcaaacaatgagggggaaaagatatgtgattctgttggactggcaaaacagatagctttgcatgctgaactggatcgtagggcatcagaaaaacaaaaagaaatagagagagtaaaagagaagcaacagaaagaactcaataaacaaaaacagattgaaaaggacttggaagaacaaagtcggttgatagctgcttccagtagaccaaaccaagccagtagtgaggggcagtttgttgtccttagcagtagccagtcagaagagagtgatttgggagaaggaggaaagaagagagaatcagaagcataagcttatacttttggtagatattcccccttggaatttgacagtttctatggtgaaatggcagaaggtaacaactatgttgaaatatcaaggaggagattaagctttatatttgcttatttgttgtagctacattttaaaaaaaagattgaacttgatgacttaggtttgcattgatcttttttcccccttaaacataatgtactatgtattaacatctaaaggaaacctgctcatctccctgaagcagactgctgaggaattacatttgctcaagaattttttccgtcaaattgtgaacttttaattcttgcattgtaattggctgtgtccataagaaatcatttattcttcaggcttagacattcatggatatgcttttctttcattaggaacattttgctggtgatgaggaagcatttagctgaataagtttaaagccctttatacagagaattctacaagtttgcaaatattttaacaatattaaatgtgcaatagaacttttataaaataattagaacagagattttacagttaaggtttcaaattgtggcaggtggtactgttgatctcagggtactttctgggattgctcacatttctctaatgtactgcacttgatgccagtaggaaagaagcttaagtgtcttcagttcaagattgatagagcccttggcattttattatcacattcttagttctcaggttgggacttcaattactgctgcagagcagtagtggttaaaaataagatattggaatttattaaaagatttttgttcaatacattttagattaggattgacaagtaaagatactgctatggaatgatacattgtattttctgcattgtgtgaaatagtttttattgaaagtcaagtgacatttcaaaagaagttctataacaattatgtttcatgcttaaagtaaaaattcccagagtttagtttagaaaatgtaatcttttaaatttcagactgatatattcccagtattttcataatgccatgttttgataaagtactgaatcaccactttatatccacaaaggcaaataactaatgtatgataatagaataatttgcactaattattgtaaatatgtctactcttcaaatgagtaaaaggtccaattttgtgaaagattgaaaatgaattgaatgcctagtagagtataggagaagttgaccaaggaaggatttaacctggtgccaaggttaaaataacatttctctactgcctattgtttatgttaaaccttaattttttttctgtaatcacttttaacactgctaatagaaattatgttttcatgtgtttcacatgaaaaagtatatatatacaaagttaatatagtgggtaaaatactttacatagtcacacatttacaaatttttcaagaggttagccactaagactttaataattttacaagggaaaaagcctttttttttctttgatatacagttttttcttcttagttctgcattagaaatggcatctgttttaggtctcaaaatataactcagctgtttcacactgtatatgtacattgttttctgtaggaataggataatgatatataggatcatgatattccttctatccatgtgccaaatgggtgtaatgtttatttactgatgctttatgttaccaaaacatacagtaaaaaagtagaaatttatgaaatacttttgataaaaagtttattttgtgcttaccaaaaggaatgctttcacaatagtgtatcagttcttttgttttgttaaagttggaatttattctgttgccagcatttaagtagtcatggcaagtcctgtttttaagaccttttggagactggagctttctgttccattaagtcttttgtttatactacaaattgtcacctcacttagttcagatgaaatctgttactctacaaggaaggtgttcatcattaggaggcagctttactaagctggtgctttgcatggtagcaagtgctgccctttatcagcaccctgggtcatagtgtaggctagagttaaggcactggcagacttagggatgctggacagacctgtagttcgttttaagtcatgttcacaggaatttctacaataataaacccatcatctccataggtcagatcgaagtgcattccaatgctaaatagaagttatgagtgggtttaacaattttagatgattcagcttttgttccattactgttgaactatatgaactattccattactgcagagatttaagtatctgttttaataagctctttttgttatttaaaggctgcccatgggtttctgcctagtggtaaagctgattgttaccctcctttgaaatcccttctagttctgagatgctttgagggtaactggattcgattttgggatatcttttctcacattcagacttacacttaatggtgttagaaatcaacaaaactcctttttaaaaagaaaagatattaagcctgcctacttctacaatgcattctgttacctatttgaacagtatgtttgtaactatggcaatgaagtcagtagataggaaaccagttattccttctacctttaaaaattttgagaacttgccaaccagggattaaagctattatcttgaacagagtccctaaagctagtctagtttttgccacatctgcaatgattattgtttaatttcaaaagaatcctcaggctctacaatctaggggtggtaaatgtgtttccactatacttgggaaaaggtcagtaggatgtgcatcctagggaagataaaatcgtatatggtaaaggcatttgagttaattttgcattatatctaggaaccatattatttaaaatttgaatcctattaatgctgagagatcctaagagctagtatgttgtaaaacctgccacctgaataaaatgaaaaaaaaagtgtttttttgagacagagtcttgctctgttgcccaggctggagtgcagtggtgtgatcttgggtcactgcaaactccgcctcccaggttcacgccattctcctgcctcagcctcccgagtagctgggaccacaggggcccaccaccgcgcccggctaattttttgtatttttagtagagacggggtttcaccgtgttagccaggatgttctcgatctcctgacctcatgatccgcccgcctcggcctcccaaagtgctgggattacaggcgtgagccaccgtgcccggccctaaaatgaaattattaatgttggttctgaaacaacctcttagcattcagattgtattttaaatacttaaacacaccaattgtagaaagcaaccctttatttttagcaagtttggtttactcttctcccatgagattttgtctttctacattaactagtaagacataaagatttgaaactggaactatattatactttttaaccaatctctgtggcttcactcatgaaatttacttcagttaatatgagactgggggttaagttgtaactaatatgcaaaattgctttgtatatttggtgattttgtaatgtaagtgaattgattcttatttcactgatactattaatcatgcagtgtacaattcaaaatcatgcaatgtttcactttagaattggatttgaagaactcgactttatgtgatcatggtattggtatacatgtggggtggagaacttattttttcattttgtcacaataggtatatactgacaaggcttcaggaaaaaagttgttagaagattttttaatgtataataaagtccatgatttttgtacagtgtacacgcacattgtgacctggaatattttcaaggatcacagttgtggaccagggctttagcggttgaatataaatatagaggccaaatattcccannnnnnnnnnnnn

SEQ ID NO: 9720 - DNA, 2964 bp, Homo sapiens
cgtccgttttttttttttttttttttttttttttttacaagtgggcatgagtttttattctcagtgcacagcagtattggtttctgttcatcagcaaaaagctttattggttccaacaaattatcccttttaaaactcctcttcttcttctggtctcagtggaacaacacatttgaatttcagatttgcagtttatagcattttttttccctaagaaccatataaatacatgcaaaaccttgtacatggagcttaaataatatcaaaatgcaaatatagattgggtgcactgttaagctgaattgcaaattatggcaacacacactggactggggtatacgttgctttgatatcaccatttgtttgtttatgtcatgcagaccacaatagtcaatcttttgtttttcttttttgtacaaaaataccagtgcttgttatactagttactaaaagaagaagaaactcaaaattcctatctgcgtgctaatttgaaaagaacaacgtagatagatttgttggcacatatatatggcatattcacatatggcatatatacatatggggagaaaacatgaaccaaaggccaattcagttatgggagctcatctccttccatctctcctaatcaagagcaaagggaacagcaggcctaacagcagggttgggaaggcaaaaggactggcactgaactaagtgaaagggcgtctggtccattcagaggaagaggctggaatggcttaacaatagcaggcatttataagtgcccaccctcaccaatgcatcgggggtggtccctagatatgaaaggtgaggaagtctctgcatactgtgatggtaccacgggctgcttcaattgtaaggcaaaggaagcaggaaagaaaggaagggatgcatttagaggcttttccacacaagcgagtgtgccacgcccctctgggttttcagcagtgaggtaaccattcagatttaaccatgccaactctcctctctgaagctcaaggggaagaagaaactcaaaccctaaagaacccacaagtgtccagagggatttctaggtgatctctctcttaacccctttagggacaggagagtcattccagaggacagatgatactatgggaaggatctagccttaagactgtcactcagggctagaaccagccattgttttatccatttagaattctgtccccatttaatatattgcacaaaatctttctaggggagggaaggcatcacaaataagatccttgcacaaaaactcactaatggaaaactccagggggaacaggaaataaaaaccatgaaaaatgcaaaccccaaatcagagtatccttatagaccaggagatattcgtgtcttttataccactctgccagctattcttcaagaaacacaaatccaacagaggcccctgatcctaatgactagtcaggaaagattctgtctatccatctgcatggtgggggttggggggaagattcatttcctgacagctgtgtcccttgctgggtgttttcctgactatccacagtttactacccgtttttctaggtttattaagagaggaagctaggatgatacgttctccttctccccatcagacccttttcaaatccaaagcaccattttggggaaaagtgttattaacttatgccatatttacccactgccagttggatcagtgaaactgaatagaaaaaacttatataaaaaacatatgcacatagacacttaaacttacctaattccatatcaacaaaatttatattaaaaaagtctagaacccaacaatttttcttccctaagtataaagatggctgtttgcagaaagaaagtatggtgtattggttttaaaaccaattacaaatatactaagtcacctgtcatgccaaacagctggttatgtgctcccttccacagggctacatgacggcactttattttaaatcctttaaacaaaatacatatggctgacccaaaaatatcagtttctgatctaaagaaaactataatttttgcatatatttctatattttctctcctattatggaaactagaacacaagaaaaaaaaccattgacttttaaaaagtagacacaagccctcaagggtaacctgtcaggcaccatgagaaccttttgtgaacaggaatggtaaaatagccttcaaagctcgttattggcttgctatttaaaatgatctgaggtaatacaagatttgatagaattaaatcttctaaaatagttgatgaatatatatgtgaaacctaacaccttgggtgagctgtttttttcccctatgagtatttaagacacaaaaaaagaattattgaagcatgtacgttttacaaaaccaaaatcaaatttgctttcctatttcctacgatgatggattatgtagtcatggggatatgtaggggacattgtttctttatgtttcctactgtggacagctcaggtgaaaggggtgagggaggacagatccagaagaaaaggctaggtggatcaggtcatcttcctctcacatgggaatttggccgttcatacatcccctcttcttgactctcatcactctagaaaggggggtgggcttcatttatctaatgggaggtgagagtcagggacatgaactggcccctacacagaagtcaacaccagcagggatacaaatggagctcctgcaaacgtggctccacgttgtcccagtaaggaacacttaaaaaatctcctagcaaagtccccaactcctgagaggcagatgggaaggggatgctttgggcagtattcaggggaaaaaaaggcacagggctttactgggcagcagctggagcatgtggctgaagcggggctggaggaagggggagtgtgccgggtgcggggggtctttttctcgtttaagttggcaaaatgtcacaggggcctcccactttggatacatattgtccacgttgggttgctcaat

SEQ ID NO: 9721 - DNA, 1135 bp, Homo sapiens
  misc_feature 1135: n = A,T,C or G
acccctgctgctggctgggttctcagcccctgaccatgaaatggttccacatcgatctacagaaaaaacagccactttggccgtgggccctgacgcgtaatatcattatggagtcagcagcgcatcccgtcccattatcgcctggccaagcttttccaaggccagcctggctgcaaatggctttctcctgtctaggggggccacagccactgtttgccctccactaccggaggagaaattttatctttaattgacactggctgcctgccacccccttgcctcggctggcccaggctccaagcccgatctttccttacacttcaggaacaggcttcccctggcttcttccctctcctcggccattccgtcctcaccctgctgttctacactgcccaagacagctcccgggtgtgttcttgtcctttcttggtgcagctggacacggagatctcagaagtctgtggagaaaagtctgagagtgacaggaacagggcagggagggagctgacactgtgccgctactatatgtcatatcacaggtagacacatgacaccaggccaggctcttcactctgtctctgaaacaggggccatcattattccctaacaaacagggaaaccatttcggtgagtcacccccaagtcacccagctagcaagcagcaaagcaagactttgaattgaggcccctatggtcctacacagatgcccagagtaagagtgaggagtaagacaagaataaggagaggcaagcaggcaaccagacccgccagagcctggtgcaagatggaaacgcagggcccctgttcaaccattattaatttcatgatggtgacagccaagcattaaacccagcatggggcccttctgagtggctgcacaggttgcacacccatgaagctggccctgcgtgtgcccctatgtgaacgtgagagggataacaacagtgagagccaagggccacgtctgaccatcactcaccatctccccgtcctatccaggcccaggatgtgttcactctccatccctaagtggtccccagttgtgctaccagtctctagttggcctcagttcatcagccatccagccaataactttggcgtccccaggatcttggcccatttagaactggttan

SEQ ID NO: 9722 - DNA, 3368 bp, Homo sapiens
atatctggcgttccttggcccccctgtgtattgtacccccgttttggcgttctgcggcctccccttctggtgtgttgttcacaagacacgcgctcttcgttgtgtccctccccgccggctttttttactatttggggagaaaaccccccacccctttgtttcgttctccccgcggagtttttcctttatggcgaacccgctgtactggcgccactgtgtgcacgtcatcaccactcattggggcccccggcgcccccacacccaaggggttttaaaaatctttttccgggggcccgcgggcgcgccccacaacacagtttttttttttttttttttttttgatctttccctagaatgttatttattaaaaatagattctctatccttcccctcacccctgcgagcaaagtggcctttcccaacatcttttcccaaatggatgaaacaggtcttgaggacgcagatgtggcattctacataaactacaggatcaggcttttctgggacagtgggtctgctggagccaagagtggaacagcacaagacaacatcagcaaaccctggcgcacctaaccgcgggctgccatggatgccgggacggactggagttcctcctgctccaggtacaagtccacaaagagagacccagcggcccagcagcagcctcctgggcaccaccagaaagcgatgtacttaagggcctcaggcggtcgagaggcaacgtggcttccacatgtgtgggaatgagactaaaaagctggctcaaagcaaaatatgaacttataggaaaggagggccctggactgggcaggaagagagagactcgtggcaattctagagatggcagtgcccagccatcaagttctaaagagacccatttgggagtgactctgcctttagccaggttgagctcacagacacacaggcccagaggccgaattcgcggccagcttccaggtgtgccggggcctctcgttgcttttaacagtccagccagagagggttcagttagtgagagtatcttcccatgatcaaacacagatgcccgagtttctcttcactatttcttccgcttcagtttcatatcttttttgttctttgtctctctgttcttcaacttcttgctctgtttgggttcttgtttggcctctaacttccttttcttgtcacttttcaggctgatgatcgaggcgttcggcccagctttgttcaaaacttcattccactcttcatcgtccccacggattatgtattcagagaggtccatgctcttcagcttccctacttccttcttgtgtttctcctgaaattcctttgctgcttcatctaggtcgtcactgagggtcttcatcgtgggctccatgaccacatccttcgctgccaccatctgctcctcaatggccttttcctgaacttcattaaatagcttcacaactttgcggatgatccggttgaaaagtcccatcaactggcccgagggcagctcaatctccttttccagctggtccacagacttatgctgcaggccaatccccaagagaagagccgactgagccgcagacagggccaggtcccccagctggttcaggaaatagatgcgagagatggccgggatcatgtccatgatgaggtgatagtccaccatattccgtgaatacatctccagccgcttcaggtcataggggaggaagagtgcttccagctcctcccggctcagggcaggctgggctggcttccccatgttcctgttctgaatgatgttcagagccagggaaggagagaaggtactgaactggtaggagagcaaggctaggaaccgccgtcggaaatctttccagaaggctgcaagccagcctccctggtcagcctcatcctcatcagtgagcgtcttcagcatgatgcacgagtgctctccggtcaggtcattcggggtctgtctcagataaacaggaacaaatccagctcgtttccagaacttgaggagcctgggggtcaagccataggaaacacccaggtaatccaggcgttcggcaggcctctcattcaatttgaggagtaaaggaggcaggtccttccggggagtgatgacctcttccaacaagctgacagcctcgctgcttacggtgtgaatttcctgtggtgtctcaaggaccttttcctccagacaaggaaacctgccttcatagtacatctgcagcagctgcagagcacggctgccatagcccatcccttgataatctgggtgaacagcaatgcgaacgacccttccaccagacagaccaccaaagtctggatcttggaactgttctgacactgtccatggaatcaggtcccctgaagccttcttgcctcgagacagactgttcaagatggactggcgagaaatctccccttcaaggcacacctggataacagcaagcacttctggaagggcattctgggtggggggcacgggaggcagaaggcagaagagatggtgagcaggtgcatcggagagcatctggagatcattgggagagttcttgtagtgagaagccacgtagagggccataagccgttggaggaaaacttcagaggccttgtggtagcaaaagagggtatctctattaacatagtacagttcacaagcttcaggcaaggggcagcctgagactatccgagtgatgttgaggcaatccaggcacagcaagtcattcagccacttctccactgcatccccaggggcgtatcggattgactcctggagggaaacctcatgcagtgtccgcgctgatgccaatctggctgtcgtcgtggtcttattctcagcagtggtgctgacctggctctgggcgctctgttgacggagctgctgaattagcttgagggacagtgaccggccagtgccctcatagccattgatggtggatgccatgaaaacaaggtaggggccaagtaggctcttcaccaaggggagggggatggcggcagcttcatcaatcacaactagttcagcctggcccagcttcacagcatctgcaggatgtatatactgaatagtctgcctgtgttctcgaaatacattcactctgatcactgctttgttaaattcaggatttagagactggataatctcataatccagatgttcctgatattgcagagcatcaaatcctttaaatacaaattcaaacagagtatggaggttatcagggcttggggaggtaacaaagatattggagtacccaaatgccaccgccccagcaatcgccaatcccagggctgcagattttccccgtcctcgagcagctgtgagtgcaacagtactcctcagggtcttttcagagatgccctcgataaatttcaagccagctttgagcctgatctag

SEQ ID NO: 9723 - DNA, 999 bp, Homo sapiens
  misc_feature 1, 2, 999: n = A,T,C or G
nngagagcgacgcgacatgtggagggtcgagaggttcaagatgttggatgtggcgccccccccgcattgctgttgaagcattgccggcgggggcacggattcccgctgtggaaggctgaccaggcatactgaagccgggagttgagaccgcctggccaacatggcgaaaacccatctttactaaatatacaaaaattagccaggcatggtggcgcaagacagtagtcccagtactcgggaggctgagacaggacaattgcttgaacctaggaggtagaggttgcagtaagccaagatcgtgctactgcactccagcctgggtgacagagtaagactccatctcaaaaaaaaaagaaaaaaattgactttggaacctcagattacatatcagtttgcatacatgctaaacagagaaatgtcctcaaaattcagttactaaaaattactgatatctccatgattagaaccacactgtggttgtgtgtgtagtcaaaggaggagaatttttaatgctatataagcataactgataactgctattacaaataaatattccacaaatttggaaagttattagaggaagaattttttttccttgtaatttccaggtgtttatattagttgggccatagtgaaaattacatggaggaaagaaaataggaaaataagtcacagaaaaagaaaatcaaaacaaatagaaactctggggaacaagtgagttaattaccgctcatgtctcccatccggttctctagctccttgagggttactgtctaatgctccacaaaagtgccttacccagtgcttggtacagagaaggcactgaataaattcacaaaggccgattggttcacccattcttttagagacaacagacacgcaattctgacgaggactcctgttactaaaagacacagcctctgatacaagagagatatccctttgactaaagcattaccagggtccccagggccccctcccactgggcggtacactccn

SEQ ID NO: 9724 - DNA, 1266 bp, Homo sapiens
  misc_feature 1, 1266: n = A,T,C or G
ncaagtccagctttcgcgtggccctgcttttgtgtcgctctatgggccctgtcagaaaggtgcgtagctggccctggagtagttcagcgccgcccgttttttaaggttttaaaagcagcatttattgattgaaaataaatgtgtagataggctctcagtatggaatccatgttattttttaatgaagtacatgaagactccttagatcttccaccatgtatcttgtgtgtgcttataacaaccaccatattcaaatggaggggaattttcaacattttactgaaaaaaaaatgagaaattcttccttcagcagctctgcatagtttgacaaacttttggaaagagataaaaacacactccagtgtttgtacgttgaacgtttattacaactaattggcgatgtgataagacagtgctcacgtggcctgaatgttggtcacaatcacaacaaagcttaatccagcccagcatatataagtgaaaatataaaccatgaagacatgtttagatatgtataagtacttagaaaagtgacgctgaacaattacatagctttaaaaaatatagagccatctaatgccattttacctcattcaactcttttttgtaagaaatgtgtctttttaaatttttataagacttctgttaactaggcagtgccatggaaagaaaggaagctgctgtaaagtgtgcagcacttctaagtggagggaagcaaaataaatttagctttaacaagtaccccagagggaacattcgtgctttaaacaatgactttacacataatactgtgaagagagcaacacgttttttgtaagatactgttatgaagaattcctggcaaattaccattctcactttattttggggcatcaaaaacaactaagtatttgattatgaccacaaaaaattcatctcaggagtcaaatgtgccttggccttaaaaattatgtgcttactattgtgaaacaatcctgtttctcatcccagattcagaatgcctaagaaataatttttagtgtaagaagtatcactccaatttagtcattaaaaataatctgtagtcctttaaaaaaaaaaaaaaaggtatgtaatttccaatacaagtctttggagtaaatttgctttttaaagtttcaacaaagtttccattcatttgatatgtgacatgtcaattccctttttttttttttttacatatgctgaaatgctgcactagtctttggtttcataaaaccaggtttcacatataatttagcggacgcn

SEQ ID NO: 9725 - DNA, 3679 bp, Homo sapiens
  misc_feature 1, 2, 3, 4, 3659, 3660, 3661, 3662, 3663, 3664, 3665, 3666,3667, 3668, 3669, 3670, 3671, 3672, 3673, 3674, 3675, 3676,3677, 3678, 3679: n = A,T,C or G
nnnnccgccggagtagacgttagccatggaaaccgagagctggcccgggcggggccgcggtgagctcgttattcggccgccgcagcttttctgcctccgcattcgggcactaaccaacctcccggcgggatcgcccagcccgggtttacctgcaaaaatgcggtccctgggatgccttcgcgtcttctcttccctcgggtgacttgaggtttgtggtaaatatgccagctctagaacacatgaatcagattttacacatcttgtttgtatttttaccctttctgtgggcacttgggactctgcccccacccgatgcacttctcttatgggcaatggagcaggttttagagttcggccttggaggctcatctatgtcaacccacttacggttattagtaatgttcatcatgtctgctggaacagctatagcatcatatttcattccaagcactgttggtgtggttcttttcatgactggatttggtttcttgctgagtctgaacttaagtgatatgggtcacaaaattggaaccaaatctaaggatttacccagtggtccagaaaaacatttttcatggaaggaatgccttttctacatcattatattagtcttggctcttttagaaactagtttgcttcatcactttgctggcttctcacagatttctaaaagcaattcccaggctattgtgggctatggtttgatgatattacttataatactgtggatacttagagaaattcaaagcgtatatatcattggaattttccgaaatcccttttatccgaaggatgtgcaaactgtgactgtattctttgagaagcaaactaggctcatgaagattggtattgtcagacggattttgctaactttagtatcaccttttgccatgatagcatttctttcattggacagttccttacaagggctccactcagtgtctgtctgtattggattcacaagagcctttagaatggtatggcagaatacagaaaatgctttattggagacagtcattgtatcaacagtacacttgatctccagtacagacatatggtggaacagaagcctggatacaggactcagactcttactggttggtatcatacgtgatcgtttgattcagttcatctctaaattgcagtttgccgtgactgtgcttttgacatcatggacagagaaaaaacaacgtcgaaaaacaactgccactttatgtatactcaacattgtcttttctccattcgtgttggtcatcatagttttttctacactactctcttctcccttactccctcttttcacccttcctgtgttcttggtggggtttccccgacctattcagagttggccaggagcagcaggcaccacagcctgtgtgtgtgcagatacagtgtactactaccaaatggtgcccaggttgactgctgtactgcagactgcaatggcagctggaagtttaggtctcctcctacctggatctcattacttgggccgttttcaggatcgtttaatgtggataatgattctggaatgtggctatacttactgctctattaacattaaggggttagaattgcaggaaacatcctgtcatactgcagaagctcgcagagttgatgaagtttttgaagatgcttttgagcaagaatacacaagagtatgttcccttaatgaacactttggaaatgtcttgacaccctgtactgttttgcctgtgaaattgtattctgatgccaggaatgttctatcaggcataattgattctcatgaaaacttaaaagaatttaaaggtgacctcattaaagtacttgtgtggatacttgttcaatactgctccaaaaggcctggcatgaaagagaatgttcacaacactgaaaataaagggaaagcacctctaatgttgcctgctttgaacactttgccacctcccaaatccccagaagacatagacagtttaaattcagaaacttttaatgactggtctgatgataatatttttgatgatgagccaactatcaaaaaagtaatagaagaaaaacatcagttgaaagatttgccaggtacaaatttgtttattccaggatcagtagaatcacagagggttggtgatcattctacaggcactgttcctgaaaacgatctttacaaagcagttctattaggataccctgctgttgacaaaggaaaacaagaggacatgccatatattcctctcatggagttcagttgttcacattctcacttagtatgcttacccgcagagtggaggactagctgtatgcccagttccaaaatgaaggagatgagctcgttatttccagaagactggtaccaatttgttctaaggcagttggaatgttatcattcagaagagaaggcctcaaatgtactggaagaaattgccaaggacaaagttttaaaagacttttatgttcatacagtaatgacttgttattttagtttatttggaatagacaatatggctcctagtcctggtcatatattgagagtttacggtggtgttttgccttggtctgttgctttggactggctcacagaaaagccagaactgtttcaactagcactgaaagcattcaggtatactctgaaactaatgattgataaagcaagtttaggtccaatagaagactttagagaactgattaagtaccttgaagaatatgaacgtgactggtacattggtttggtatctgatgaaaagtggaaggaagcaattttacaagaaaagccatacttgttttctctggggtatgattctaatatgggaatttacactgggagagtgcttagccttcaagaattattgatccaagtgggaaagttaaatcctgaagctgttagaggtcagtgggccaatctttcatgggaattactttatgccacaaacgatgatgaagaacgttatagtatacaagctcatccactacttttaagaaatcttacggtacaagcagcagaacctcccctgggatatccgatttattcttcaaaacctctccacatacatttgtattagagctcattttgactgtaatgtcatcaaatgcaatgtttttattttttcatcctaaaaaagtaactgtgattcttgtaacttgaggacttctccacacccccattcagatgcctgagaacagctaagctccgtaaagttggttctcttagccatcttaatggttctaaaaaacagcaaaaacatctttatgtctaagataaaagaactatttggccaatatttgtgccctctggactttagtaggctttggtaaatgtgagaaaacttttgtagaattatcatataatgaattttgtaatgctttcttaaatgtgttataggtgaattgccatacaaagttaacagctatgtaatttttacatacttaagagataaacatatcagtgttctaagtagtgataatggatcctgttgaaggttaacataatgtgtatatatttgtttgaaatataatttatagtattttcaaatgtgctgatttattttgacatctaatatctgaatgtttttgtatcaagtagtttgttttcatagacttcaattcataaactttaaaaaacttttaataaaatattttccttccttttcaaaaaaaaagaaagaaaagaaggagaaaagcannnnnnnnnnnnnnnnnnnnn

SEQ ID NO: 9726 - DNA, 1371 bp, Homo sapiens
  misc_feature 1369, 1370, 1371: n = A,T,C or G
gtgcgtaggtggagcggttgaagcaaggtgggtgtgaagccccgagagtggtgctttggtcggactggcacactccgggcagctgggagagtgacagggaggctgagaaggggccgctggatcccgcagctggcgcgcacatagtgtctgctgccctgcttaggacagttctctttgcatccgtgaggagccaagacaagtcacaactgcaagtgagggggttgccaaagaggttgatcgataggacctgggaggaatccagggtccaaggagggaaggaactcaagttgcagttctggaacagaaggacctatagatgtggagtatcttgaaagatggtgtgtggcgacagaagcaagtgctggcggagtcctgacagtccagctgctgcaggtgggggggtcatcttgaaaatgtccccctccagggtcgtcagccgaggcatcttcctcaggtagagggataaggattaatcgccagtttggacccaccgtgactcacgccgtcaagaacggcccgtggagatccaggacttcggagcgggaaccagggcgcgccatcctctccagccgaacgccgcctccggcgatgccccccctgggctccgcgacccagcgcggtgcagggagaggcttgaggagtttccagcccggggaagcaaggcgaaggcccggggcctgcagcgcccgcagcgggattcccggcgagcgccagggcgcggaggctgctcagcgcgggcccggtgcacggcagcagagcggccagctggttgtagctgaggtccagggtgtgcagccccgccggcccacccgggccccagcgcagcgcggcgatgcggttgtggcgcagggtcagcacctgcagctgctccaggtggccgagctcggaagtgctcagggcgcgcagcaggttgtggctggcgtcgaggctgcgcagtgtgcgcggtaggcagccgggcaggcgctccaggttgcggttcgccagggtcaaggccgtcgcatccgcggcgggcagcccctcgcagggcgagtcggtggcgttgctgccactgctcccccaggggccctgctgagtgacccggaagagcgggaccttctcctggggagggtctgcccagctggggcgcagcaccgtcagcagcagcagcggtagggtttgccgcatggcgtctggaagtggtccttttggagtgtggcttctctggatgcacctctgaagttctcagttttgttttatagattctagggaccactgatttggacagcaactcagctatgaactccagagggaggcctgtctcccagctgcctctctcccacaacccccatccactgagagggactgagatactccagtctttcccattgcnnn

SEQ ID NO: 9727 - DNA, 1605 bp, Homo sapiens
  misc_feature 1: n = A,T,C or G
ncgcgtgtcctgtgacaccaacccccccatttcgccccctttttttcaattcccagtcacactttgcgcgttaaccccctctcaataaagtacaacagccttaaaaaaacctctgagcctttgtcagattaactataacagtgtagtgtagtttttaaaattgcagttgaaaagtttagctgtcttggaagtcaaatttatccaattgttcagacttctgttactacttaatatgaagccaccatgctggcttggacagaattaatttcattcatgttatggagaattctatattacaaatctggtcccctataatatgaacagtgagcagtcagaaatatacaaagggttaaatagggtaaagactttggccaagaaaggaaaggccttagttctaccatagagtatcttctctaattaaaatgactgggaaatatatggaagcagaaaccagcacaaagcactacccatctagaaataatctttcagttaaaaaacaactctcaaaaccagcactcatttctctaagataggttataagtattttacgatttcttgttatattaaattgagttaaaggtactgacaagtcaatatgcaaatgggtttaaacactaatttgatttctcttctgactagctctggagagctgtgacatctggatgttggtgtcactcacacaggtaggtggtagagaactttcataacaaaactacacactccacaccaactgggcaccagcttccaaacccaactccacttcaggtcaaacaaccttaaggaactacctatagtctagttaaacattaaatagtattttcaagaaaatacctttttttgctttgcaacttaatatttttcaatttcctagattaaaagttactgattttgaactttaaatgctgtaattcatataggggtgcgaatatgctcatgaaaaacaaaaggctattattccattttagaagtcttaaatgtgaatgaatttctagaaatctaccacagtatctgttttttacaatgctaatctttgtcaaatgggatttgccagtggttgattaactcaagtgattaaaatacaaaagacataaaatcgattccagtaatcatcaatgatacagcctaattaaaatcagcccaattaaaatatttcctggaatatatctatagggaatttttagtgtttcactttggttttttttttttttgagatggagtttcgctcttgtcacccaggctggagtgcagtggtgcgatctcggctcactgcaacttccacctcccaggttcaagcgattttcctgcctcagcttcctgagtagctgggattacaggtgtgcgccaccacatctggctaattttgtatttttagtagagacggggtttcactgttttggccaggctggtttcgaactcatgacctcaagttatccacttgcctcagcctcccaaaatgctgggattacaggcctgagccaccatgcctgacctaatgttttactttggcagtgttggtatacatacaagggctaacggtatggggtcccaatattatactataaaaccatttaatcaaatttttgaaaagtcggaaaaactgcggac

SEQ ID NO: 9728 - DNA, 1534 bp, Homo sapiens
  misc_feature 1344: n = A,T,C or G
cgacccacgcgtccgagcagcctggctcatggctgtgtgcggcctggggagccgtcttggcctggggagccgtcttggcctgcgcgggtgcttcggcgccgccaggctcctgtatccccgtttccagagccgcggccctcagggcgtggaagacggggacaggccacagccttcctcgaagacacccaggatccccaagatttacaccaaaacgggagacaaagggttttctagtaccttcacaggagaaaggagacccaaagatgaccaagtgtttgaagccgtgggaactacagatgaattaagttcagctattgggtttgctctggaattagtcacagaaaagggccatacatttgccgaagagcttcagaaaatccagtgcacattgcaggacgtcggctcggccctggcgacaccatgctcctcggcccgggaggctcacttaattccctctgctccttggctcctcagagtataccacgttcaaggcggggcccatcctggagctggagcagtggatcgacaagtacaccagccagctcccaccactcacggccttcatcctgccttcgggaggcaagatcagctcggcgctgcatttctgccgggccgtgtgccgccgggccgagagacgtgtggtgcctcttgtccagatgggagagaccgatgcgaacgtggccaagttcttaaacagactcagtgactatctcttcacgctagccagatatgcagccatgaaggaggggaatcaagagaaaatatacaagaaaaatgacccatcggccgagtctgagggactctgaaatcacagaaagtgggagcttggaggatccctccatggcgatggccgtggagagaggagcttgcccttctggggtcctggttcctgaagagctcacccagagaggctcaaagcagccttttgtcccagctcagctttgatctacacctcttgccaccttcctcaagggactgtgaccctttggggattttgtccctgaccctgcttccccaagctctcctgggtcttggagggatgtgggaatgaattggcattgcaggaaagacaggtaaagtgattgctgcaatgagaaggagctgtgcggaaaaggaataaaagttggaaaggctggaaaaaaaaaaaaaggccagataaaaatgctcaatagatggaaaccaagaaaacttgaaaacagaggacacactaaaaaaaaaaaactcgagggggggcccggtacccaattcgccctatagtgagccgaattacaattcactgtcccgcgttttacaacgtcgggactgggaaaaaccttgcgttacccaacttaatggccttgcagnacattcccctttcgccagttggcgtaataccggaatagccccgcaccgatcgccttttccaacagttgcccaccctgaatggcgaatggcaacattgaagccgttaatacttggtaaaacatcccgtaaaacctttggttaaataggtcatttttaaccaaatagccgaaatccggaaaacccctttaaa

SEQ ID NO: 9729 - DNA, 2756 bp, Homo sapiens
  misc_feature 1, 2, 3, 2753, 2754, 2755, 2756: n = A,T,C or G
nnnggtccgactcggtccactagtaacggccgccgtgtgctggaaccggcgaccgcgccagccgcgaatcggatctctatggagatggcctaggcgatatccctgagctgagagcatcaccctgtccccgaatccttctttcctctctgttttgtttttcattcccctccctctctcccctccccctccagtccacgacgactggctgttgaccctgttcaggcctcggtgaaggcttttggttactccccttcccaccccatcccttaattttattcttttgaagagtgcatttcaagctgccaaggtggagagagggattacagaaaggagaacaccttatttcagcttttatttttatgtgataatctacctttaagaaaaggtgtaccatacctgagagcaccaggaagtcgcatgagagatcacctgatacatgaacgtatgatgttccatctgcgcattgatgaataggcagcatttacaaattaactgatgtgttgctgtatatcatctctttgatgattgctcctcttctttgtatcctgtcttataatttcaacacatttgcgatactcaatgtctattctaaattaaccatgttttgtaccacaaactcattgcccatggatctgttgctgaaacaaggaagtcttaaacaagaagtggaatctttctgttatcagattgtgtctgaatcaaatgatcagaaggttggaatattacaaagtgaagataagcagttgcaaccttcagtttctaaaaaatcagaaggtgagctttccagggtcaaatttatatccaattccaacaaaataacatttagtaaaaaaccaaaaagaagaaaatatgatgaaagttatttgtcttttggatttacttacttcggaaatagagatgcacctcatgctcagtgtgtattatgtaagaaaattttatcaaatagctctttagcccctagtaagcttcgaagacatttggaaactaaacatgctgcatataaagacaaagacataagctttttcaagcaacatctcgattcacctgaaaataataaacccccaacacctaaaattgtgaatacagataatgaaagtgctacagaagcatcatacaatgtaagttaccatatagcgctgagtggagaggctcatactattggagaattgcttatcaaaccttgtgcaaaagatgtagtgatgcggatgtttgatgaacaatatagtaaaaaaatagatgcagtacagctatcaaacagtactgttgcacgtcgaattaaggatctagctgctgacattgaagaagagcttgtttgtagactgaaaatttgcgatgggttttcactgcaactagatgaatcagctgatgtttcaggacttgctgtgctgcttgtgtttgttcgttataggtttaataagtctattgaggaagacctactcctgtgtgaatctttgcaaagtaatgctaccggtgaagaaatattcaactgtatcaacagttttatgcagaaacatgaaattgaatgggaaaaatgtgttgatgtttgtagtgatgcttctagggcagtggatgggaaaattgccgaagctgtcaccttaataaaatatgtggctcccgaaagcaccagtagtcactgcctattatacagacatgcactggcagttaaaataatgcctacatctctaaaaaatgtgctagaccaggcagtacaaatcatcaattatattaaagctcgaccacatcaatccagactattaaaaattttatgtgaggaaatgggtgctcagcacacagcacttcttctaaatacagaggtgaggtggctttctcgaggtaaagttcttgtaagactttttgaacttcgtcgtgaacttttggttttcatggattctgcttttcgactatctgattgtttaacaaattcatcttggctgctaagacttgcatatcttgcagatatttttactaaattaaatgaagttaatttgtcaatgcaaggaaaaaatgtgaccgtttttacagtatttgataaaatgtcgtcattgttaagaaaattggaattttgggcctcatctgtagaagaagaaaactttgattgttttcctacactcagtgattttttgactgaaattaattctacagttgataaagatatttgcagtgccattgtgcagcacctaaggggtttgcgcgctactctgttaaaatactttcctgtaacaaatgacaataatgcttgggttagaaatccatttacagttactgttaaaccagcttcattagtagcacgggactatgagagcctgattgatttaacatctgattctcaagtgaagcaaaattttagtgaactttcactaaatgatttttggagtagcctaattcaggaatacccaagcattgcaaggcgtgcagtgcgtgtacttcttccttttgctacaatgcacctgtgtgaaacggggttttcatattacgctgcaacaaaaacaaaatataggaaaagacttgatgctgcacctcatatgcgaatccgacttagcaatattacacctaatattaagcggatatgtgataaaaagacacaaaaacactgttctcattaaaattggaggagtttgcatgtctcatgataaccaaatgtaagatgaaaataaaagatgatttacttcatctctggtatttgggggatttaaataaaatgattccatttttttatactatttagattttaagaaggctaaagaatcaaacgnnnn

SEQ ID NO: 9730 - DNA, 4397 bp, Homo sapiens
  misc_feature 1, 2, 3, 4396, 4397: n = A,T,C or G
nnncgtccgctgcttctctataggtgacccccgccccaaagtcccccctcccactaacttctctttgagaagagagtaaaaccgaattcgagagaaaagaggcagtaactattcgggaggaggcagactggagtgggcaccagtcccgcggagcctcagcgcccgccgcgtccctccctccgcccctttcgcccacacctacccgcccccgccggcccggctctcagtcgcgtccgcccgaggctgcagcagcgcatcccggggcatggcgcggcgggggcgcggagggctcggttcggagggggccgggagcccgggcgccctggagtgaggaggaccgggagctggctctggaggctgcggaggcgacgccggagagaacgaagcctcggctgggagcggatctttcgaagatggtttggctgccttggagatttggagatctgatgccacgatgaggactcacacacggggggctcccagtgtgtttttcatatatttgctttgctttgtgtcagcctacatcaccgacgagaacccagaagttatgattcccttcaccaatgccaactacgacagccatcccatgctgtacttctccagggcagaagtggcggagctgcagctcagggctgccagctcgcacgagcacattgcagcccgcctcacggaggctgtgcacacgatgctgtccagccccttggaatacctccctccctgggatcccaaggactacagtgcccgctggaatgaaatttttggaaacaacttgggtgccttggcaatgttctgtgtgctgtatcctgagaacattgaagcccgagacatggccaaagactacatggagaggatggcagcgcagcctagttggttggtgaaagatgctccttgggatgaggtcccgcttgctcactccctggttggttttgccactgcttatgacttcttgtacaactacctgagcaagacacaacaggagaagtttcttgaagtgattgccaatgcctcagggtatatgtatgaaacttcatacaggagaggatggggatttcaatacctgcacaatcatcagcccaccaactgtatggctttgctcacgggaagcctagtcctgatgaatcaaggatatcttcaagaagcctacttatggaccaaacaagttctgaccatcatggagaaatctctggtcttgctcagggaggtgacggatggctccctctatgaaggagttgcgtatggcagctacaccactagatcactcttccaatacatgtttctcgtccagaggcacttcaacatcaaccactttggccatccgtggcttaaacaacactttgcatttatgtatagaaccatcctgccagggtttcaaaggactgtggctattgcggactcaaattacaactggttttatggtccagaaagccaattagtgttccttgataaatttgtcatgcgtaatggcagtggtaactggctagctgaccaaatcagaaggaaccgtgtggtggaaggtccaggaacaccatccaaagggcagcgctggtgcactctgcacacagaatttctctggtatgatggcagcttgaaatcggttcctcctccagactttggcacccctacactgcattattttgaagactggggtgtcgtgacttatggaagtgcactacctgcagaaatcaatagatctttcctttccttcaagtctggaaaactggggggacgtgcaatatatgacattgtccacagaaacaaatacaaagattggatcaaaggatggagaaattttaatgcagggcatgaacatcctgatcaaaactcatttacttttgctcccaatggtgtgcctttcattactgaggctctgtacgggccaaagtacaccttcttcaacaatgttttgatgttttccccagctgtgtcaaagagctgcttttctccctgggtgggtcaggtcacagaagactgctcatcaaaatggtctaaatacaagcatgacctggcagctagttgtcaggggagggtggttgcagcagaggagaaaaatggggtggttttcatccgaggagaaggtgtgggagcttataacccccagctcaacctgaagaatgttcagaggaatctcatcctcctacatccacagctgcttctccttgtagaccaaatacacctgggagaggagagtcccttggagacagcagcgagcttcttccataatgtggatgttccttttgaggagactgtggtagatggtgtccatggggctttcatcaggcagagagatggtctctataaaatgtactggatggacgatactggctacagcgagaaagcaacctttgcctcagtgacatatcctcggggctatccctacaacgggacaaactatgtgaatgtcaccatgcacctccgaagtcccatcaccagggcagcttacctcttcatagggccatctatagatgttcagagcttcactgtccacggagactctcagcaactggatgtgttcatagccaccagcaaacatgcctacgccacatacctgtggacaggtgaggccacaggacagtctgcctttgcacaggtcattgctgatcgtcacaaaattctgtttgaccggaattcagccatcaagagcagcattgtccctgaggtgaaggactatgctgctattgtggaacagaacttgcagcattttaaaccagtgtttcagctgctggagaagcagatactgtcccgagtccggaacacagctagctttaggaagactgctgaacgcctgctgagattttcagataagagacagactgaggaggccattgacaggatttttgccatatcacagcaacagcagcagcaaagcaagtcaaagaaaaaccgaagggcaggcaaacgctataaatttgtggatgctgtccctgatatttttgcacagattgaagtcaatgagaaaaagattagacagaaagctcagattttggcacagaaagaactacccatagatgaagatgaagaaatgaaagaccttttagattttgcagatgtaacatacgagaaacataaaaatgggggcttgattaaaggccggtttggacaggcacggatggtgacaactacacacagcagggccccatcactgtctgcttcctataccaggttgttcctgattctgaacattgctattttctttgtcatgttggcaatgcaactgacttatttccagagggcccagagcctacatggccaaagatgtctttatgcagttcttctcatagatagctgtattttattatggttgtactcttcttgttcccaatcacagtgttagcactgaagctataaattacctggtcattttgtgatcacaagagtctatgcaaaaaaaaaaatttctttaccccagattatcagatttttttccctcagattcattttaacaaattaagggaagatattttgacacaagaaagcaggaacgtggagaaattggagcaggaaaagaaattatcaaagcaatagaaatagcttggtggtcctatggtgtttttggaagtatttggcattgctaattgagcagtccatatagtactacttttagaagaaacaaaaagtctgttttttaaagtaatgttttttcttatgagaaaaaggtttagatagaattgggttttattaatattaatttaatgctattagcaatttccatatactatattgtggaaaagactgaagaatacaattctgagaaatataaaaaaattttaatggtatactcatgttgaaagataaatgttgctaagtcctggtatgatggtgtgagcttccttggggaagtacttcttgagttatgtaactaacaggatgttttactacagatctggatggctattcagataacatggcaaaaaatgatagcagaagatcattaaaaacttaaaatatattttattagaaaacatttatctatgaatgaatatttccttgatgctggtctctgcacacatatgcttggttacttgcatgcattcattggttgttcaataagtgagatgattacagataacttaatactgtattttccttatatggaaaaccgttatagacccaataacaactaaacctttcaaaagaaaatattttctattatgaatgttgattttcataccaaagaagatggagagtctaaaatttggatatgattcttatgtttttttaatagaaaaccttcttcaagtttattttcctaaataaacatcataattgtgaaaattctctagactattcttcttctttgttccattatattcaaaatgcattaacattttccaaaatttttgaagagagatctttatttggacgtgtattcattaaatatataaagtagtgtttgaann

SEQ ID NO: 9731 - DNA, 4054 bp, Homo sapiens
ccgcactcagcgccacgcgtctaaagcgcaggccccgaggacccgccgcactgacagtatgagccgcacagcctacacggtgggagccctgcttctcctcttggggaccctgctgccggctgctgaagggaaaaagaaagggtcccaaggtgccatccccccgccagacaaggcccagcacaatgactcagagcagactcagtcgccccagcagcctggctccaggaaccgggggcggggccaagggcggggcactgccatgcccggggaggaggtgctggagtccagccaagaggccctgcatgtgacggagcgcaaatacctgaagcgagactggtgcaaaacccagccgcttaagcagaccatccacgaggaaggctgcaacagtcgcaccatcatcaaccgcttctgttacggccagtgcaactctttctacatccccaggcacatccggaaggaggaaggttcctttcagtcctgctccttctgcaagcccaagaaattcactaccatgatggtcacactcaactgccctgaactacagccacctaccaagaagaagagagtcacacgtgtgaagcagtgtcgttgcatatccatcgatttggattaagccaaatccaggtgcacccagcatgtcctaggaatgcagccccaggaagtcccagacctaaaacaaccagattcttacttggcttaaacctagaggccagaagaacccccagctgcctcctggcaggagcctggcttgtgcgtagttcgtgtgcatgagtgtggatgggtgcctgtgggtgtttttagacaccagagaaaacacagtctctgctagagagcacttcctattttgtaaacatatctgctttaatggggatgtaccagaaacccacctcaccccggctcacatctaaaggggcggggccgtggtctggttctgactttgtgtttttgtgccctcctggggaccagaatctcctttcggaatgaatgttcatggaagaggctcctctgagggcaagagacctgttttagtgctgcattcgacatggaaaagtccttttaacctgtgcttgcatcctcctttcctcctcctcctcacaatccatctcttcttaagttgacagtgactatgtcagtctaatctcttgtttgccagggttcctaaattaattcacttaaccatgatgcaaatgtttttcattttgtgaagaccctccagactctgggagaggctggtgtgggcaaggacaagcaggatagtggagtgagaaagggagggtggagggtgaggccaaatcaggtccagcaaaagtcagtagggacattgcagaagcttgaaaggccaataccagaacacaggctgatgcttctgagaaagtcttttcctagtatttaacagaacccaagtgaacagaggagaaatgagattgccagaaagtgattaactttggccgttgcaatctgctcaaacctaacaccaaactgaaaacataaatactgaccactcctatgttcggacccaagcaagttagctaaaccaaaccaactcctctgctttgtccctcaggtggaaaagagaggtagtttagaactctctgcataggggtgggaattaatcaaaaacctcagaggctgaaattcctaatacctttcctttatcgtggttatagtcagctcatttccattccactatttcccataatgcttctgagagccactaacttgattgataaagatcctgcctctgctgagtgtacctgacagtagtctaagatgagagagtttagggactactctgttttagcaagagatattttgggggtctttttgttttaactattgtcaggagattgggctaaagagaagacgacgagagtaaggaaataaagggaattgcctctggctagagagtagttaggtgttaatacctggtagagatgtaagggatatgacctccctttctttatgtgctcactgaggatctgaggggaccctgttaggagagcatagcatcatgatgtattagctgttcatctgctactggttggatggacataactattgtaactattcagtatttactggtaggcactgtcctctgattaaacttggcctactggcaatggctacttaggattgatctaagggccaaagtgcagggtgggtgaactttattgtactttggatttggttaacctgttttcttcaagcctgaggttttatatacaaactccctgaatactctttttgccttgtatcttctcagcctcctagccaagtcctatgtaatatggaaaacaaacactgcagacttgagattcagttgccgatcaaggctctggcattcagagaacccttgcaactcgagaagctgtttttatttcgtttttgttttgatccagtgctctcccatctaacaactaaacaggagccatttcaaggcgggagatattttaaacacccaaaatgttgggtctgattttcaaacttttaaactcactactgatgattctcacgctaggcgaatttgtccaaacacatagtgtgtgtgttttgtatacactgtatgaccccaccccaaatctttgtattgtccacattctccaacaataaagcacagagtggatttaattaagcacacaaatgctaaggcagaattttgagggtgggagagaagaaaagggaaagaagctgaaaatgtaaaaccacaccagggaggaaaaatgacattcagaaccagcaaacactgaatttctcttgttgttttaactctgccacaagaatgcaatttcgttaatggagatgacttaagttggcagcagtaatcttcttttaggagcttgtaccacagtcttgcacataagtgcagatttggctcaagtaaagagaatttcctcaacactaacttcactgggataatcagcagcgtaactaccctaaaagcatatcactagccaaagagggaaatatctgttcttcttactgtgcctatattaagactagtacaaatgtggtgtgtcttccaactttcattgaaaatgccatatctataccatattttattcgagtcactgatgatgtaatgatatattttttcattattatagtagaatatttttatggcaagatatttgtggtcttgatcatacctattaaaataatgccaaacaccaaatatgaattttatgatgtacactttgtgcttggcattaaaagaaaaaaacacacatcctggaagtctgtaagttgttttttgttactgtaggtcttcaaagttaagagtgtaagtgaaaaatctggaggagaggataatttccactgtgtggaatgtgaatagttaaatgaaaagttatggttatttaatgtaattattacttcaaatcctttggtcactgtgatttcaagcatgttttctttttctcctttatatgactttctctgagttgggcaaagaagaagctgacacaccgtatgttgttagagtcttttatctggtcaggggaaacaaaatcttgacccagctgaacatgtcttcctgagtcagtgcctgaatctttattttttaaattgaatgttccttaaaggttaacatttctaaagcaatattaagaaagactttaaatgttattttggaagacttacgatgcatgtatacaaacgaatagcagataatgatgactagttcacacataaagtccttttaaggagaaaatctaaaatgaaaagtggataaacagaacatttataagtgatcagttaatgcctaagagtgaaagtagttctattgacattcctcaagatatttaatatcaactgcattatgtattatgtctgcttaaatcatttaaaaacggcaaagaattatatagactatgaggtaccttgctgtgtaggaggatgaaaggggagttgatagtctcataaaactaatttggcttcaagtttcatgaatctgtaactagaatttaattttcaccccaataatgttctatatagcctttgctaaagagcaactaataaattaaacctattcttccaaaaaaaaaaaaaaaaaaaa

SEQ ID NO: 9732 - DNA, 1989 bp, Homo sapiens
  misc_feature 1, 2, 3, 24, 1971, 1972, 1973, 1974, 1975, 1976, 1977, 1978,1979, 1980, 1981, 1982, 1983, 1984, 1985, 1986, 1987, 1988,1989: n = A,T,C or G
nnnccgccgcatgtaaggattttntcatctgagtacaataatgcacaatcagtgttgctcaaactgctttatacttataaacagccatcttaaataagcaacgtattgtgagtactgatatgtatataataaaaattatcaaagaaaattaactgccagtcatttgtaaatgctgtctactcctgaaagccttccttcatctctatttagttaataatgtgctctctcctcctgttttgaaaccccatagctctctacacctcttattgtacatcactctacttgtgcattggagttctgtttctatatgtacttattcacctgttgcctaaacatgcactgttcctaaaaggtacagtttttgctcaaaatatatgaaaggaaagataatcagttcttaaagtttggtatgctaaataagcacccagggaacttacctgctccacctcaccccagaaattgattattcaggtctggaatatggctcaggattcttaattttcaaccaacacaatatagaatcctgtcagttatccttggatcatttgctaagtgatcttgcaaaatcaaaactcctttgagactatttcattttcagaaatattttaaaacttgttcagaaacatcttaaaacttgttagcatataggaaaagtacaatgcttggtgtaggtaggttattatttggtcatttccctcaaaccatccagacaagccactcttctaccacaagctggtagaaatccttaggcacctttctgcttctgcactgctatcactttcaggtgtctaaggcttctggaaggctgttgtcataacctggagccatacacctaatgtacgtctggggaaaggacaccaattaaagaatctagagctaggatgatgttacataagacagggcacaatggagatggactctggatccctgcatctgaaagaaaaaggcaagaaaatgcagggcagggaaaatcctgaaggtcttcactgaccatgaattaaaatcctaattgacagttttacaaacaaaaaccctcgttttagtacttgtgttgtttttgtttctgttttaacaagcttagatttattattgtgccttttatggaagatgaggaagaaataggaaagcagtaaaatgaacaatgagaatctgttacccaaactgatataaactccctcagaaagaaagatactactccctaatcctggaagtgttaagtggcaataatgatcaaatgttgtaaaggggattgttactacagctaatatgaaatgggaggctggactaaatctaacctttctacccttgatttcaattctaaaaggacacgtaataccattgcagaaagaaaaggcagttccaaatgataaattttagagttgttttgctaggatgcaagagaaattggataagtggaccactcatacgttgctggtgagatatgaaatagtagagccactgtggaaaatattcttggcagtttcttataaaactaaacatacatttaacatattacttggcatttgactaattgaccagtattcctgaaaagttaaaatttacaattcccaaatggtaccttagcaccttcattattattagcaataccggaaagaacctggatgtctttcaaaagagtggatggtacgatgtccaccatggatcctaaatgtattgtagggacaacattgtactgtctacatggtggacccaggaaatgtagggcgtaggaggggagaaccaaaagtttaaacagagttatagatttatttgtaaaaactttaaaataaaaagtgaagtgggggtaaaaaaatacaaaaaaaaggaggggggatatataccaggagggaagaatcacatagtaaagagagacagaaaataaaagggcggaatatgagaataagatgaacaagatgagtaagaagtaatgttgattatttgatttgatatgtattgctatcattcattcgnnnnnnnnnnnnnnnnnnn

SEQ ID NO: 9733 - DNA, 1140 bp, Homo sapiens
  misc_feature 1, 2, 3, 4, 5, 6, 7, 8, 9, 10, 11, 12: n = A,T,C or G
nnnnnnnnnnnngtcggcggtgttgcgtgtgtgtggggtcgtggtgtgctgcgtttttgtttggcgtgtggggtattgggctgttggtgtgggcggcttcggactcgtggtcgggggggcgaccggcagcacatggcagtggcggacgggctggccgtgcctggagtggggatagttgtgcggtggagagtggtgggtgggggccctccctgccccctcagctggtgagcatcgtgtcgcgtgtctccctgagactttcaattaggcagagtaagatgaggagtaactgtttgtcttctgctaagacctaatcatataatcgttatttcaaaatttggcccagtaacagttggattgactacaaagaaaaattaggccttgtccatttatccagaggtttccttcaaaacttttaaaaaattttatcacctaaaatggattttaaattatcagaatttagatgtagcaattaagtaaatcttaaaggaggtgtagaattcctttaagaagttattgtctgcttcccattgcagcaatgtctgcaatactactttttttaatgagcccagaaacaattctctgcaactgtaaaaattatgccagaatgcaagtttttggttagtgccatagtttcgttttgttattgaaaatgggataagtcatgatttattccctcccttctatggaagggtaaaaaatgttaatggtaagaaagttattacattttctatttcaagattgatttaataagaaatttacctaccagatttatgatgttttatttttagctacaagaaataaaagcttaaaaataacagaaataaaagccttagttttatatatgtaatttttataatatatacacaaacttggaaataacttctgtcagtatcccttattattgtcacatgattttgaacttctggaccaatataattcagctgaaagaaccaagaaaattaatatgcacctgtactctcaaattagtctctttagaaggaagtgaagagagactcttgaaagataaatcacagtgttactacatcttattgaaaatttctatttatctctatagatgttccacataaagaaatcttaaatcgtacgcgtgggcggaattgataaaactgacatgttagt

SEQ ID NO: 9734 - DNA, 6578 bp, Homo sapiens
acccggcgatgcgctgccttttaacccttccccccccttgtttgcacacgccgcccagccttttttggtgaacccccatgtcgcccggttcttgggaccgtgagcactctctacctctggcccccccacaaaatgtttaaaactttctggcccgcccccccaaaccttttttttttttttctttcattcattaaattttattttgaatagcttcaatcaaaaaaggtttcataagattatttacaatgctgaatgtacaattatgaatgtatgcctttttgacaagagggtaccattcttgagcagcaatacaattttaaaaatataaagatgcagtatcatttctgatataaagttacttaaaaaaatccaaggtcttagggaattcacaaatcataactagaagtaacttttattaatttaatgtacacataattaccaaattttaatacattaaaaatgtgtaaatgcccacagactgtacaaaaattaacaccccattttgttaaaagttcccaaccacctcccaccataaatatacaaaaacctatttttagatatgtcaaaattgcatgcatgaatattttctaaagcttgaattttgctcttcactggataatgttatctatagctgtttctgtaacagactacataaacattgatatattatttaccatgcctttgaaactgtgcaggactttcataaacatggggaacaaaataaatagagtaaaaactgcaacagttttgtttagatgcaagtgcaattgggaaagctttcgaatttcaggattataaaactactataaaagtatttattctgttgttggcttagccacttgtattcaagcattatttgcagcattgctttacagcagttggtgctagaagatacaaaacatatagttaccactatttatacttgagggagaaaaaaaactttaaacaaccctgagggagacacacattaaaaatcttgttatttatttaaaaagttaaaaagttacatatcattatttaacaattactttcccagacatttctgtcctttaagtatgtgcataaataaaatttaaatcagcaatattcatcttaatacatcaaaataatatatgtacagattttaaaatttaggtctgtataaactcaaataatttaatgtgaaattcagaatcaaaattactatgtaatggtaacctacgagagaagactcagtctatctatggcactgagtagaacccacacctggcttcacaggcattcttcaaataacattctcaacgtgaataacccaccttgtctatattcaaatctaacttcctacaaatgcttttccagccacctaaacacctcattcctttgaaaacaatatggacagaagagatataaaacccttactaactctaaatgttaaaaaagtggggggggggggtgtcaaaaatagctctttatgatcatgctcttaaagatgttaaatacaatcggataattgaatttttaagctgctacttagcaattactttcattatatgcttcagtacttaaaccaaagaataaaatgcacaattgtggaaatcactgaagaataacacgagcatatttgaaattaatatggaaattataaaatgatccagagaataagtaactatagaaaatagtgctaattcacagctcaagaggtctaagatgcatagcttcatagaatcattcatggaacaactgttatcatctaatgtgtattaatagcatattatacatttgatggaaaacttcgattatatttttgcaggaatcatcagtggcaatagcagtaacagtgatcctgagtgtaatttctatttttctatagttaccaaacatcatccaggtctttgcagcataaagagtgagaaccatttggtcctaaaattctaggtaaaatttggtaaatttgtaaatatatgttgggaaaagaatgatcagctagaagtagaaagcacgagcaagcatgttactggctctggaagaacagagaacaatgtcacactgttttcatagtttagcgtccattttatagcacgatcagttttctgtgttgtggtaactgtgggcgttgccagactgctggatccacctataaaaggtgttttttaaaagttaccttaattttggcaagaatttaaatgttaatcaggccaaacagaaaggtgaaaaatgtttctccacatctcttttggctcaatgaatgtcaattttttaactttatttcctcaattttttttctcccagaaatttccgcatcaaatatgctcatttgtaacgatccaattcaaaatagacatgttctgacctctggcgccacctaatggcataaaacaaactcatcaaattcatattgctttgaaaaaacggcagccattcaaatccagtattttttaagcctcattattgataagacagagacatacatcaaacctcaaaaaattttatgaggtaaaattctaacttaaaaaaaactattatcctatgtctttaggtaattgaaaacatagaagaaaattttaaaaaaccatttaaaataacacaaagcctgacagaaacaaatttgaagaaacgttaaaagatgaatctacatctactgccgaaagaaatgaatcttatttcctagtgaaaaaggttctacaacatttaacagaagcaaattagactgccaacaccacacatagcacaggagccatttaagagctttgagaggcgtctcaagaaggcagtgaagcaccttgctgattagaaaaataaaacccaggcagtttgtacagaaaatataaaaccagaaatggagattacctgagttgttctataagcaacaccataaacactcattcctaactctagaccatcatagggaattggcatatgtttatacagaattctttggaagaaacattggaatcaaatgaaaacaggctttcagtatattttcactggaggctaattaacactcatcttctttttatcaatcacaaacttacagcctgtatataaacacagacttttctaacaagagggttgtgagcataaatgtgaagaggtaaactagtctcaaaaactaatgttgaaaaacctaccaaacaccaaacttctcctgtacccaatataaagaatatcactgaaagtaacaatcaagaaaattctggaaatgtatgtaatatttgggttgctgaatgaagatataggactttatggattgattgttaatttaactgttaggacgatatatttttctgtttttattttaaggaagagcaaagctgtcaaataagctactatatcagaagggacataaactgaactagtgccattctgacacacaggatcagaaactcctaaaatcacatattcctgaatactgctatcagcaataccactgagaccgattcactgctatgttatggtgatgatttgacatgatccattctccttaactaaagctttagcttctgtggttgtctgaggttttggtggccattctggatcaaccaagagctcctgcgccagatacatgtactttgcctttggtgtcttctttctacagcccagggcccagggtaagcagcattttccccaccgatccactgactcctccactgtgatagacacaaaggcattgacaagaacaatgatgagcatagttacacgccactgatatggtacacacactatctgaagaacctggtcaacagaggcaactggatacaacatgatgaataatataaaaatatataaaaaaatcacagaaaaaacaaaaaaataatttttgtagcaaggttgcctgaagggttttccttttgaaaaggcaattgccactatgaggtactgaaaactggaaataaaaaacactgtggtattttcataattttgtatattatgttcatcaagttcggtttcattgtctacgtgtgaagaattccaaaacccgcttcctgttgtattacaagcatctgattttggatgccacacttcataccaaggttgctgtttgacccaaaaaaaacccaaagattgaaatccaatgcagatgataatctgagacaaaacggagaagagaagggccccagatataagacccgaaggtggtctttgtgccacaagttctttccaggcaggatttaaactcattgtaaataccactaccaaaatgattgccagatcaatgaagagaaactggaagtctcctaggttacttaagatagaatacagcagagtaacactgaagtactggataatgctgtacaatgccatgaatttaaacacacagaaggaagttattaaagcagcacggccttccctgataaggtttggcacacaggaaatactaggagtcttagaggtaaagggagatgccactgaagcttcgagctccgataaggaaatgcctccgtgtgccctcttcaaagcaccacaatcatttgcgccatcaccacacatcccaacaaaataatcaacattttgcaatgcttctatcaactgtgtcttctgatcaggtgccatacgggcaaacacggtgccatgcaacatcaacttaggaacaaggtcttgaaaatgctccagtatcactgagaatgattttccattcattgcaaaatgataacgagtcatttgaagatcctctaagctatcatggaccaatttaaccggaatagcctctgggtcaattgctgatggatgactgcactgcgtgagggagtctgcataatgccaatttattttggcaactttcccatcctttggaggtaatgcttcagcaataatcactttatcctgaggtagaatcattccacaatctctggccacagagacagcagtcaacatactgtcacctgtgaccatgacggtgcgaatgttggctttatgcaaatcttcaagtactgcaggggtttcttgctttaatttgttctgcattataattaatcccataaaatccatgttgttctcaattgcatctctgctaatattctgtactttatgccatgtcagttttgactccaattttctgtgtgcaagagcaatcacacggaagccctgtttagtgaagtcttccaaaacgttttgaaaatcgacaggaactgcttcaggtttacagagaccggcaatggcctcgggcgctcctttcatgtaggcgtccattttcctatcccccagcaccctggcaaccacactcatacgttgcaaagcagaagaaaatgggaactggcgaacaattcctatctcataagtagctggaagttcaaacagctccatttcttggtttcctgcaggggtagattcaggaagcagttgtttgggaggacgaaccactgtgggcataattcgattatgaagtgctgtttcttcttcagttgcttcttccagaatccatccaatagcctcaaacattttcagatcaagtggatcaccagagagcactccttcaatttttgtaagtgaatgacaagtagccatacaagcaacaaactgggattttaccaacatctcattgcacacattttcttctggtgaaagaaatcgtgcattttccactcgttgaatcccccaaagatctaaaccatcttcagttagagttccagtcttgtcaaagcaaacaagattgagctgtccacaaatatttattctttgaggactgatacagaaaataccgatttttttcagtcttctctgagcatacacaataccagcagtcattgcagcaggaagtgcagggggcacagtaattgtgataatatcaagagactcgataattatgaccccaacttgtacctcatttaaaatgctattaataatagtgtagataaacccaatgccagcaactgccacaagacatagtagaaacaagtaggcatctctgtagagtttaaaatcagttggtttgggatacaatatggaacgaacaagctgtcctttggaagtactaaatcctgttctaacaactatggctttgacgagttctccagtgtagaaacgagtctgaataacagttgtcccacaaaacaaagtatgtcgtttatgtgtttctggattatataattcatctcctattcctttcacatccactgaaggatttggcaaattagtctttgtcactggaacactttctcctgttaacatgctttcgtttacaatgcaggtaccattaataagcacagcatcacaaggcattattgtcccatttaatggaatgaccatgacatctcctggcacaaggtcggtagaaaagatttcttctatttcttcatttactctacaaactgaaactcttacggtactatgagttgccaccatgtcatgcaacataacatattgctttctaatggaatatagtgagcttacgattgatactatggacataaccacaatagctagagcatagtaatagtattcatcagtgctccacagtataacactgaacagctggaaaatgtaaaatgggttgagaacctctttaattagaagcttaaaaacagaaggcacttttacagcaatttcatttactccataaagcagttttctgtaggcatgcatcccctttgtccggacgcgtg

SEQ ID NO: 9735 - DNA, 7765 bp, Homo sapiens
  misc_feature 1, 7761, 7762, 7763, 7764, 7765: n = A,T,C or G
nacccacgcgtccggggccgtgtgcgcctgcgtggtgtctgtcccggccgcagccccacgccggctgcagctccgcgagccgagccggatctcgagcggggtacacgggctgaggcggcggcggcggccccgccccggggctccattgttaaggcggctgcggctctgtcggctgttcagctgcgctccagtcggcccaggcgccgcggcgaggagcgagcgctgcgaggtggcggcctgagcaatggaagagttaatagttgaacttcgtctctttcttgaactcctggaccatgaatatctaacctcaactgtcagggagaaaaaggcagtgataaccaacattctgctaagaatacagtcatccaaaggttttgatgtgaaggaccatgctcagaagcaggagaccgctaacagcctgccagcccctcctcagatgcccctgccggagatccctcagccctggctgcctcctgacagtgggcctccaccattgccaacatcctccctcccagaaggttattatgaggaagctgtgccactgagccccggaaaagctccggaatacatcacatcaaattatgattccgatgcgatgagcagctcttatgagtcgtatgatgaagaggaggaggatgggaaggggaagaaaacccggcaccagtggccctccgaggaggcctccatggacctggtcaaggacgccaaaatctgcgccttcctgctgcggaagaagcggttcggccagtggaccaagttgctctgcgtcatcaaagacaccaaactgctgtgctataaaagttccaaggaccagcagcctcagatggaactgctactccaaggctgtaacattacgtacatcccgaaagacagcaaaaagaagaagcacgagctgaagattactcagcagggcacggacccgcttgttctcgccgtccagagcaaggaacaggccgagcagtggctgaaggtgatcaaagaagcctacagtggttgtagtggccccgtggattcagagtgtcctcctccaccaagctccccggtgcacaaggcagaactggagaagaaactgtcttcagagagacccagctcagatggggagggtgttgtggaaaatggaattaccacatgtaatggaaaggagcaagtgaagaggaagaaaagttccaaatcagaggccaagggcactgtgtcgaaagtcactgggaaaaaaatcaccaagatcatcagtctgggaaagaaaaagccgtccacagacgagcagacctcctcagctgaggaagatgttcccacctgcggctatctgaacgtgctctccaacagccgctggcgagagcgctggtgccgagtgaaagataacaagctcattttccacaaggacaggaccgacctgaagacccatattgtgtctattccgctccgtggctgcgaggtgatcccgggtttggattctaaacatcctctgacgttccggctgctgcgcaacggccaggaggttgcagtattggaggcatcttcttctgaagacatgggcaggtggattgggattttactcgcagagacgggatcgtccacagacccggaggctctgcactatgactacattgatgtggagatgtctgcaagtgtcattcagacagccaaacagaccttctgtttcatgaacaggcgtgttatatctgctaacccatatctagggggcacctccaacggctatgcccaccccagcgggacggcacttcattatgacgatgtcccgtgcatcaacggctcgctcaagggtaaaaagccccccgtggcgtctaatggggtcacaggaaaagggaagactctgagcagtcagccaaagaaagcggatcccgcggctgttgtgaaaaggacgggttcgaatgctgcccagtacaagtatggcaagaaccgggtagaagcagatgccaagcggctacagaccaaagaggaggagctgctgaagaggaaagaggccctgcggaataggctggcccagctccgcaaggaaagaaaagaccttcgagcggctattgaagtgaacgccggcaggaagccgcaggcgatcctggaggagaagctgaagcagctggaggaggagtgccggcagaaggaggcggagcgtgtcagcctggagctggagctgacggaggtcaaggagagcctgaagaaagcgctggcgggcggagtcaccctggggctggccatcgagcccaagtcagggacatcgagtccacagtctccagtgttccggcaccggaccctggaaaactcgcccatctccagctgtgacaccagtgacaccgagggccccgtgccggtgaacagcgcggccgtcttgaagaagagccaggctgccccgggcagctccccctgccgagggcatgtgctgcggaaggccaaggaatgggaattgaagaacgggacctaggggacagcagcaccactccagcctcagagactgcacacccccttgcctgtatcctcatctgtgtgacggcaggaagctctgcccagagtggcctcagctgcacgactccagaggctccacgactgagctctgaggccagtgcctgtcccccaggcccacttgtattctttctactgtaaaatggcgcctttaaaaaagatgtaagactttggttcccaactttgttaaaaaacaaaaaaagtgatggaaaggtgtttgaaaggatgctatcaggcgaagtgacatctttctaaccagataggccattgctttcaccgattccaacccagccctggactgaggatggatggttccatgagcccccagatgaaaacctggattcgacagggaagagcttggatccccggctgccccgggcatgagtgtggctggccatgggcactgggctcgccttgcacgcccaccaggagggccaggggcatacgcagtcctgacgtggactttgtgtcttggcgtaccctctccacgtgcccgtccccctcgtcatcagaggtaaaggcatgagaaaatcgagctgtgaaacgttttttaccttttattattattttttggacagatgcttttgtcaccaagacatgaaaagctgccattcttcttaacctgttttttaagaatgtctttttactgtgtgtcacacttagatcaaggagttttcagaggttccttattttattaattaattatttgtgctgcttttgacaggtagcagagggttttaatacttcactaacagtacaccctcctcccccttgggctagcatccccagcccttaatccacgtcggagccggcaggtgcttctcacaccaggagcctctgggggcaggggctggctcctcgccgctgtacaggacgtttactgctgcttggggccagggcagtcctttgaaagggaagcaagttccggaatttgttccctcatggaactataacaccttagagcaagaggcaggaattccagggcctcctgcccctccccttcctccagcttgtcaagttaaaccactaatgtgttggtgggcctggccgtgctgcctctcctgagtagggtgggtgcaagtagggcctctttcccagctttcttgcttgccttctgtgcaatatttcttggagaatttggatgcctaaggcataaaggaaaaaaacagagttcatagtttgagctggtatttaccccctgggtttaaaaatcagattaacttcttggtctcccggaggctgctgtcaggaattctccagtacgggaagatgcagtcacttatgacgaaataagtcacccctgaacgcctccgcaggcagattcatggagaccagtcccagtagcaaccgccccttccccaagcatagaatacagaggtgccatacttggtgtaagccttccttctgtccactgtccagaatgtcctttttcacacagaggaagagatggcgggaaaacactgactgactccttgggtttcccccagacatactttcagagcgctagctgtgtggtgcacgggactttacagttaggattcatgtttaaggtggtggcgcttgaggcctgcaagggccacgttggattactgaagcggaaagcggtctcccatgtataagaaaaagttttacaacacgaattggaagctgcttgagtccacctgaacttgaattgattgcaaagccatctgccgggaacggttttgggttcctgagccatcagccagcctttctttcccctctgatgcacgttcctcccggcctagtccgtggaggcccatcacaccagcatccgtgacgccagcttcccactaggacatccaggcaggtcgggcggggacgccacacacctcagggccgtccgctgcactgccatagaggagccctccctccagtggtcacttcccaccattgcaggcagacttcccaccattgcaggcagctgggcccacttcatatcacacaaaatgaattttctataaagggaaaaaagtttgctcctccatagatttttgctgccttcgggtcaaatagtttccctggttgacgctcttgggccactctgattggcagcctgctttgccaaagagaactgtgtgaggttttggtggttagtaagagaagggggagatggccagcctgaagtcacggtcctggcccagcacaggtgggcagcagcgagctggcaggtgaagtgtgagcagcacgcaaagtgtcacgtgggccttagccgtcacccaccagcttcctcaccaggcaaggaggccccggagccttagcagggacttgcccgacggcacagctgattggtgctcgactcccagcatgcatattttgttgtaaaaacccaggtttgtaattcacatccacaaccctaagccttttaaagcggaggcaaacgttaacgaaccccatcgtggtccatggagcctttcaaaatgggtgccctggaggggcctgacagtgggttccttccatggcggatactcccttgaaatttcacattccatcaaagtttaaagcatttacttcagaataagttatttatgtgtatatgttcaataaatatagtttttaatttatatctgtacatattagacacacgcgagccatcttgccagaattctgacagtgatgtcattttattcccctcccaaaacatgccccaggaacaagcaccccttgcctctgtggcagctgcgagtgtgtctgatttcataacgaagccaggctgagggcaagaggcccgacaggcaggccagggtccccggagaagccggatttcttcgcaatgtcactggtacttagcagatggtcgtgttcacaggggctagccacctgtactacggtgccgaccgcaatgcgaggaatgtggtggccacgcgatggagctggccggaggacaggtcaggtgagggggccgacccctgcggggctcagggctccttccattctaaccttgagccacagtgtcactcttcagggctctgctcctggctctattttgttaaggtgtcatcagccttcaacctccatttatatatttttataatgttaagccactgaccaactttttcatagaaacaactatcagatttgagggctccctttgtccccctgacctgggcacaggcatgggccatggctccctcttcccagaatctgcggggaactggggcaaggcccatctgtctgcaaggctggtagctctctccctcggcttccagagtccacggcagttgcaaggtaaccagtgtggatctgctgagtcaccccaggcaccagacttaccccaggagcatgggccactgtccatggggccttccttgagaccttcccttggggctggcgggcggcggcttaccagctgggtcagtcccatctcgcccctctgtgcctatgccctggcgttgccaggcttaaccttcccctgtatcttactcatcccagaattattactggccatttctaaatagacaaaaactaccctaaaatgtggagatttactccttttgaaaagtctgtttcaaaaagtgtggcctcagctctggaggccacccccaggaaggagtttgaggttcattgtcattatggccacagtttggtgcttgtgcacgggactcaaagggcagcgtcgaagctggggttaggtgtagggttgtgagcaaagctcccctgtttgtggccacaccttccctttccaaaaaggctattaattctactcacccactatttggggggatgtaaattttgcccacagactttgccacccaggtgaggtgctgtgttcatgcacggaactgatgtcattagacaccatccaaggatgggcagcctgcagtgtggccggcgactgccatccagagaaaaggcaccttgtgccacagggcggggccgacaccctgagctcacaggtggcccctgcattcaggtggatgtccatccttgaaacagcctcttctgggaacacagcactggaggtctccaggcatcagggttggccggcagggtgccctgcagcttacataaaggtcgtggcaatgtttcaatgttaaactaaactattgccttcctcttacttttcctaaaatgattttctaatgggaacagtcacttcaagttcatgacatagtttgaaggaggataattcattttttcctggttgtcactgtcttcttatccccttggtgggctgggttcatactgtgaaataaactaaaatgaaaccaaaacgttcctgccgtaaatacgtggcacagcactgcagaaaaagcagtcacctctattcgtgagtccccaagccatagcagggcgtctgtaaaagaagggaaactgcacccaggaagtggtgggcgtcagacgcatcctttcgcccgtagttcatgaaatagttccggctttggtcttccagaaaatctcaacttcaccgtgcacaagtgttaccgggtctttttagtgtagccatggaagatactttcaaaaggacatcttcagatcataagtcttaggaccaaaggtgtttttaatgagataatctttttgattttctaacaagaaaggaaatattcactttacattttaacatcaacttttaagtgatattcagaattaattgaccatggtgatacgttgtaaaatgttttcatattaagaatgtaattatttccttattgtattttttaaaagctaaagtcatatttaaaattctctttgaaagaaacaggcaaagaaacagcaaagatttttttaaattaaatatgttagtagtgcccacttcaaatgactgtaaatatattttcactgtttctcaatgtatttaattcataaagtaaaaattttatgaaaagaaacttgcaaggaaaatcctagttttcagtccactcgccccactttgtagtagcttcactgaatttcctgctttcctggttgaattttctactgtttcacgtggtgtaaccctagactggcgcccttggcgtgcccctttgtgtatgaataaacttctctcccccaaaagaaaaaaaaaaaaaaaaaaaaaaaaaaaaaaaaaaaaaaaaaaaaaaaaaaaaaaaaaaaaaaaaaaaaaaaaaaaaaaaaaaaaaaaaaaaaaaaaaaaaaaaaaaaaaaaaggggggggcctttaaatttttttaaaaaaaaacccccccacccccccccggaacccgaaaaaaaaaaaaaaaccccatgtgtggtgaaaacttttttttcccctttttaaggggtcaaaaaaaaaacaaccccttaaaaattttcaaaaaaaaaccnnnnn

SEQ ID NO: 9736 - DNA, 3016 bp, Homo sapiens
  misc_feature 3006, 3007, 3008, 3009, 3010, 3011, 3012, 3013, 3014, 3015,3016: n = A,T,C or G
tggttattttaaaaaaatatttttagccttttgtaaccttagtcttgttttgagcaatcatattccatgttttatgtgcttttatatttttataataaatattaaagtaaaactattaaaaattgtttatccacgtaccacttaacttaaaatcatctcagggccatctagtggtatatatgtgtactaccatttaggaaactgctataacacataatttcatgaagtaatacctaatacggtgtagttccctggtcatattttatacaattcaaccatataaaagggtgtcactgtaatttcagtagtgtgggtttacaaataatctgctggttagcttattaccttgaggttttgaaaaactagaattatattgaggcatttcataaacatatctcttgcaccctcttcatggtggagttaaggataacttgcaggtggttggccaaggcccaatatagatgattataacatttagaattggcaattagaagttgataatccatataggaccataggatagctttgaaatataaattaccaaattatatttgtaaatgatagagaattatattcttaacaggaaaatatatactttttctacttcttgtaaatactaaacacagttttggggttttgaaatcactttgtcttcagcaagcatcattaataagttcaggtgaatttagcttttaatggggcattaagctggcatttttgattttctttttaaataatagcaaaaatatcatttttcccctctagaatacaaattattgagctgtcaaaacttggcatgaagaatatactattacttaggcttaaatatcaaaagataatggctacttcagtgtcatattgttgaaatagaaacaaaactgcatggttcaagcatcctaatcattagtgccaatgaatgatagtgcaggcaagtgccaggtaaatgcctagtcccacttcattctcctcctgggaagaaaggataagaatagtggctgcagataaggtatggaaatatttaatcaagactgtcttaaacacataagcatatataatgttatcaaggttaccagtgctgccttttgatatatggatgaacataactgtaattaaagacggtaatagtatacaaaatgcagagcttaaaaatgtcattgcataaattctatttttaagatgttgaaatgttagtagtgtttttcttgatttttaacagtgaaataatcaagaaatatatctttaagttaatctgcaaagtcaggctgtgttctgtaaaaggtatttcacagcattttctgtttaactgtaatctgttatcatggagatctcagtaccagagcagtgaattttttgaaaaatattgactgtctttattcaagtcagccatcttggtaagagcagttttcatccccccactgcccaaatgtaaatatagatcacctaatttttcttacagaaagatactgttaagaggcatgcacttttcatcggatggtcacttgtttcttgtttcaaagacaaatatttggatagatacccatacttgctatgagtcagtcacagtgctgacactattttaacatcatttaaaatggaaagatctacatagatttttgacattattccagaagtaacatgcaagtaagatatttttattgtcattttcttcatgttaaaggagctacttatgaaacctatttttttatggcctagagtttatgagtgctttttccttgtcttctgaaaatggaataaattggatttttgatacttaagaatttcctaaagatagcttttgtaacagagaaagcatgttaaattacacatgggtctaccttaaaatttttgttattatttccaaagcacatttgcagggatagtaaatgtatatagtagcaagtctactataataacagtagtttctggatcacctcaggaaacagtataaataaataataatgtttacttatcatcaacataactaccatagtgtttgaatgaattaaagtttcattagctttatttagaaactggtttaccccagcttcccgtttttttccaaatataaaatgataaaatattgattatgtgccaatattgtcatttaatgttcttaaaacttgtgaagaccacctttttaggtagctgagaagagtgatagttggtatcaatttgttagccaggcatggtggctcatgctgttgggaggctgagtggggaagatgcttgagcccaggaggtcaaggtgcagtgaaccatgatcacaccactgcattcctgcagagtgacggagtgagaccctgtctcaaaaataaataaaaagaagacagttggtatcaattcaaagaatagttgatgcctgttctcttattttaaatgtaccaacagagctattttactgtatttaatagttcttagcttccatgtgtgatgattttaatcagtgattttatgcaatagctgaagaaaattttctgaagattaagctgtgaaatgtatcaaccctcatctaatttttgtagtacaaaatgacatcctgattccttttaaaaattcacgtttgtaatttatttttctgcatgtattgatcaaataagcctaaaccaaatatgtgcaataaaattgagcctttagatagtatctagtgcattgttaaaaaagattatttctagatatttatgatgtttttgtttacgtagaaatcatgaattcaaatctgtttaaaagatgaccatattttcaattttgagtaatacatattattcctactgttttttttcttttgccatgtttctagaaaacagctgtgtaacttattgagcgttattttggtgttactgtataaaacatgcataataaatattcttatttatctcatgttaaaaaaaaaaaaaaaaaaaaaaaaaaaaaagggttattgacagaatgttttatcaacaatgcatttgcttatgtcttagtcccctcaggctgctataataaaataccatcaactatgtggtgtannnnnnnnnnn

SEQ ID NO: 9737 - DNA, 4654 bp, Homo sapiens
  misc_feature 2693, 2773, 2798, 2808, 2818, 2819: n = A,T,C or G
aatcgggttggttggcttgagatcgcctgtttatatttcccccccttgcgtatatccccgggggtgtccggtgttgaaaaaagccacaaaacgccacagtcaaattacgcatcatggaattggcaatggttaaccgaattgcttggaagacacttgggaccaaagtggaagccgggcttcggtcacattttcccgggggctaattacacccatctgcgtgttgtcaatcacacctttacagcctgtatatcacaacagacttttctacacgaggtttgtgagcaatcaaatgtgaaagaggtaaactagtctcaaagatctaaatgtttgaaacaacgctacctacaccaaactttctcctgtacccaatataaagaatatcactgaaagtaacaatccagaaaattctggaaatgtatgtaatatttgggttgctgaatgaagatataggactttatggattgattgttaatttaactgttaggacgatatatttttctgtttttattttaaggaagagcaaagctgtcaaataagctactatatcagaagggacataaactgaactagtgccattctgacacacaggatcagaaactcctaaaatcacatattcctgaatactgctatcagcaataccactgagactgattcactgctatgttatggtgatgatttgacatgatccattctccttaactaaagctttagcttctgtggttgtctgaggttttggtggccattctggatcaaccaagagctcctgcgccagatacatgtactttgcctttggtgtcttctttctacagcccagggcccagggtaagcagcattttccccaccgatccactgactcctgcggtggctgtgtggtgctgaaccgatactctccttgtttgtctcggttgaacacaactttccaaaggaccatgtcaaggaagaagttctccactgtgatagacacaaaggcattgacaagaacaatgatgagcatagttacacgccactgatatggtacacacactatctgaagaacctggtcaacagaggcaactggatacaacatgatgaataatataaaaatatataaaaaaatcacagaaaaaacaaaaaaataatttttgtagcaaggttgcctgaagggttttccttttgaaaaggcaattgccactatgaggtactgaaaactggaaataaaaaacactgtggtattttcataattttgtatattatgttcatcaagttcggtttcattgtctacgtgtgaagaattccaaaacccgcttcctgttgtattacaagcatctgattttggatgccacacttcataccaaggttgctgtttgacccaaaaaaaacccaaagattgaaatccaatgcagatgataatctgagacaaaacggagaagagaagggccccagatataagacccgaaggtggtctttgtgccacaagttctttccaggcaggatttaaactcattgtaaataccactaccaaaatgattgccagatcaatgaagagaaactggaagtctcctaggttacttaagatagaatacagcagagtaacacctgaagtactggataatgctgtacaatgccatgaatttaaacacacagaaggaagttattaaagcagcacggccttccctgataaggtttggcacacaggaaatactaggagtcttagaggtaaagggagatgccactgaagcttcgagctccgataaggaaatgcctccgtgtgccctcttcaaagcaccacaatcatttgcgccatcaccacacatcccaacaaaataatcaacattttgcaatgcttctatcaactgtgtcttctgatcaggtgccatacgggcaaacacggtgccatgcaacatcaacttaggaacaaggtcttgaaaatgctccagtatcactgagaatgattttccattcattgcaaaatgataacgagtcatttgaagatcctctaagctatcatggaccaatttaaccggaatagcctctgggtcaattgctgatggatgactgcactgcgtgagggagtctgcataatgccaatttattttggcaactttcccatcctttggaggtaatgcttcagcaataatcactttatcctgaggtagaatcattccacaatctctggccacagagacagcagtcaacatactgtcacctgtgaccatgacggtgcgaatgttggctttatgcaaatcttcaagtactgcaggggtttcttgctttaatttgttctgcattataattaatcccataaaatccatgttgttctcaattgcatctctgctaatattctgtactttatgccatgtcagttttgactccaattttctgtgtgcaagagcaatcacacggaagccctgtttagtgaagtcttccaaaacgttttgaaaatcgacaggaactgtttcaggtttacagagaccggcaatggcctcgggcgctcctttcatgtaggcgtccattttcctatcccccagcaccctggcaaccacactcatacgttgcaaagcagaagaaaatgggaactggcgaacaattcctatctcataagtagctggaagttcaaacagctccatttcttggtttcctgcaggggtagattcaggaagcagttgtttcggaggacgaaccactgtgggcataattcgattatgaagtgctgnttcttcttcagttgcttcttccagaatccatccaatagcctcaaacattttcagatcaagtggatcaccagagagcactncttcaatttttgtaagtgaatgacnagtagccatnctagcaacannctgggattttaccaacatctcattgcacacattttcttctggtgaaagaaatcgtgcattttccactcgttgaatcccccaaagatctaaaccatcttcagttagagttccagtcttgtcaaagcaaacaagattgagctgtccacaaatatttattctttgaggactgatacagaaaataccgatttttttcagtcttctctgagcatacacaataccagcagtcattgcagcaggaagtgcagggggcacagtaattgtgataatatcaagagactcgataattatgaccccaacttgtacctcatttaaaatgctattaataatagtgtagataaacccaatgccagcaactgccacaagacatagtagaaacaagtaggcatctctgtagagtttaaaatcagttggtttgggatacaatatggaacgaacaagctgtcctttggaagtactaaatcctgttctaacaactatggctttgacgagttctccagtgtagaaacgagtctgaataacagttgtcccacaaaacaaagtatgtcgtttatgtgtttctggattatataattcatctcctattcctttcacatccactgaaggatttggcaaattagtctttgtcactggaacactttctcctgttaacatgctttcgtttacaatgcaggtaccattaataagcacagcatcacaaggcattattgtcccatttaatggaatgaccatgacatctcctggcacaaggtcggtagaaaagatttcttctatttcttcatttactctacaaactgaaactcttacggtactatgagttgccaccatgtcatgcaacataacatattgctttctaatggaatatagtgagcttacgattgatactatggacataaccacaatagctagagcatagtaatagtattcatcagtgctccacagtataacactgaacagctggaaaatgtaaaatgggttgagaacctctttaattagaagcttaaaaacagaaggcacttttacagcaatttcatttactccataaagcagttttctgtaggcatgcatcccctttgtcagtcctgcactatgcttttcataaattgacgtacaagaaacaccttcatccagtccctttaagaaatcaaaattgtgaatggtatcattccagaaatattttacactatggtgggtgaaataacgaatctgttgtgattcagtctgtgaatatttactgatcctgtgcctattttcttcagtgggattctcaattaaacaaactgcatggccatttgaaagcttattagacatagattttggacttgaaactgggtaagtttccaaagaaagaacgcgaatttttgcacaaaaccacattttgaattcatcagtagtcctcagcagcactacttcacagtctttaattgcagctctgacacaggtcgctttcacccgccactcaggcatccaatagaggaggaggaggagaaacccatcagagcaaatcactcctaaagaaactatggcaagcttccagcgactcaaattgtaaccataaatctccatttcatcttcttgaccctgattgatggtcttcctttcttccctgtccatacctacagtggattaaaggtccagtgcttcaaacaatggaagatcactcctatgtccaaacaccaagattcagggatgtctgtcagatcggggccgctcactggccgccgccgcgccgcctcctccgcggcctccctcgcggccggaccagccccaggggccgcgggggacccggccgccgctgtcgccgccgccgcctcgcctcagcccagcccggacgcgtg

SEQ ID NO: 9738 - DNA, 2207 bp, Homo sapiens
  misc_feature 1, 2204, 2205, 2206, 2207: n = A,T,C or G
nactggttgtgcagcaggggaggcaccccctgaggtaagtttgggggtgctttgcctgaggtcaccaagggcgcggccctgctactgctgctggatgcactcgcgggggtcccacccagacagaggctgttcgcggtgttcatgctactggacaggctgacgcctgaggatgcggaacttgagacggaggtcgctgccgtggagaaggtggctgaggactggtgggaagaggcgctctccacactggcatgtgtgtgtgacgtgctcgaggagagggctgcatgtgcagagaggctgctctggtggctggagagcgaactgctaagctgagagagagggctgctagtcaggtcgccagtgtgctgggatgtggacggcagaagtgcagtgcaggaggtggtgctgggcagggagctcacagacgggagggcacagggagggcctgttgtctttggagtgtctagtgtctgctgacttcgaccaccaccatgtccctgagctactctgataactcacaggctttgtatgggatcctgtatgcacagaactctggtcataagaggaagacattgctactggactagcagaattcagtgatgagcttgtcagactgcaggaggtaatgacggaagttgtatatgtggagttctgtactgcactggtcattgataaagatgtattcaaaggctcacttaaagacttcgaatacaagctgatgggaatctgattactattttcactgcttggagctgatccaaattcagagagagaaggttctgacccaaattccagagccccaaactgcacatttaatcctgtgacatctgctgaaccaggcatttccactgcagaagctgggatcttagaagctgggggtatccgccgcttagcaagtttgatgtgtttgggctgtggctggtggacagacacagagatattttcaatggtcgtgctgggaagctgcaaaagcttgttcacagtggagggactgtctccaggtgttgattctcgaagttttgcctgggaaggaaaggactccaaaccaggaggaggaacagtgactgcctggctctggtgctgttgtcgctggctcaactggctaagaactggggatggctcaggttgagatttgaagtcaagatgactgaggactgaggactgggatgttgggggcttgaggtcccaagaagtagtagttgtagggtgacttgtactattctgctgtgtacttggggtggtggtaaactggcccaaactcggagctttcaactggtccaaaatctgggagctggtgatgtttgccatttttggtggtgcaagctctccaaatcctgagccaaggacggatgacaggctctgaggagaacaggagttgacggcagtggagctgccagtccctggtgccatctgattgttgtgttgcgaatttgtgaagacaagggcttggccaaagccctgctgttgggaagtttcaaaggagttggcttctgaggcttgactgtgaggaacaggcttctggagcaaggctaccagatcaatgctttgcccaggtaagatgtgattctctgctggagcagatgaggcagtgaagacctttgtttcagaaagatcttcagtccagtcttctgttgtccactcttccacagaattcttccaagcccctttgagtccataagaacttttgtttgacagatcctgagctatgttgtgagtatttgatgccagttcagttccctcatctgcaccattctgagcagcttcccaaactactagctttgtcccacacacatctgtagatgtagaatctgaatagtctgcaggattaaatgtccccatgccttgggttgagaaccttcctgcccctctccctctgccacgtccaaatcctctaccccgggctcgcttgccacgatctgaaggtttgtccacttgattgcaatcaattccattttcttcacctctaaattctctgccacgattaaccgcctcttcctttccggttgttgtttccacgtccacgactcgattctttctcgcttttcttctctctattctctttgttttctgaattttcttttgcaaaattctttttcttacaccctacagtctcccatgaagttgtgtctgaattcccttccagcaatatattaatagctttgttcacatctccattacaatcatgtagggccacatgcattttaacnnnn

SEQ ID NO: 9739 - DNA, 1579 bp, Homo sapiens
  misc_feature 1, 2, 1579: n = A,T,C or G
nnatggaggaatattagtttggttcacgatgttttctacgttttctcgtttggcgtgtatacctgggcttaaagtggggtatggtgcctgggtttgggccccttttttttgtttgcataaggtaatttagcggaaagagctcaaaaaattggttgtggagcggaacccggccatacggcaatagagtaaacggactgaattaaccgctacccagaggaacgcataaaaagtcttttgccaacgcgtcggaatgtttaaaccacggaacaacaaaggaccactcctaattcacaaatttaagtttggtttatatattttattgacatggttactcaatgtccacatcattccatctgcatcgtcttcctacaaacagtttttcttctactattcggttatttctcctttttttgtttcctatttcagaatcaaatttattttacttgcaaagtcagtggaatatggtttggaaccagtagggcctctaacttaagcccagaacctgtcaaagagaagtgcagtatcattgctaagacttgaacagtttatctctcagaatcttcagttcctttgaatttctcagctcttagtgtaatctgttttatgtgtttgttgtagacttccattatggatagatttccaaaataatttgggtaatcaactggtattttagcattctggtaactaacatgtttaaaaatctaaggctctttttcatgcaaaggagactgatttttgctttcaaaagcataggcaggaaaccttaggttcaaaggtagtaaataatgatgagcaaattgctagtgatgatacagctgcagcttccgttgtgtatttgtttggctcaggtactctagaaatgagaattcttagaattacatagcagaagtgatatgttgcctggataccacactaccagaggaataaaaatgtagttagagtaaggggttttatattttacaatgagacagtgttagtgtaagaagcattccaaatacgccagttctcttaaacccatagcagacatttatatgttaattcctcaatgtctcatttcccaccttttttagaggaagaaaatactcaggctaaaactttcacccaagcataaactcctggggactttacaagaattttgttttttgcactatgtgacgacacgattgtgagaattaaatataggagtgaaaaaccagagaaatggggcaaaatcccagattagtctttcctctttaagcatctgcttcccattttagaaacatgctttcatcaccacattcagcatcaatttttttctttcctctaacctgctcttcttttaaaaagtattctgggccgggcatggtggctcacacctgtaatcctagcactttgtgggccgaggtgggtggatcacctgaggtcaggcgttttgagaccagcctggtcacatggcgaaaccccatctctactaaaaatacaaaaattagctgtacgtggtggcgcacacctataatccagctacttgggggactgaggaaggagaatcgcttgaactcgggaggtggaggtcgcagtgagccgagatacgccactgcan

SEQ ID NO: 9740 - DNA, 1149 bp, Homo sapiens
  misc_feature 1, 2, 3, 4, 5, 6, 7, 8, 9, 10, 11, 12, 13, 14, 15, 16, 17,1148, 1149: n = A,T,C or G
nnnnnnnnnnnnnnnnnacaagacacattgtattatattacaaaaataattacatggaataagccacatacttagtttattataggcatgtctaattgaaatccatgaaaacagttacatttaaaacattctttatgcactatacttgaaaatgtaaaatataataccacttaagtacttcccacattaaactgatttttctttttttaaaaaaatttttcctagtcgttatttagctttcggacaccataatacaatagaacagaaagagtatgttaaaagaaaaatattaggtagaatgttgtaaaacttttaatttacccatcatatttaacatttccaagactattttcctgcgcctcatctgccctcagagagaatgatccccacagtgatgaggggtcagcactctgaaagccagttgacgccagacaagctgctggaacagctggggcacagctccgcctctcctccagcccctcggtcccatgaggccaaacaatgaggacagaggggctgaggggtgtgtccagggcccagtcccacctcagcaggaaggtggcgtcagcactcgcagtcccagcctcacgccgcatcgcagtcccaggggatcttcacacagggagggtgagctggttaagaaggcgggtgatcctccccccggatgcttcgatacttagccatgtcttccggaaatactttagaaagttcttgaatcaacaggcttttaaatttcttcatggtgtcgatcttgcctttaacttgctcatttttagctagagccctctccaggcactctttggtgtagagctggggatttcgaccttgatctatatattcaaaaacttctaacggtacagtaatatcatgaagctgctgtctgcacttgtcaatatcctgtaagccagtaacaataaaattcagcttttggttgagcccggcctggctgctgggctggaagtcactgacgatgatgccgagctgccgaatgttctccacgaacttctccaggtgctcctctaggtggtcaaacttctccgccatcgcctcggcccgtcccccacccacacagcctcaaccagcagcgccgcaggcgtggccctacgctcccgcttcctgcttccctccggccagatacaaaccggacnn

SEQ ID NO: 9741 - DNA, 1392 bp, Homo sapiens
cccgcgtgtatatatctcgtcgtggctcctcttgtaagccacttcattgctcactcactccccgcgtgtgtgatacaaacctcccgttcgcgccggccctcttttttggttggtagcccccgcccctcgtctcttcgaagcccattcttgtgcttgtgcaacattgttcgatcttttcacctactacttgttggtgggcggccccaccatcaacggcgtttagtagatttctctgtctgcggacgggcgacgaccatcaatcttctgtgtgtctgttggtttttttttcctcctctctttttttattttttttttttttttttttttttttttttttttttttttttttttttttttttttttttttttcattttcattatgtagtttttattttagacgaacattattataaaaaaaaagttcacctggaataaaatccatttaaaaaaaacatagcatcagtatcagtacacagttaatgaattggcttaaacaagattaaccacatgacaggtccacttatctgcaggagcttttcacattaagccattggagcaaaaataaaatatgtttaaacatgtacagtaggatagttatatggaaaaactagagagtttccattaggggcatgattttcatcaaacagtttatggtattttgcatgaaaggaactgcagtgtcagctgcaaacaaaataaaagccatctgtaaggccataaaattgaactataataactaaattcacattttaaaaaaaggtaaagtgaaataagttctattagtttcttggcacaagaaatgcaattgcatatggcacacgcatttcaagaaatgaagtaaaatctgaaaatatccctagaataattgtttgctaatttttatttctgtacatttcagtcatttagatttttttcagagtgaacatgacagccattaattttattagtctaaaaaaatgacttattctactctaaaattgtgctagaatttgaaattattttagcatatcctgtccgtctaggtccctctatatcaagggatttcatttttagacattcctttccacccacccctgtgccccccttggatgtaacaaggaaaaaggaatgtctcttctgtttaaaaaaaaaaaattctgagaaacctgattgcagaaatgagtgcttaaaatttataataattaaccaacataatgaaatgtggtttttaaagattgagaactaaatttgtaaaggaatctaagtcatgaacttgaaaagaatgtctgcttaaatgtgtcacttactgatcacaggaaaaactttataagccttaatatagactctgagcattcagaacctgtaaaatggagttataatctcttactagaaacttctgcaaaaacgcaccta

SEQ ID NO: 9742 - DNA, 896 bp, Homo sapiens
  misc_feature 885, 886, 887, 888, 889, 890, 891, 892, 893, 894, 895, 896: n = A,T,C or G
agattatatgagggataagatactcatcaaattgcaaattcttttttttacagaagtgtgggtaacagtcacagcagttttttttaccaacagcatacttaacagacttgctgtgtagcagtttttttctggtggagttgctgtaagtcttgtaagtctaatgtggctatcctactcttttgggcaatgcatgtattatgcattggaaaggtattttttttaagttctgttggctagctatggttttcagtacctcggccgacagtaattcacatgattctacacactattacaaagaaactaagtaacacaaaactaaatattatgtattggttttaatcaattcctagctttcatgcttaaacaaatctatgtcaaaagtaactatgcatattttttcaccataagtttcaccaattagattagagaagatcagaattaaaataaatgtggaccctaaatgctgtttttgaaaaattcatataggttaatgtctacttagtgctaatcagtaaaaggaaaatgaaaagcaacactgcttctaattgtgggggaaacaccctgctatttccccaattccagtgctttgtacaatgactgcaaaacacaaaagcctacaatgacataattccttcccatcaatttgaagggttaagtcccatatatttttctaactgaaacctcaatatgccataatctgtataaagcacacccaggcaaagtgacatcctcagttcaaaaaatagatctatatttcctacattagacatagtcattagattataatcaaaactatgaccaagctgggaatggtattccaagatctttgagaatccttacctaatcctattcccccgcgttaattaattctagaagactttcgannnnnnnnnnnn

SEQ ID NO: 9743 - DNA, 778 bp, Homo sapiens
  misc_feature 1, 2, 3, 4, 5, 6, 7, 8, 9, 10, 11, 12, 13, 14, 15, 16, 17,18, 19, 20, 21, 22, 23, 728, 769, 770, 771, 772, 773, 774,775, 776, 777, 778: n = A,T,C or G
nnnnnnnnnnnnnnnnnnnnnnnactagggaaacttattttatttctagtttagtttatttctagttcaaaaataatctgtaattgctgtaagaaatgtcaaccacttacctaggatgtttgacaattgggatgaagtctacatatactaagtaatggcaagacaattattttattgctcaaaagaaagtcaaaaaaattccatattccctttggggaaaattggcaggatttcaagtatgacctttaagaatcaggaaaagactaacttatgctttaggattaaaacaatcaaataattaaattagttcaattttctaacatagtctctatcttcagttaaagtgcatcattgcatgttatacattactaaaattacacagtgcataattgttaccatgtgactatttaattcagggtcaactgtctaaaggtctcaggtgtcacattaaggttataatctagatgaattgaacaagaaagaaaagatttcttcattagccaatttgtttatgattcaattcctactcttgctaatgatttctttaccttcctatggaaaatataagattctagatctctgtataagatggtttgctttagcttgagatccatcagtgagaattatccatgggcaatgtccagaaatcacattattgctcatagaccttgtagccttgatataatggagaactgtacactgtcttccctttagagcgtagggatgtngttctgatattgggacccattgtacacttggcccaaccagnnnnnnnnnn

SEQ ID NO: 9744 - DNA, 1017 bp, Homo sapiens
  misc_feature 1, 2, 3, 4, 5, 1017: n = A,T,C or G
nnnnncttatatcgaattcttcagcccgggggatccactagtttagagcggccgcccgggcaggtacttgaatcagaaggtccctgcaagccagtatgcttcatttgccagtggccagaaattctctcttgcctccttgattgaggtgtcccagatgtagtattcccacaggggtctggcaggcccctcctgtaaccactccagtcacattttctgctcttgaggcagaggtgacatcaggacgtttacagcctccacatgaattgagtgttcatttacctcagtattaccgtgttcatttttgtcctcgtgctacagttagctccctgccgcctcttgcaggtcttacttcagctcttgcctgtgacccacacagcttctgggctctgcctctgctctaagaagtgctgtgggggtagagaaccaggaaggacatgctgttgggaatgtacacctgggcagaggtggccctgttaagatgtgactgtagccacagccagggatgggatccctgggtctctggaatctgaaacctcaacaaataccagtcttgacccctagcagcagagataagaataaaggggttggtttgctattaagtcagatgggggctctctccttgtcatgctgtccctgtgggtaacagacagggattgaccatcttactgttgtacaggtagctggtggtgttggattatcccattgaagctgggacagctgttcctttctcatagtgataacttgggtctgttgtcctctaaggaacgtgaaacatacacttcttaagctgaaccacgtaaacttgaaattctgcgcactgggagaaatgtgtcctgtgtttcaaaggataaaactgttctaaaggcttccagggtcatgatgggattttttaaataaatgcaaaaaataaaaataaaaaagaaaaaaaaaaggggggggtaaaattccgaggggccagttacgtccgttttgtcaagggccaaggagggttaaagggagggggtaagggggagaagn

SEQ ID NO: 9745 - DNA, 3894 bp, Homo sapiens
  misc_feature 3886, 3887, 3888, 3889, 3890, 3891, 3892, 3893, 3894: n = A,T,C or G
acgcggggtgcgccgggagcgtcatcgcctcctccctccccaagatggcgtccttgctgcagtcggaccgggttctctatctagtccagggagaaaagaaggttcgggccccgctctcgcaactctacttctgccgctattgtagcgaactgcggtcgctggaatgtgtgtctcacgaggtggactcccattattgtcccagttgtttagaaaatatgccatcggctgaagccaaactaaaaaagaatagatgtgccaattgttttgactgtcctggctgcatgcacaccctctctactcgggccacgagcatctccacacagcttccagatgacccagccaagaccaccatgaagaaagcctattacctggcatgtggattttgtcgctggacgtctagagatgtgggcatggcagacaaatctgtagctagtggcggttggcaggaacctgaaaatcctcacacacaacggatgaacaaattgattgaatattaccagcagcttgctcagaaagagaaggttgagcgagatcgcaagaaactggcacgacgtagaaactatatgcctctggctttttcggacaaatatggtcttggaaccaggcttcagcgaccacgagctggtgcatccatcagtacccttgccggactttcccttaaagaaggagaggatcagaaagagataaagattgagccagctcaggctgtggatgaagtggaacctctacctgaagactattatacaagaccagtaaatttaacagaggtaacaacccttcagcagcgtctgttacagcctgacttccagccagtctgtgcttcacagctctatcctcgccacaaacatcttctgatcaaacggtccctgcgctgccgtaaatgtgaacataatttgagcaagccagaatttaacccaacgtcaatcaaattcaaaatccagctggtcgctgtcaattatattccagaagtgagaatcatgtcaattcccaaccttcgctacatgaaggagagccaggtcctcctgactcttacaaatccagttgagaacctcacccatgtgactctcttcgagtgtgaggagggggaccctgatgatatcaacagcactgctaaggtggtggtgcctcccaaagagctcgttttagctggcaaggatgcagcagcagagtacgatgagttggcagaacctcaagactttcaggacgatcctgacattatagccttcagaaaggccaacaaagtgggtattttcatcaaagttacaccacagcgtgaggagggtgaagtgaccgtgtgcttcaagatgaagcatgattttaaaaacctggcagcccccattcgccccattgaagaaagtgaccagggaacagaagtcatctggctcacccagcatgtggaacttagcttgggcccacttcttccttaaaaggttccactggagggcagatcccaaaggacagtatcaccgtaaacctgcgttaaaatgtggaagctgctgcttcattaggccttgtttataacgatgtacccatgcactacggaattctattgctaagaaagtgggagcataggcaaggcattgggaacacagggtagctgctgttgctcttgctctcacccctgttgacaccagtaagtctgtgtctccctcactgaaccctgcacgttgagtaacagcagcataattccatcctaggaaaggggatgggtgttccttggaatggcattgtatttaccacctgagaaactctgtactgtctcttgatctgatctcactaaggatcacaatgtcacagatgaaacttaaatgataacccaaaggtagacctgctgttaatgatccagcattggtcacaatgtaccaactgctttctgcattccgttaaatatcatctaacagtctaaaacatatcccttcattgccataatggctgccattttgccatagatttccatataactgaaaaactgaattgtcactttatctttagtatcatgatgattggaaaaacctgtgaagttgttaaggcactctcatttgccctctttttctaagtgaatacaggacacgtattagttgttcttaatttttttcccagtaaaatatggatcttttaagaagaatttgagaagcaaacaattacatgtcatgtcaagggggtagcagattccattcgttttcaatattgccacaatacccagggattaatgctgccacaggggggcaatctttatttgtcttacttcctaccccttccctgttctgcctctttaactcagttaagttgttctgtttgggacctggaaaagaacccaaagaaaacctgagtggacaggttcatttctggaatgcagaaaacattttaaaggctagatttttagaatattctcaactagcattctttccattgatttgaaggggaaattaactattataatctcttgaatccaaaactggatattaagaactttcccccttactaagtttaagacttttgtcatgtggtgagtcaaataagaccattttgattgtaaaccataaaatagttcagcaagtagcccacagttctggcctaacagcagacttgctgttttcacttggtatcctggagttgggttgctaaccttaatttctatgatgttttctaaaatgaaacttgataaagtagaccaccagctgcaccgtgttttctgtaaaagtattgttagtaagtggccaagagacttgaggaaaatacagattttttgtttaccttggtcttgttttaagtcttaaaaaattaaagataacattataatgtagaatacagatgggacatagtccttgtaagcttcccttgaaaatgttttaaatatttaggaagcttttaaaagacactaaattgtactctaaaagacactaaattgtactaattgtacaaaggtcaagccaattttatgaaacagtcctacagagtaatatatgtgatgcagtgtaagaaggaaaatactcatctctaacattatggtaataacatttagcctcttaggagttggagcagggggatgggtaattacagatttgcagactatagaaagagtttcatttttttgtgaccccacagagtctcaaatttttatttcactacctgctagagcctactgtgaaatcactgctccatatttgccagtggaggaaatgggcatagagtagagaatagcttcatatgtttacacgtttgcatagactacacacatgtcatgcgtttatggcaggtagctggtatttattccccaaagtaataatgttgaagtatgggtctcatcattcccatacacagaaacacaaaacactttgatcataaacttttttcttcagaagccaaactaacttgcagaataatagagccactggtttaatgtttcctcaagataggttttagtgtaagctagtattctgtgtgttcgtagaaatgattcaatacctgcagctggtgaattaggaattgtatttgttgccttttttatattagatgaggtgcaaaaattttaatgctagtcagtatgcaccaccacaggaaagttagatcccattagcacttgaaactacagttttggaaacttaggctaagttaatttggatttgttacttgattcacctactgaccttttcttttgtttgaagtgcttatcagcataatgagctaagtgtcatgcatatttgtgaagaaacacccttttggtcccttgggacaagagtctcctgacttatgaagccagacggttgctatgctaacaggtggatacggcacgtgttgacacaagaattaacacaaaaaaaaaaaagggggctatcgggacacttaggagataataacggccgaggtggctggccaaactatatcnnnnnnnnn

SEQ ID NO: 9746 - DNA, 1439 bp, Homo sapiens
  misc_feature 1, 1412, 1413, 1414, 1415, 1416, 1417, 1418, 1419, 1420,1421, 1422, 1423, 1424, 1425, 1426, 1427, 1428, 1429, 1430,1431, 1432, 1433, 1434, 1435, 1436, 1437, 1438, 1439: n = A,T,C or G
nactggggttgcccataaatcaaaccccatactcttagaattcattatattatggtgatatccgaacctagtgaatggtatgcttgggtgttttccattgagagcggatggacctctttataaagttggttgctgcaaaatccagttcttccaaaagccactttatttagggtttattcacaagtcatatccattttggtacagtgtttgtttcctaatatttattaaccaccttataccaaatgtcttgcaaagaaatgttattaaaaccttgaatttttacaaatgtaaaaaacaaaaagtgtattaatgtatttgttcaggaaaagctacataccgaagggcttttgtatatgaattctgtggtggggagacccatttgtaatctatatggcagttccatctgggttttaagtttagatttcaccgtgtcttagtgcttcattctattggtttattggaacatgtaataaataggagtagtgatgtattaaaacacaagtattcattaatgttttatatcttcactaaaattctatagttatgaaactattttatcaatcaaggtgttatatttcagtcagaagtgaaaatttatgaagagtatttggaagtgtgtacagaaataaactagacttacaggtaggctagatcagaacgttaacatatgaacctgcagaaatctggtaagacttaaattcagtgtgaggaataactctagttctctcctatgagcatttcctaaaagccatctgatttggcattcttactggagctgcagacagaaatctacaaagacaaaagtaaacaaaattaagttattattccactgttaggaatggaaataaacttgtgaagtctgtttattttgaagtattggtgaactaggcttgctaattgataactgcagcagtttgtgtttactccagttcatcagcttaggtcatttgaaagatataagagcttaaggcaagaaagaaataacatggaattctatttgaaggacaacagaacattcttggaaaagcagctccagttggtttttcaactgtcaaacttgaatgtgtaagtccccacagagcatggacagtcggtgcagagttccaaggaaacaattattgcctgatgaccacttccattttgtatacactctttggttcgtataggccatattccaactggctttttagtaatagaaatccagtatataatgtatcaaatacaattgaggttctaacctagtgtgttaatttatctgaatttggatttttaaaaagtaataaaaagttaaatgttgaaacaaaaaaacaacagaaaccaaacgaaagaacaaaaagacaaaacagaagcaaaaaagcacaaagggggccactaacacagaagaaaccaaaagcaggataaacaggacgaannnnnnnnnnnnnnnnnnnnnnnnnnnn

SEQ ID NO: 9747 - DNA, 1589 bp, Homo sapiens
  misc_feature 1, 2, 3, 4, 5, 6, 1589: n = A,T,C or G
nnnnnncccgtgttccgggcctttcttttcacccattttttgtgggcccccccttgggccttttccccctgtttacacactatcgcaccactcaggctgttaacctcaaaacttacccgattggtttgtgaaagtgtatcatttaaatcctgccaacctaatggataagctgattgccgtaccgaatgatatgaatccaaccaattttatactaagtggtagtaggttttataaagagacttcctcagagtactacgtaaaatacatcatgcacactttggagcataagcagaatcaacatctgtaaacaatcagaatttatagcaccaacattttcgctgtaacacaaaggctgactccagggtcatactataccagcctttcaaaagcgctgttttcatttactttcaaagcattttcatttggtgtattgttttctttgctcttaagatatttacccaaatcaaaaagcaaacagtatggtaaaaggtactaccaaaatagttcaaaagagttctgtattatccttaacatagtgcttttttttccttccccttctcttggggaagctacaagacataatccttcagtgcttaactggaaagaacagtcaatcctaaatattaaagaatcttatgctgttgaaagtaaatgaaaaatttcgagttatttgtggcatatttgagcaaccaatatttattgcatttaatcaactgactttaaaaaattacaatcttgttactttcattaatttagcatgtgaaatttaattagaaatactgggtacatacactcaaccatttatatcataaaggataagttttatatttctaaataaagtttgacattcaaaggtactacggcaattcacaataagcacaaaaacatcagctttaccagagtaaagaagtgcagtttatgaaatttaggatcaactattgaaaatgcaagtttcctttaaaaacatacaaacatacgcacaacattaaccatgaaatctgaaactgtgatatttcagtgcaaaaacctcagtatgaggtaattttaatgtaataaccacttgaaaaaaaaatccacacagtggcactcttaaaaatgatagcttccatgacaattgctggctgacaagacaatgtggactaaatgttcttaactgtttaaactaatcttgtcttgtttggacatatatttttccctaatcatttgcttctgattcagaaacacagaaaggcatttattaatgtggaaagggaaaattcccacagccaactaattgatatattcaaagaaaattttctgataaagtttagatagaaattaagataccaaaaggtcaaaaccattttatgagatcaccaacagagggttaattttaggtttttccatataatttgaaacttgtagtgcggcacctccttaacggaaaggtgaggaccctatcaaagttggtttcaacagaacataaactctcttccaagtgcaaaccctttcaaaaaggtgttttaggtcattattgagtattacattgttccttgcttaaataaaacattttgtaaatgaagcctaagtttaagcggacgcgtgggtcn

SEQ ID NO: 9748 - DNA, 1902 bp, Homo sapiens
  misc_feature 1, 2, 3, 1901, 1902: n = A,T,C or G
nnnatagggagtcgacccacgcgtccgcatcttttcccaccccctggtctctctctctctctcggtttctctttctctgcgtctaccccccatcctcctcatcctcagagtaaagcaggggcattgaacaccacgcaaagaaagctccaacctgcatcttccactggctttgagtggggtgccttggggaccgttggaaccttgtttttttccttatgcagagtgtcagcctcactctccctcggattccaagagtattggaattcctgagcctcccatcctccccctactcaccccccgtcacaggcacaaggaggtgacaggcagaaaacgtggagggtgagtggggaatgtgctagctgcagagagtttgtggggaatgtgctagctgcagagagtttgggccattcctgcttgctccgtggttgccttcccatggcccatctaattatgggcatccatgcgaccttaacagagggaaacaggctcctttgagagagatccatttatctcttcgtccttcctgcctggaaagtgatagcactaaatattcccagcagatgggtagtgttctcaaaggaatcaccctttccctaccttcagactctattctttacccttccattgctccagtgctgatggaggccaaagacaaccccagggttttcataggaaattcactggaattgtgcgcaattgtctttgtagtccttttgccttttttttttttaaatattatgttgtcaatagcatttgtttgggtatttgttttagaggcctcactctaagttattaccgtccccttcattgttttcaaagacatgtggtgatatagtttttaaaaataactattttgttatagatcataatatgcataaaactgtacagaaatattttgtaatgtgttgattttaaaaaaagaatctgtaaataaagttttaaaaaaagaattcaaatggcacacgctgaaatatgtagatattttgctatttatttaaaggagtattttaagagatattgaactatctgaaattgaccagtaatcaaagttccaatcatctgaatgcttttccttgaggtagaatgtgagtctcagaaatgactgcattacctgcccttttttgcaccttttctgtctttttattttgcagaacaacaacaacaacaaaattgtgccttagctgtatttttttgtctaggggagtttgtttctgtctgacaaagcaacattttttgcagaaaacagtggatgtattaaatactgtatcataccaaaaacactgcaggtgtatatagatgctttctgtcatactgtgttttcagatgcagaattttaaaattaaaaaaacactgcctttatggaacagtgactatatgtggcttcttttcagcaacattgtgcatctttacacaatctcatattctcttctgtcatctgcatggtgaagataggatgactatataatttatcatccaaactgggatacttttgagagttaaaggaagcaccacgtggatgggatgctgagactgcaggcataaatggcctatcctgggaaaacctgggtgtgtggacacatttccctcataaaaactgctgtcatcttctaactggattatagcaacaacctcctataagtacctcctggttgaggcaggaagtcatatgatttttaaagcccgtactgagtagagaataacacagaagggactgccatggaaaagtgcagttctataacccaactggttggttggtggcaaacgtgttttcctttcctctttaccacagagattactttcccagaatggcttgctcttagattgtgacatgtgaccaggcaagggaacgttgatggtttccaatgctgcttaagcaggctgtgatggaccggcctcggaann

SEQ ID NO: 9749 - DNA, 2904 bp, Homo sapiens
  misc_feature 1, 2, 3, 4, 5, 2903, 2904: n = A,T,C or G
nnnnnccctttgccctcttttatcctcttgcccctttcaaaactggccctttgccccctgtggtattttgccccccctttttttttttttttttgtgttctcacatctttttaatcattcatattgacttaatcaggttgacaaaatctcagggttggtctgggatcattcacaaatcagaattactcagagaaattttcacagcagttgcagcagcacaaactctaacgctgatttaaattaataactgttattaatgaacaaacttgaaaaaggaatttcatatagaacattacatttctccctgacactaccgtatcataaaaattaaaaatgatataaacatgttttaaagtcatagtggtagaaccagccacactacagtgcggcattgttagaagttcgctctcaagttgactcagcttagtaaagcaaattgttctctgagatttcagctttggttagtcctctttggctgacatgaacattatggagtgttaactgtggtagcaacacataaccaaaaagcattctttttaaaatacatctagaagatctcaatgacctgaataaatcaatacaatgttcctagtgacagtctctctatactgggaaaactttaaccccgcagctgaggtattatcagttaatgcaaagtacgttgcttgaacctgatttccacccatgcagatatcttcgtacctgggaattcttgtaaataccaaaataaaatctttatcttttttgctaatgagagtaaaaggcacgactgtaaaatatacatcttgatagaaaaatattataaggttttaattttctaaataccaagggttaacatcttacgattaccctttgaaaatagggtattttggaacatttaaaaagttctcaaaataagtacaaagcttattcacatttttactaaatccaacacaactttcacaaatggcaaaatgattgcctcttcaaagcaatgcagcctagtttttggtgggttctggtcactgcttagctaagtctttgttgggcagagtcctggctccacagtctccttcgatgggctccttgatacacgaggcttcataacatgcgctctttgaagaaccatttctgatgatccgagttggtgcagtctcgtaagagtggaacgaaactgtcactcgactccttcctcgcagcctggacacatttcttggactgttcgtgaaataaagatccatcctcctgcaagatgaacttctgattctctggggcagtttcttcgcagagatgcatgataagggtatccattcctgcttccacagcaatgcagccctcaggctggtgggtgttatagcgtatttctttctgggacgtgtactcgaaaaactgattctggcccatcccatgacagaggtacagaatgacctggtgtcccacaatctggttttcatcgggagggttatagtcaaagcagtagtctgttagtcctttgttctggagcatcccgaagaagccaggcctgtcctcaggcacatgcagttctggatacacagtctccaagaaccacttgaagtctttacactggagcttgtcccggagctgcttcctctctgtcacatccccaaaaggttccaagcgggcacgggggttgcgatggtagtagagctctttaaattcatccatccatacttcagctgcacgaacactgttggccagagccttgttgcgggagtagggagcttgcttggggaaaacatggccaacatgggaacatgggtgtgtttccagaaccccaccacactgccagatcctaaaggaaaattcgaggttttctcctccccaaacttccattcctgtatcataagaccccagatattcaaaatatttcttactcacagcaaacagcccaccagccattgttggagacctgatgacatcgacgggggattgcatccgtatcctctccctctcaggaactgtgtgccacgtgaacaccagcctccagtcgaaaccgccgatctggggctccccggagttccccaggtattcgaaggtgttccagtcgatcacatcaatcaccgggcacaccactgccgactcctcttcatggatcctctgcagcagcggctccagccacccttcgtggcactcacagtgacagtccaggaaggtcagaacatcgcccctcgccgcagacgcccccagcagccgggctcgcaccaggccctctctcttgttggcgcggatcaggcgcaccttgggcagtcccgaaagctcattggccaagcgctccttcaggtgctctctatcactgtagtcatctacaaggatcacttcttctagcaggatatccggggatgtctcaaggacactgtaaactgtccgaaggagagttgaccaggcttcattataaaatgctatgataacagatgtcctgggcaaattatcataatcatatttcttctctttgcacagcgggttccagcgctcgggcaggcggcggtgcagtgagatgcggtcgctgaggtagatgttaatctggtgcagccgcacgctctcctcctgcagccgcagctcctcgccctgcagctgcagccgcaccgcctcgccccgcgcgcccagcgcgttcgccggcaccggcggccgcggcatgaccggctcgcgccgcccggggcgcggggtgcgcgggggtcccggctcggcagccccggccccggccccacgctgcgcccgcagcaccgagcccagcccggccaacgccagtagcgccaggagcaccaacagcgcctcccggccgcgccgcagttcccgcgggcagcgccgccgcgccgtgcgcccccacatgcgcccgccaactgcagccagcgatctgcgcaagggcgaattccagcacacggcggccgttatagtggaccgagccnn

SEQ ID NO: 9750 - DNA, 1886 bp, Homo sapiens
  misc_feature 1, 2, 3, 1869, 1870, 1871, 1872, 1873, 1874, 1875, 1876,1877, 1878, 1879, 1880, 1881, 1882, 1883, 1884, 1885, 1886: n = A,T,C or G
nnncatctcaaacactgcttaaggaaaagagaaacactaatggccaagtgtacatttgatttgatatacagacctccagattattttctatatttggattcacagcctttgcgctctgggttttgggatttgggtgtggggtaagttgaagggaaatcaatttaaaggaaagttctattatctgggttttagaaattctataagagacaaagtttggaagtacataaagtaataactgttagaattaggtaatggatatgaaagagaaaatgctttctcatgcatagacaagtgttttgggtttttaaaaaaaatattctgtcattggttacaaatttttactcaggctttctattggcatggatttcctttgacctctcacttttttataaattataatgcatctaaaccacctgtccccagttaatgtgccaaaatgtcaatttttaacttatctccagccaatttcaaagaaaacagaccagcatagttctgcaataacagttttaagatgggcatagggtttggaagaaagggagaaggattcttttttcaatgtactgtattgggacgctggtaactgttaacccagtgttcagcatagagctatatatatatatatatgtatatatttattattttcatataatttgccagacagagatcagaattgaaccgtcaatgtgaaataaagagttctccttgtacttgaataataaccacgattccaacccaggtctgctttggggcttatcagaactcctttctaaggagcactagaatgagaaatcatgttgttcgatcgtttcacatctgtatatcagctctaaagcagagatgtattatggtgatactccaaggtggcatagccattcatttacaacttccagatttgagctgcctggagggaatccatatcagctctgcataagattatatacaaagctgtcactcacaaaaggctggatgtgctttcatccaactggaaggctttattcttccaagttcattcatactcaaagaggccagtactttgccatccttgcacttctgttatcagggcccaaataacagtggcaagctaccaactaagttgtattttaataaagattccatgggttgaacaagccacgttgcagaaaaagagcttcccctaacctgggttgttgcagagtaaatcccacgacataagctggtatcagtggttcgggggaaatagttccattctatgactcttgtctcctcctccaggaggactgttctaactagtaatcttggccctattcattacatcctctgcttgtcattctgctaatttatgaagatagtttattatagtctgtacttcagttctcatcttgtaaataatgcttaacataaacttgtacttacactgaaatccaaaatagtcatgtttctgcagtattctgtagccaacttaaacctgtgctttcatgtttaagaaatgagaaattgtgccaaagatagcagaagagtagataagtgctcagtattgacgacctacatctgaaatctacaacataatgatactgaattgttatgtaaacatcataaatagtaaataatgattcaatgtgaattttaaaatgcaaatattgctattgtttataggaaataaatctaaatataaatgaaattgaatcagtaatttatcttgggctaaatggttctaccccttactaggttgccccaattagtggcactagttggcagagctgttcatgagctgccagttatcattttggagtcagtttgaaaccagcctcttaacacactgctgttaactcataaaagagaagagtgttccatttcagtctcaataaacacttccctcaatcttaaaaaaannnnnnnnnnnnnnnnnn

SEQ ID NO: 9751 - DNA, 1376 bp, Homo sapiens
  misc_feature 1, 1376: n = A,T,C or G
nacggcctttttttgcgcatttaaacaggccctttaatgtggcacccggcagttcagaagttttttccaaaaaaacccctgggaaaaggtttatcttgggaacacacctttaatgccaagacaccgtggggcttgcaaaattagcttcaaaagagatgatgatagccagataaagccatgatgatggtaaatgtgtcttctcctatgtatccatgatgatattgcctagtttttaatacaagcttaagaatcaataaaatgatagatctgaaatctgtagatgccagtctggctcagtattaatactgacagtagtttttttgttttttaagaaagcaagtatattaaaatatctctgttagaaaagattacaatttgaaaggatcattctacaatcttagaactaaaaagcaatttaaggcaaagaggtacatcaaagaagctattccatagctcagttacagctcaacaaaagctctgtctgtattgtctactggtaagcttgtgccctggtggctaaggatcatatgtaccgctatatccgccagttgatgactgtccatctctagcccctctaaccatgctatgcacccagtgagtgcagaatgattactagtaattgatgttgactttacaattctatgacatgtaatacaggatgccgaggcacttttaaaattccacctaacatgttctggcactggaaaatcttacttgagattttaatactggttaatataggaaaaattatgcttaagcaccactaacttaaaagtgtaatttcattttcttgaatttaggtaaaagcaaaattctcaaaattctattatggcacatggtttcacagtttcaaatgaaatcacagctgtctcattacgcagcacagtccttggttttgcagaaagtatatttttcctttgttcaccaacccctcaagtatgtaatactatgtgctttgctaatttagactatatctcagacacacacacatgtgtgactgattcctgaataacccaggatgatgttcctgtgttctagataatataaaatttttaacattcctctaatagctgaacatctttttaaaatctagaaaacttgaaaaatcctaaaatgtttttcaatttttttaagctatttgagagacagttgtggtttgggggggacttgtttgtgtgatttttatgtcagcaagaaaattgtatctttggcaaatactttaatatgtttaaatgcattttacctctggatgtatcacatcagtcatcaaaatgactttccagtttcacggctgccttatgtataccagtcccaagaatggtgatattaagaatcccacttacaacatctctgccggacgcgtgggtcgactccgn

SEQ ID NO: 9752 - DNA, 7924 bp, Homo sapiens
  misc_feature 1, 2, 3, 20, 7923, 7924: n = A,T,C or G
nnncgtccgggaggaggcgnagaggagttggaggaggaggaggaggaggcgagggcgagcgagcccagcggggtcccggccgccccgcgggccaaagtcgagccctcccgcccgtgggcgagcgcgccagccgccccttccagaacagccgccgccacaaagaagaacggggggtgccgaggtccccatgacctcctaaagtggtgcggtccctgctgagtgcgctgcccgggccgtgacccgcgcccctgtgcgtccccgcgcgcctccgagcgcccctgtgcgccccggcccgcgccccgccggcatggacgtccatacccgctggaaagcgcgcagcgcgctccgcccgggcgccccgctgctgcccccgctgctgctgctgctgctgtgggcgccgcctccgagccgcgcagctcagccagcagatctcctgaaggttctagattttcacaacttgcctgatggaataacaaagacaacaggcttttgcgccacgcggcgatcttccaaaggcccggatgtcgcttacagagtcaccaaagacgcgcagctcagcgcacccaccaagcagctgtaccctgcgtctgcatttcccgaggacttctccatcctaacaactgtgaaagccaagaaaggcagccaggccttcctggtctccatctacaacgagcagggtatccagcagattgggctggagctgggccgctctcccgtcttcctctacgaggaccacacggggaagcctggcccggaagactaccccctcttccggggcatcaacctgtcagatggcaagtggcacagaattgctctcagcgtccacaagaaaaatgtcaccttgatcctcgactgtaaaaagaagaccaccaaattcctcgaccgcagcgaccaccccatgatcgacatcaatggcatcatcgtgtttggcacccggatcctggatgaggaggtgtttgagggtgacatccagcagctgctctttgtctcggaccaccgggcagcttatgattactgtgagcactacagccctgactgtgacaccgcagtacctgacaccccacagtcgcaggaccccaatccagatgaatattacacggaaggagacggcgagggtgagacctattactacgaatacccctactacgaagaccccgaagacctagggaaggagcccacccccagcaagaagcccgtggaagctgccaaagaaaccacagaggtccccgaggagctgaccccgacccccacggaagctgctcccatgcctgaaaccagtgaaggggctgggaaggaagaggacgtcggcatcggggactatgactacgtgcccagtgaggactactacacgccctcaccgtatgatgacctcacctatggcgagggggaggagaaccccgaccagcccacagacccaggcgctggggccgaaattcccaccagcaccgccgacacctccaactcctccaatccagctccgcctccaggggaaggtgcggatgacttggagggggagttcactgaggaaacgatccggaaccttgacgagaactactacgacccctactacgaccccaccagctccccgtcggagatcgggccgggaatgccggcgaaccaggataccatctatgaagggattggaggacctcggggcgagaaaggccaaaagggagaaccagcgattatcgagccgggcatgctcatcgagggcccgcctggcccagaaggccccgcgggtcttcccggacctccaggaaccatgggtcccactggccaagtcggggaccctggagaaaggggcccccctggacgcccaggccttcctggggccgatggcctgcccggtcctccaggaaccatgctcatgctgcccttccggtttggaggtggcggcgatgcgggctccaaaggccccatggtctcagcccaggagtcccaggcgcaagccattctccagcaggccaggttggcactgaggggaccagctggcccgatgggtctcacagggagacctggccctgtgggtccccctgggagcggaggtttgaagggcgagccgggagacgtggggcctcagggtcctcgaggtgtgcaaggcccgcctggtccggccgggaagcccggaagacggggtcgggctgggagtgatggagccagaggaatgcctggacaaactggccccaagggtgaccggggtttcgacggcctggctgggttgccaggcgagaagggccacaggggtgaccctggtccttccggcccaccaggacctccgggagacgatggagaaaggggtgacgacggagaagttgggcccagggggctgcctggggagcccgggccacgtggtctgcttgggccgaaggggcccccaggtcctcccggacctcccggtgtcacgggtatggacggccagccggggccaaaaggaaatgtgggtccccagggagagcctggccccccaggacagcagggtaatccaggcgcccagggtcttccaggcccccagggtgcaattggtcctccaggagaaaagggtcccttggggaaaccaggccttccaggaatgcccggtgctgacggacccccgggacaccctggcaaagaaggccctccaggagagaaaggaggtcagggtccacctggcccccagggtccgattggctacccaggtcctcgaggagtcaagggggccgatggcatccgtggtctgaagggcacaaagggcgagaagggtgaagacggctttcctgggtttaaaggagacatgggcatcaagggtgatcggggggagatcggcccacccggtcccaggggagaagatggccctgaaggcccaaagggtcgcggaggtcccaatggtgaccccggtcctctgggaccccctggggagaagggaaaactcggagtcccagggttaccagggtatccaggaagacaaggaccaaagggctctattggattccctggatttcctggcgccaatggagagaagggcggcagggggacccctggaaagccaggaccgcgggggcagcgaggcccaacgggtccgaggggtgaaagaggcccccggggcatcactgggaagcctggccccaagggcaactccggaggtgacggcccagctggccctcctggtgaacggggacccaatggaccccaaggacccacaggatttcctggaccaaagggcccccctggccctccaggcaaggatggactcccaggacaccctggacagagaggcgagactggtttccaaggcaagaccggccctccaggcccccccggcgtggtcggccctcagggtcccacgggagaaacgggcccaatgggtgagcgtggccaccctgggccccctggaccccccggtgaacaggggcttccgggccttgctggaaaagaagggacgaagggtgacccaggccctgcaggcctccctgggaaagatggccctccaggattacgtggtttccctggggaccgagggcttcctggtccagtgggagctcttggactgaaaggcaatgaagggccccctggcccaccaggccctgcgggatctccaggggagagaggtccagctggagccgctgggcccatcggaattccagggagacctgggccccagggacccccagggccggcaggagagaaaggggctcctggcgagaaaggcccacaaggcccagctggccgagacggtctccaggggcctgtggggctcccgggtccagctggccctgtgggtccccctggagaagacggagataagggagagatcggggagccggggcagaaaggaagcaagggggacaaaggagaacagggtcctcctgggcctacaggtcctcaaggccccatcggacagccaggcccctctggagctgacggcgagccggggcctcggggccagcagggccttttcgggcagaaaggtgatgaaggtcccagaggctttcctggaccccctgggccagtggggctgcagggtttgccaggacctccaggcgagaagggtgagacaggagacgtgggccagatgggccccccgggtccccctggcccccgaggaccctccggagctccaggtgctgatggcccacaaggtcccccaggtggaataggaaaccctggtgcagtgggagagaagggcgagcctggcgaagcaggtgagcctggccttccgggagaaggcggccccccgggacccaaaggagaaaggggagagaagggcgagtcaggcccttcaggtgctgccggaccccctggacccaaaggccctcccggagatgatggtcccaaaggcagccctggcccagtgggttttcctggagatcctggcccccccggagagcctggccccgcgggtcaagatggtccccctggtgacaaaggagatgatggtgaacccgggcagacgggatcccccggccctactggtgaaccaggtccatcggggcctccaggaaaaaggggtcccccaggccccgcaggccccgaaggcagacagggagagaaaggggccaagggagaagccggcttggaaggccctcctgggaagactggccccatcggcccccagggggcccctgggaagcccggaccggatggccttcgagggatccctggccctgtgggagaacaaggtctcccaggatccccaggcccggacggtccccccggccccatgggtcccccaggacttcccggcctcaaaggagattctggtcccaaaggtgaaaagggtcatccaggcctgatcgggctcatcggtcctccgggtgaacagggtgagaagggcgaccgtggtctccctggcccccagggctcctccggtcctaagggagaacagggtatcactggtccttctggcccgattgggcctcctgggccccctggcctgccgggtccgcctggtccaaaaggtgctaagggctcctcgggtccaactggcccgaagggtgaggcaggccacccaggacccccaggccccccgggccccccgggagaggtcatccagcccctgccaatccaggcatccaggacgcggcggaacatcgacgccagccagctgctggacgacgggaatggcgagaactacgtggactacgcggacggcatggaagagatcttcggctctctcaactctctgaagctggagattgagcagatgaaacggcccctgggcacgcagcagaaccccgcccgcacctgcaaggacctgcagctctgccaccccgacttcccagatggtgaatactgggtcgatcctaaccaaggatgctccagggattccttcaaggtttactgcaacttcacagccggggggtcgacatgcgtcttccctgacaagaagtccgaaggggccagaatcacttcttggcccaaagaaaacccgggctcctggttcagtgaattcaagcgtgggaaactgctctcctatgtggacgccgagggcaaccctgtgggtgtggtacagatgaccttcctgcggctgctgagcgcctctgcccaccagaacgtcacctaccactgctaccagtcagtggcctggcaggacgcagccacgggcagctacgacaaggccctccgcttcctgggctccaacgacgaggagatgtcctatgacaacaacccctacatccgcgccctggtggacggctgtgctaccaagaaaggctaccagaagacggttctggagatcgacacccccaaagtggagcaggtgcccatcgtggacatcatgttcaatgacttcggtgaagcgtcacagaaatttggatttgaagtggggccggcttgcttcatgggctaggagccgccgagcccgggctcccgagagcaacctcgtgacctcagcatgccattcgttcgtgagtgtcccgtgcacgtcctgatcctggacagtgaaggcttctccctcccctcccacctgacttcatctacgcctcggcaccacggggtgtgggaccccagcccggagagaacagagggaaggagccgcgcccccacctggagctgaatcacatgacctagctgcaccccagcgcctgggcccgccccacgctctgtccacacccacgcgccccgggagcggggccatgcctccagccccccagctcgcccgacccatcctgttcgtgaataggtctcaggggttgggggagggactgccagatttggacactatatttttttctaaattcaacttgaagatgtgtatttcccctgaccttcaaaaaatgttccaaggtaagcctcgtaaaggtcatcccaccatcaccaaagcctccgtttttaacaacctccaacacgatccatttagaggccaaatgtcattctgcaggtgccttcccgatggattaaaggtgcttatgtttttgtgagttttaagtaaatatttgtattgtattgttataaatgttaagtgtgcctggctttcaatcatgcacggaaacccagtctcagtcccacggacagaatgggcgaggcatggattctgggttgcagtaccgttctgattagaaataggaagtctccccaccccagccctggccaagaacgtgcaataaattggaagtttgccccggggcagcaagaatttatgctgccattgaaaagcaggtaccagtgccccttttcagacagtttttgattcgctctagactttttttttttttaatagggagggaaaaaatttgataattttcttttttctacatgcacttaagactaaaacacaggtttggattaattttatttgcttcctttttccgcttttcttcccgcagagcctgatgggagaatgtccagggcagggaaaccacattttttgtaggtgataactcaatgaaaattggtgcttattttttacacttctctcttgtggctctcttgtggtgctatctgttttaaggtctccttgaaggcgcactggggtccctggccatgcctcgttctccctgctttctttatcctgttattgcctccacagtctgttgccaaggactctaagatcaatgcacgtcactttcctttccactgggcaggatagccaagcacactccctcctgcgctctcccgccccggtgcgtccactcccgagggctgttatgaggactgggttgtgcctacttgatttgaaaacacacacaagcaataaaaagcctcttcctgcattgtctgtggtgtgaccatagcagattatatttggttcctgaatgtttgtggtgctaatttctgtgtttgttccaagccgttcagtcatgccatgcgctgcctcggtagatggagtaatgtacaatgaactccatgagtctctccagggctgcctgcagcacgtcttttccaagtagcctatttggattcccatctcaaatgtcctggatgcgagcgtcagcggctccagagctcggggcgggtgaggtcccctttggggaaccctttcctggccatcgaggtcggggggctgccgtctgtgggcaggaggacccgaggggcagccaggaaaggcgatctcttcactgtgaaaagttgcccgggtgcagcgccttttccttctaccatgggaaatgcaggctgggcccttggggtgagcctgcggggctctggtgctgtccccgacccccaccaccaccagaatgcagttccagcttaggaagccacaaacaagccacccaggaggaacaaaacaccgccagcgtggattttccaaatttccctggaaagtaagtctcgctcttgccaaagaaaagtctggcttggagagtctctggagcccaggatgccagcatgtgccaatgactgtcaccttcatcttaagaagctgcgggtgccggaccgggggttgtgttggtcgtttccccccatgcttcggttcccgggcccaggaaggggaagtggccccccctggann

SEQ ID NO: 9753 - DNA, 2667 bp, Homo sapiens
  misc_feature 2667: n = A,T,C or G
cgcgtccgatcatggagtggaggtgaaggaagtggagcagggagaggagccgtggataatggaaggtgaatttccatgtcaacatagtccaggagattgtcagaaatggaggagggggcaccagatccaaggaagtgcccggacaaagccgggaggcgaggagagccgacggggaggaggtgccgagagcatcagcggggctgctcggtggcacgaagacgcccgcggggactggagaggtcggctagggccaggctactcaggcacggagggccacctccccttcagggacgtgagcatctagctgcactgatttgttgttcaggaacaggaaatgaaaccccgcagctttgaacacaataacccacgccagcctcaggctcatgaatattcagcaggctgcttgcgccttgcaaccccgcctccgttcccctctgctcgccggcgcgcggctgtgtcgtcatacttgcgcgccgacgccgccgctcgcttgtgaaactggaaggctgccatggctagcccagccgcctcctcggtgcgaccaccgaggcccaagaaagagccgcagacgctcgtcatccccaagaatgcggcggaggagcagaagctcaagctggagcggctcatgaagaacccggacaaagcagttccaattccagagaaaatgagtgaatgggcacctcgacctcccccagaatttgtccgagatgtcatgggttcaagtgctggggccggcagtggagagttccacgtgtacagacatctgcgccggagagaatatcagcgacaggactacatggatgccatggctgagaagcaaaaattggatgcagagtttcagaaaagactggaaaagaataaaattgctgcagaggagcagaccgcaaagcgccggaagaagcgccagaagttaaaagagaagaaattactggcaaagaagatgaaacttgaacagaagaaacaagaaggacccggtcagcccaaggagcaggggtccagcagctctgcggaggcatctggaacagaggaggaggaggaagtgcccagtttcaccatggggcgatgacaatgtttgccacagcctctgcctggaacctggctcgtgctgtgaccagaagggaaaggcggctgtttggctctttctcccccgcaaggacccgctgacccgctggatggagagcaaaggagacccctcccgagccgctcacagtcctgtatttggcaggtttgggagcctgaggggccatctccctgacactcagaggcactgccttgcagacaccatccgtgctcctggtaaagggggacagagagcctcaccttgccacatatttgaacagtgatgagtttggggctggtttctgggaagggaacgtttatttagtaaagagcagaacacccttgcgttttgttgggacatgtggaccgtgagtcgcaaacactctggagaaggctgagatgccaccattcccacggggactgaagacacattacgtggacctggtcccaggctcagtgaggagatggcctcagctgtggggctggtccatgttgcccactcactccagtgggaagtggggaccacgccatagagggtctgctcccactgcagctcccggtgctctcgtgttctgggaaggcctgggtgtgtgcacaaggaggcccgggccagggacttcaccaggggctgggtcacaagggcacagggtgtgtggaaagcgctgtgggggaagagccggtcaccggagagtgagcaggcggagactccaagctgggctgagccagagcagaaggcgagggattcccagccggacgggggttctctcaccaacagctgtgatttcatcccgaagtggaagggggtctaaacagaacaggctgagagaggcgggactgggtcaagtgggtggagctcctccttgcatgactgcaactgtcggggctttccgccggctcacagcagttggggccagcggggagaagagaggcggaactgctgtgtcctcatgtggcgcagcctcaaactggcatccaggcactgggcccgtgcagagaaggcacctgcagagagcagggcagcccggcgcaggggcatgcgcctagaatcccagctactcggaaggccaaggcaggaggaccgcttgagtccagggattcaaggccaacctgggcaatagagcgagaccctgtctcttaaaaaacgatgatgatgaacacagaggacggggcactgtgctgggagccagggggcctgggaggagccgagaccagccttttacctcggggttttgaggccaacagggacgacagagacagtttctagttagagccttggctccatttttggatgatttagccccgagttcctgagtctattttatgccccttacgtactttgatagaactaaggaaatagtggttttgagtgaagggaaaggaaacccagaaacattttacgttgcttttacttctgtagtgtagattgccccggcccctctctgagccctgtagcatctgtgatagcttctgtcccttcatcggttcatgtcacagggattttctttcccaggaagcggacacggagagtcagccctaataaatgagcacatgccctggctgtacattttgaaacctaaaacagaccttcaacaaaaaataataggaccn

SEQ ID NO: 9754 - DNA, 1462 bp, Homo sapiens
  misc_feature 1, 2, 3, 4, 5, 6, 7, 8, 9, 10, 11, 12, 15, 16, 17, 18, 19,20, 819, 821, 836, 855, 886, 899, 931, 932, 933, 966, 976,979, 988, 989, 990, 1009, 1016, 1034, 1036, 1049, 1061,1062, 1063, 1064, 1075, 1078, 1081, 1105, 1107, 1115, 1134: n = A,T,C or G
  misc_feature 1139, 1144, 1150, 1160, 1161, 1172, 1177, 1178, 1185, 1191,1201, 1202, 1205, 1222, 1227, 1228, 1229, 1248, 1249, 1250,1281, 1291, 1292, 1297, 1306, 1311, 1325, 1336, 1415, 1457,1458, 1459, 1460, 1461, 1462: n = A,T,C or G
nnnnnnnnnnnnccnnnnnngccgccccgggggccgtgtaccctgagaagcatggggcagtagaaagagcatgtgggctttagagttcaaaccaagtcaggctcaaacatagttctgtgataagccctgagcaagttacccgggtcttccatttcccccttctggagaagtcctttggaggatgagtccttctggaggatgagtccttctggaggatgaagtccttctggaggatgagttcgttgtaagaataaaatgagaatgtaagacacctagaggatgcccgagtaaaaaatgacagttgctagtagtagtaatttgtagggctcattatctagaataattttgtttgacgttactaattaaaatgaactcttaaagaaaagcagtgtatttagactcttgtagttaagaaaaattacaccacagagccctttttactttttaaattcatttttacattttaaattcattgcatgtattcattatgattcccgttgctactattttttagacttgacaactacattttatttcttttcttccataaaaggtgttttacagctttcaccacagctgcatcagcttatagttactatcattatggccggaagactgttcaggtgataaaagactgatgaaagtcatccctcactgttagtaaggaagcagtatacatcaatgggaacagggcccatggaaatgtacaggagttccctattttggtgttcagcttgaaaaaggacttgtcagaatcaactgtgtcatcaaaatttaagtaatgtgcattgaaaataaggttgatcatgggaatatgcngnatttccaatgtattnttaaacccccccccccttntcctcccccccccccccccctcggtcccccnccccccccctccncgcccccctcttcccccccccctttgtctccnnnccccccccccccccccgcgcctgggccgcattncccccccccnccnccccccccnnnggatcgccccccccgcccncggcccncccctggggcccccctcncnccccccccccccngggccccccccnnnngcccccccccncgnccngtgtcccccttccccgcccctgtnantcatcccngcccctttgggataatganagtgnagttngttgtngatgaagtanngttataaaagngattnnaaatgcngtcccnttttaagatnntantcataccgaaggtatgnagttnnntttcggtgggccgcccgcnnntccggtgcctggtggtttgtgtttgggggtnaccggtggcnnaggtngtcggggtnggggnacgtgtctattagnctttgcctctnaaaggccgtgggttgcgttcctgccttcccctgtgtttctgcccttgccatgtttgtttgttattgggacctggattcnttttttctgttactaatttcccgctgtttttttttccaaggnnnnnn

SEQ ID NO: 9755 - DNA, 1358 bp, Homo sapiens
  misc_feature 1, 1358: n = A,T,C or G
nactatttattgataatgttttgctactcttgtcagacaatggctataaactgaattaggcagtcttaaaaaaaaaaaaaaacagaaaaagaaaaaaaagaacgttgcaaatttgttaaaatgccaaaaaggacagtttaattttgtacagattatgcttacctcaggtttctttagtgtgcttgaatgcccttctttccatataacacttatcttcttcttaattcggcaatggaatatcttttaagttttaaaaaaactggaataattatatctatcttttttgccgtttatatttaggggtttttgttgataaaatcaagtcttggttgtggcttgctgaattaaatatttatgagtggtgcatttttaagtatagtgaacaagacaccatattaagtacagtgataaagcatctatattctgtaaaaaaaaaaaaaaaatctgcctatgcatgtggatgtggtttttataagaacaaaaaaaatgtgggtgtgtgttatcgggctctgtgtatatggggaaatgggtgaaaattggcggctataaaaggggggtctctggaactatatattactggggaaatattgtattttgttatacacgaggggggtaactttatatatattctctctcttaaaaacagggttataagagggcccttgtgtagaacaattttttgggagtacactcgaaaaaaagaaactgtcttttagagaaacaaatctttaaaaaggggggagaagaatatatttccctttaacaagggttttgtaacgaatataagaggttgtgtacaaatgggccaacatgtgttttcgaaaacgggggtttaacacccgactggtgtctttcacgacaaaacccccttgtgggtgaaaacattaactaacacaacaagagtagtggaaacacacacccgtggtgtaaaccccccaaaagactcacctgtgggacaccgatgtcacagagggtagcacaaccacagagagtaaaagaaacaagttaagggagcccaagggtagactggatgaaaatgtagtgcccacccaaaaaaacatatcggaacacgctgatacaaccaatatagagtgcccccccttggggaaacaataacaagagaaaaggagtgtacacaaaggggggctgcacaacttggacagaacacaaaaagaagaacaaaagagccaacaacaacaattgcaaacaacacagtggtataaagatgcgcccaagaagatcagtcagcacacaggcataaagccacgtacagcagaacatactgaagacagcgcacagcagtgacaaaaacaatggcagagtcaacagcgaacacaagaaagcccattagaaagacn

SEQ ID NO: 9756 - DNA, 1561 bp, Homo sapiens
  misc_feature 1, 1561: n = A,T,C or G
ngcggccgcccggggacgcgagagaagacctgaggcgagggtgggctgcgactggtagggagccccccagtcgtggcaatctgtgggcagcgcgcacctgtgacagggaggagctgagggatagttggccctggctgcacatccaggtgaccgtttaaaaaagcatttaggtgttggaaggagcatctgttcccacctttttggctggcctgcactcagatcctgtcctcctgaccctgagggtattgttcccagccggaaccgcccgaagataggggagaaaggattgtgatacttgtcagtttaaccggaaggagactaaagacggaagttttccccgctcttcagggagtggaaaggaaactttactctcaaaggagtccagattctttgtcctcgagaaattcggggaaacaccttcgaagaggtggggttgaggaccttctttctgaaaacaaaagcttcctactcttctgtgtcctctggcaacgagagggatcctgatcttttacgtgaaccagcagctccacagagttctccgttgcaaaatccaaaaggagactgtggaaggagaatctgcttttttgctcccaataagaagcagggctttatgctgttgctagtatgagaccctcgactttctggcagttataatccattgttcatccgtttcgctgcataacccaactcctagtaacgagattttttagtagttggggaattaaaagtattcaggaacacccaagtaatggctagacacatgggctatgcagtcaaactttttgggctctgaacttggtttttcacttacaagaggtgttagcgagatgtgttaacctgtgtctgtttatctctgaagtggggttattaataatccttgtgtcttcatagatgagataatctatatgagggatttagcagtaattggcatacagtaaacaatcatcagtcattagacattgtttacctgaggagattggtcactggggggctaaaaatgattgtagtgaaagaactgcttcatgtaatagttctatgtataattccattttagattcaagacctagttttagagacattgatgaggttgtacttttaaaaattaggcttagtttcaagttctagaaagtgtggtggtggtgttgttttaacatgtttctatgaagtcagtaggtgggggaacatctcaaagcatctaaattgccaagatattgaacaggatgaaaatgttagaatttttactatgctaggcgtcttctctttcagtccaagatctgcattgcagtaaagaatcattttcactgcttagatccagaaagaataaacccatcttacgggtttatagttagttctgcttgttactgtatctaattttaatttttctcattctaggcttttggttactccccttcccaccccatcccttaattttattcttttgaagagtgcatttcaagctgccaaggtggagagagggattacagaaaggagaacaccttatttcaggtatctcatcctctaccccttaataggagaaccattttgactcaagatctaacan

SEQ ID NO: 9757 - DNA, 1135 bp, Homo sapiens
  misc_feature 1135: n = A,T,C or G
acactaagtttgcaacatttattgagatctaagtctgtcttgccttcatttctctttttatctcccccttgccctcattcttgaacagctggaggaatacattttattctgtccatgaagcatacactatgaaattcaagtgcttaaaaatacttctatgactctctgctatcccactgtatagatccacagggagcaaacacttagaaatgatagagaactgaaggagatcaatggtttaacagttatccatgccaagtcccattgtcagaaatattcttattactcagtcaaacactctttgagcttcccttcctaaaggtaaccattccagtgaatagatgtgcccttttataaggaaacttctgatgtttattaaaaaaaactggccttttgatagaggtaacttaatttgggaatttgttgtgttgaaatggcatttaatttcaacctaaatactgactgctggacataaatcacagaaaatttaacttaagaaaatttacaaaatttattctcaggtaatcattttaataaagttctgcaaaatacacgtttatcttacattcagaaatgtggcaaaaaaggcatagctaaaggctaaacatatggctttagtagtaacaaaagggttcatagaaacttcatggtttgcatttaaacatgtttaaagtgtacttataaactatttttttcttaaagcaaactatgatttattttggtgcacaaatacaaagtggaaacttaccaaaattgaactagctaccatataagcagattgctttaatttgatgggaaaatagtacacacatatatataacaaataatatattaaaaacccatccatcaactaaaacattatatgtataccatcagtactagtgtgttattaataaaaggccaattatctgattaagcattcttttccactgaatggctaatggttaattagcttaaaggacatggttcaaaattggacctatttaccgtaaaggaattcggggttaaaggaacacgaagttttagatggtcacactcctcaaagggttggccgcgttcacctaggccaaattaccagatatccacaggaaatgggccgaacccagtaggcacaaattttgcaccgccacatggn

SEQ ID NO: 9758 - DNA, 759 bp, Homo sapiens
  misc_feature 1, 2, 3, 4, 755, 756, 757, 758, 759: n = A,T,C or G
nnnnaacaaaaaaacctagttattggggcccactgtaatccagtatgatctaattctatcttgactgcatctaaaaagaccctatttccaaataaggtcacatgtacagtactgggggtttgaacgtgaacgtatctttcttgggagatgcgattcaagccacaagagcatttacttctactgtaagaagaaaacaaatcgagtttaaatcctatgtatcttttgtttccaaaccatgctgcagaaactaaaactgaactgcactatatatatttctaggtgtctgaagttttgaaagagcttcccaaaactttaaggtagatccctagtttcatcataaatgtaactaaaagaattggcctaaatgatttcaaagatctccaccagctcctggttaaaaactgcaaagctatgatgttgtgggcttgtaaaaaaaacaaaatacacacacacacacacacacacacacacacaaacaaaactgcaaagcacagttggtgtgcacctgtaatcccagctacttgggaagctgaggtgaaagggtcacttgggctcaggaatgaggccccgactaaaattcgctgcaaaagcccaaaatctagttagcataaattcctcagacatgtaattaaatgacactaatgctttaagcttactgtcaaggttaagtctattcagtgaagacaatgaaatgaattttcatcatgttttgagtctataaacaagtacatactcagacatgtctatcggacgcnnnnn

SEQ ID NO: 9759 - DNA, 4296 bp, Homo sapiens
  misc_feature 1, 2, 3, 4, 5: n = A,T,C or G
nnnnncccctctttcccccctcctcctcaaaatttctttttccccccctccattatttatccccccccccccccttttttttcttttttttttttttgtttttttttcttttttttttttttttttttttgtttttttttttttttttttttttttttttttttttttttttttttttttttttttaaggaaagacattttgcttttttattttctgtaaaactctgtaaataaaatacaaaaccaagggatgtggctgggcagcggcagggtggccaagccccagacactgatttgtggcaagggatgtgctgagccgaggctgggaggcacttgactgcaggcactgactctccaaccccaggggcaacagaagaatatattagattttcattgctaggaatctgtgggggaggggtatctggagccagcccttaccctccctgccagtgcctggtgagccctgaaagtggggggaaaggggcaccaggaacccatgggtgaatagtttagaatgctgtgctggccatgctgccaggcccaaagatgcggggcagggcgtccagggactcctccagccgtcgatgggcagactgtccctcttctccacactgctgtaggctttgccgggcagcttccctcacagcttctgtgtcagtttggcagaggtacaccaggggctcaatgccctcgggagccttgatgcagcctagggccaggcagccagccactcgagtctgcacgtcctcatcctccagctggtccaggaagcacaggagggccctctcccggaaggtagggcccagtgacaggctccggagctgggtgctgacagcagccatgaccttgttgttgccatggacgagcagggagctgagggcccgcagcccgtcccttcgcagacgcccctcgggcgccaatctcagggccttcagcacaacagcctgatcatccgagttcagattccgcaccagtagcacctcctcagcggtctcagtcacgtaggcctccatggtggggctgtccaaggtttccacaaaactccagaactggaagactgtgagctgctctccaggccctggctggggccttctgggcagcttctgccccagggcatcctccaggaacttcacacacacagcctcagccaagcctggctggcgcagggagaggcgggcaccatactggttgcagaaggtgagaagcacccgctccaccgggcagaggaagcagctgagtctctctgtgcactggtcccagaaggtcaggaagccaggccgagaggccgagaactgcaccacttcctgggcagagctggccgggatctcccaccgcctgctgaactcgcatactgcctccagtactcgggcttcccgcagcagccgctccagggcccatgcctcctggcagcgcaggggcccaaatgtgcccagtttcagcaggaggcgactgcagtggtacaggtgccggaccaaggcagcatccagagctggacaccccgtgctgagggggcgggcactgggtgagtctatgctgtcctcagccccagcctccgggctgcttggaggcctgtccccaggaacatcattgtcttcatcttcgtcttcattgaggaagctgaagctctccaaggcatgctccacagtgatgctgagactggaggcccggctgcgagtcagaccttgtctctgcatgagcagactttctaggcgggtcacctcctgctccaggccctgcagctcaggaaactggccacggtagtcatccagggcagccattagggcccccagtgcctcctccaggctcctgtccccagaccctccggctgccgttgggactggggtctggacagccatggccaggcaaaggtctgaatgctggggtgcaggggttgggggtgagggagtggggcttagactctgaaccgtagactctgagggatctggggcagggcttgtgaggggtttcctactggaatgggcaggacttgggtggggagttctgggggccatagggtctgcctgagtgtaggaattggagactgggggactacagggaagggagtcagtgcctgggagggtggggtctgagtgtttggaggggctggagagggtagcaagttctagagaagtggaagggcttacatttataaggatggggcttgtggtgggatgggtggggcttgtggtaggatgggtgggacttgtggcagtctggactaggcccataccactgggggtaggacttgtagtggtgggaggtgacatactggttttgtgggtgggacttgtgggggtatgggtggggcttgtggaagtatgagtggggcttgctgtggtatgggtagggcttggcatagtgtgggtggggcttgtggtagtctggactgggcctatgatattgagggtagggcctgtagtagtaagggtagagattatgggcttgtgggtggagcctgtagtagtgtgagtgagggggcttggagcactgtgggtagtggtaatggcactataggtagagcctgtagtggtgtgagtggggcctggcagttctgaagggccagagtctgtggacttatgaactgagtctaggtgtgcagatggggcagggtctgtagatgtggggacagagcctgttgtaccgagggtagagcttgtggcagagtggccagggtccagggcaggaggaacaggactggggtgctctccatgggtgggagctgggtgtgtaggtgggctaggtccccaggctaggctttctgggccaacggcctccactgaagcctcagccaaggcagcatctacactagcctcactgatgtggctcagagtccgactgtagggtgcatgcccatttgccaggactggggccacggccccctcctcatccaagggcccagagctgggggtctcaggcctgcggaaggcaacttggatgggaaggggctcgggctgctgcaccaggggcctaggggctggtgagtggcgggcagtgcctgagagctgtgggctggatgagtcgtctgaagattcagatgacagggaccatgctgtcccattctccagctcctcctgccgtcgcagcatgttatagaaagcctgttcccgaagtgagggtgtgtccggtgggctctggctataggtggagaagcgcttggtgactgtggaggccttgttgacagaagaagcagctgagggctggtcatccttgtcgaaggggctccatgtgacttccaggctgagcttgatggtaccaaggtcattgatatccacagccacaacctggggcagggcggcaaacaggtccttggtctcacaggagacactgcccacaaccacatggttggccaggcccttcagttctgtcaccttaatagacagaaattccgtgagtagagggagaaagatggtttcttcactgtcccacacctgctttccactaccctcaattcggccccgtagtttccagcgctgacgcccatatttcatgcagatctcatactgatcgcctacacacagcctggcgaagccagccagccctttcattcggagatgaaactcgcccagctgtgcctccagctcgctctccagcagacacatgctctccgtgtactcgcgatgcccccgagtggcctctgccaggctgtcccgggcctctcggcttcccggggacccagtggtgtaggcacggaccatgttgtaggcaccatcccggagacgccgctggacacagtatgcctcatacagctcatcgatcttgctggcatggaactccagtcgtcgcaggaagcgttcaatggacttgacttgcttgtccagatcatacaggaagcccaagcgggaattcctcttggactcccttatctgcccctggagtttctcttgctcctgctggtgcacttccaagtaggccgtcaggccccgcttcagcgccgtgtacaccaggtccagccgctcgggctgcggcaccttggcggctgggtgagccacggaaaacatcctggacactcgggagagcgcggggggcttccgtgggggccccggcgggctgaagaccgggaaactcctgggcccccgctcgtggctgccgaggacgcctgcgaaggactggctcctattgacccgggcgctgagcagacggcgctgcggccgcaccgacagggacatcatagagtgagtccgcgcggggctccatggctgcgctgggctgcgcggacctcgcgctgtccttgcgctcggaggtgcccggcctggtcgcgccgcagctgccgctgtcgccgccgcaggcgcctcgtgc

SEQ ID NO: 9760 - DNA, 185 bp, Homo sapiens
  misc_feature 1, 2, 3, 4, 184, 185: n = A,T,C or G
nnnnacattcaaactcatagttttaataaaatacatctttagatcaaagctgaacgaagacatcagtagtagatcagagcattccatttttcttctgcatgatggatggcttatgccattttttatctaatatttccacagaacattgcattcacctatcattttactcattctactcctcaann

SEQ ID NO: 9761 - DNA, 1262 bp, Homo sapiens
  misc_feature 1, 1258, 1259, 1260, 1261, 1262: n = A,T,C or G
naggatttagagaattttgaattttgatgcattttttttttgtaggatattttattgctggcaaactggttaataagttgggcttgtagcgccatcataaaaattcgctagataattagagaattgatggcacacagactcccgagatagcacaaaacacatatctcgagggccccccccccttgaagttcacaaaaaagtcaaaatttatcaaattgtaaattaagatgttttgtgagtcacatacaaatacaacataccatttcaaaaatgttcaaatcattagacaaactagactctatgtattctctaaaatttatttacagttaataagttaaaaagcaaagtacaagcagattataaatctcaaccataagcacatcaaactgtccagggaaacactttgattccattacaaacaattgttttctaatgcgcttaagacataacactctatcaaaaaatattttaaacacaccaataaatattaggcatgtatgtccattaaaaaccattaaagagtcctgtggcaatccttaaaacaatgaaaaacttttgagttcaaaattgctcagatattttgtattcaaatatttttaaaatttacttaagagttttctaaaaaatagtactatcatttgcacacagcagatcaataggtgtcagtcaccagcttaagttacacttgtcaatattcaaacttgaataaaataaacacacatcacaacagcgacactttgcactatcaacaatgaagcttgccctcaacaattatgacgttactggttttagtaacataaaaatacattgctggttgacaggaaggataaaaatgacatcaagaatctcaaaaagttatgtgaggtgccggtcaccacatttaggcactcaggaattaaaaatcaaataaaagcatagcgaggtgatgaatttcctcctggcttccccctctacttgtgccatatgagataaaagagaaggcaagagaatgaacgaagatcatgagatttctttcaaaaactatacacaagctaagctacagacttcacttcagaggagtaagtggatgcctcattataaaggccactatgccaagtttcttttcacattctgtgacaaagtacccatgaaatactttcactttcctattagtataccagtcaactatattagatgttgcttcacattttaaaagttgtcacataggtttttaccaaagggcaaaaataaagatttttacatcttatttcacagacannnnn

SEQ ID NO: 9762 - DNA, 2190 bp, Homo sapiens
  misc_feature 1, 2, 2183, 2184, 2185, 2186, 2187, 2188, 2189, 2190: n = A,T,C or G
nnagacgcagtgactcgtattatggtctagctgtttccatgatgtaaacccttcgacggtgttctggcaggatgggcgtggtgtgcccctgactggcaacgtgaccacgtcgcagagtggcaacgatgcagggcttgtatgatgtgcacagcgtcctgcgggtggtgctgggtgcgaatggcacctacagctgcctggtgcgcaaccccgtgctgcagcaggatgcgcacggctctgtcaccatcacagggcagcctatgacattccccccagaggccctgtgggtgaccgtggggctgtctgtctgtctcattgcactgctggtggccctggctttcgtgtgctggagaaagatcaaacagagctgtgaggaggagaatgcaggagcttgaggaccaggatagggagggagaaggctccaagacagccctgcagcctctgaaacactctgacagcaaagaagatgatggacaagaaatagcctgaccatgaggaccagggagctgctacccctccctacagctcctaccctctggctgcaatggggctgcactgtgagccctgcccccaacagatgcatcctgctctgacaggtgggctccttctccaaaggatgcgatacacagaccactgtgcagccttatttctccaatggacatgattcccaagtcatcctgctgccttttttcttatagacacaatgaacagaccacccacaaccttagttctctaagtcatcctgcctgctgccttatttcacagtacatacatttcttagggacacagtacactgaccacatcaccaccctcttcttccagtgctgcgtggaccatctggctgcctttttttctccaaaagatgcaatattcagactgactgaccccctgccttatttcaccaaagacacgatgcatagtcaccccggccttgtttctccaatggccgtgatacactagtgatcatgttcagccctgcttccacctgcatagaatcttttcttctcagacagggacagtgcggcctcaacatctcctggagtctagaagctgtttcctttcccctccttcctcctcttgctctagccttaatactggccttttccctccctgccccaagtgaagacagggcactctgcgcccaccacatgcacagctgtgcatggagacctgcaggtgcacgtgctggaacacgtgtggttcccccctggcccagcctcctctgcagtgcccctctcccctgcccatcctccccacggaagcatgtgctggtcacactggttctccaggggtctgtgatggggcccctgggggtcagcttctgtccctctgccttctcacctctttgttcctttcttttcatgtatccattcagttgatgtttattgagcaactacagatgtcagcactgtgttaggtgctgggggccctgcgtgggaagataaagttcctccctcaaggactccccatccagctgggagacagacaactaactacactgcaccctgcggtttgcagggggctcctgcctggctccctgctccacacctcctctgtggctcaaggcttcctggatacctcacccccatcccacccataattcttacccagagcatggggttggggcggaaacctggagagagggacatagcccctcgccacggctagagaatctggtggtgtccaaaatgtctgtccaggtgtgggcaggtgggcaggcaccaaggccctctggacctttcatagcagcagaaaaggcagagcctggggcagggcagggccaggaatgctttggggacaccgaggggactgccccccacccccaccatggtgctattctggggctggggcagtcgtttcctggcttgcctctggccagctcctggcctctggtagagtgagacttcagacgttctgatgccttccggatgtcatctctccctgccccaggaatggaagatgtgaggacttctaatttaactgtggatcggaggattgtaactgggggttttggggaaatagtcctgtaaagttaaaaaaaaaaagggggggtaaattccgaggcagtttggttccggtttgtaagggcctagggggtaagagacggggtaacgggggaaggggcttgagaccttgggttggcacaaaggtaagtggacttgggttaaaaaataaaaggctatgcnnnnnnnn

SEQ ID NO: 9763 - DNA, 2349 bp, Homo sapiens
  misc_feature 1, 2, 2321, 2322, 2323, 2324, 2325, 2326, 2327, 2328, 2329,2330, 2331, 2332, 2333, 2334, 2335, 2336, 2337, 2338, 2339,2340, 2341, 2342, 2343, 2344, 2345, 2346, 2347, 2348, 2349: n = A,T,C or G
nnaattagcctcctcaatgaaaaagaaagagggggaggaagaggaagagaaaagaagaagaaaaccctgaacatggtttcattggatattcacccgaactgctacagaacaacacgctgcccgattacagcccgggggaatcttttttcactgtctttggggttttcttcccagcggctacaggagtcatggccggttcaacatggggggcgacctcagggagcctgccgccagcattcccctgggctccctggcagctgttggcatctcgtggtttctgtacatcgtcttcgtcttcctcctgggcgccatctgcactcgagaggcccttcgctatgacttcctgatagcggaaaaggtatccctcatgggcttcctgttccttttgggcttatacatctcgtccctggcttcctgcatgggaggactttatggagctccccgcatcctgcagtgcattgcccaggagaaagtgatccctgcacttgcctgtctgggacaagggaaggggccaaacaaaacacccgtggctgccatctgcctgaccagcttggtgaccatggcctttgtttttgtgggtcaagtgaacgttctggcccccatcgtcaccatcaacttcatgcttgacatacgttgcagtggactactcttacttctccctgtccatgtgttcctgcagcctgaccccggtgcctgagccggtgctcagggagggcgcagaaggcctccactgctctgagcacctgctcttagagaaagctcccagttacggctctgagggacctgcccaaagagtcttggagggcacgctactggaattcaccaaggacatggatcagctcctccagctaaccaggaagcttgagagtagccagcccaggcaaggagagggtaacaggaccccagaaagtcagaagaggaaaagcaagaaggccaccaagcagaccctacaagatagcttcctcttggacctcaaatcccctccttctttccctgtcgagatctctgacaggttgcccgctgcctcctgggaggggcaggagtcctgctggaacaagcagacttccaagagcgaagggactcagcctgagggaacatatggagagcaacttgttcctgagctgtgcaaccaatcagagtccagtggagaagatttcttcctgaagtccaggctccaagaacaagatgtctggagaagatccacttctttctatacccacatgtgcaacccctgggtctccctgttgggggctgttgggtcccttctcatcatgtttgtgatacagtgggtgtataccctggttaacatgggtgttgctgccatcgtgtatttctacattggccgggccagtccagggcttcaccttggatcagcctccaacttcagctttttccggtggatgaggtctctcttgctcccctcctgcaggagcttgcagtccccccaggagcagatcatcttggcgccgtccctggctaaggttgacatggagatgactcagctcacccaggagaatgcagacttcgccactcgggatcgctaccaccactcctccctcgtgaaccgggagcagctgatgcctcactactagatgcagtgctgggaccttcctcttttggagctgtcccatgtacagtggacccaagcccaggaccttcgtggagctgcttctccaacctgagaaactcaagacccatcctcccgctgtcactttggacaatggaaatctacattttcttttccctttttttttttttgagacagagtctcgccttgtcacccaggctggagtccagtggcacaatcttggctcactgcaacctctgcttcccgagttcaagcaattctcctgcctcagctctgagtagctgggattataggcatgcaccaccaccacccagctattttttgtatttttactggagacagggtttcaccatgttggccaggctggtctcgaactcctgacctcgtgatccacccgtctcagcctcccaaagtactgggattacaggcgtgagccaccatgcctggccagaaatctatgttttcttagaacatgtggaagaaggaaaaagacaaaaaggaagtctggattctgaggaccacgtctcacccagggtgacatcaggaatggtgctagcctctgcaacacgacacccagtttgaagagctctatacaggtactaagactagcaggggacaccaagactctgcacaaccagattgcttgtgcagagggccacaataagtgtatgttttatattttattgtattatttattcaaaaataaataatacactcacatgtttccacaccnnnnnnnnnnnnnnnnnnnnnnnnnnnnn

SEQ ID NO: 9764 - DNA, 1093 bp, Homo sapiens
accacctacaagctagagtggtaaatttcaggaaagcagaagttaaaggcaaaattgtaaatcagtcgagatcgggtgccttcagggtggtatggctgtataccaaaattgtaaatcactacatgaagcttatatattggtttggcctgaaaggtgaagtggggtaggcagggggcgggcttacaggttatggtggattcaaagactccctgatttgtgattggttaaggaagcaaagctttgtctaaaaacttggggtccgcagaaaggaacattaaggtctggccaggcccctcaggaagaaactgagagcaaagaatggaggtcagagtttagtccctggtgttcccccttatctgacgtctgtgtgaatccatttggtgggggtctgggtttctgaaaagtagctcaggggcacgtgttaaggatgtctctaggtgactctaacttccctggctattgtttgaaactgttatgaccttcttgcttatcagcttgctggtttccttctcggggcgagctgggtgcctggagttttcggtgaaggaaactcaagattctcctttatttctgtgcttgtgggaatccccctggcacaccccaaagaggggtccctgctccgtctcacagggatctttttgtatatttggcttagcatcatacatttgccatgttgtttcatcatctgcctaatttactgtttttgaatatttcatttgtttctaattgttactacagataatgctggggtgagcaactctgtgtacataggtttatctcctattggaatattttctttatataggcgttttttttttttctttttttttggagacagagtcttgctctgttgcccaggctggagtgcagtggcgcgactggagctcactgcaacctccacttcccgggttcaagtgattgtcccacctcagcctcctgaatagctgggattacaggtgcatgctaccatgcctgtctctactaaaaatacaaaaattgtttagctctgtttttcataatagaaatagaaaaggtaaaattgcttttcttctgaaaagaacaagtattgttcatccaagaagggtttttgtga

SEQ ID NO: 9765 - DNA, 582 bp, Homo sapiens
  misc_feature 1, 2, 3, 4: n = A,T,C or G
nnnngagagtccaccatgaccttatttagcaggcaagttccagattccccaagcctctggctccatcagaacaccagcagctgaagtcaggcattaacagaggtgcaacattggtccttcccagtgagagcagtggggcctcccagactgcatattcatgtgcagagtggaacctggcccccagacatggcagaactacgctccttgcagcaaccactcgaccactacagcacagatgaggccctgcccgctgcaccgggccctggcagggctgggaggcatcttgggcaggaagccagaccccctctccaggtacacccatcaagccaccagcctggccaaacgggcatctttctgtccagagctcatcaataggaactgggcaaccaggtggggagccgccaggggagcttggagagggcagagtaggagcctccatgaaccaagtcaggctggaaggggtcagccctcgtggtccgtcagcgtgcggcggagtccctgtgcctaagtagcagagcggtagtcattgaaacaggccgggatgccagcaagagggaggcgagcatgcagtgagcgataggt

SEQ ID NO: 9766 - DNA, 2910 bp, Homo sapiens
  misc_feature 1, 52, 137, 226, 2882, 2883, 2884, 2885, 2886, 2887, 2888,2889, 2890, 2891, 2892, 2893, 2894, 2895, 2896, 2897, 2898,2899, 2900, 2901, 2902, 2903, 2904, 2905, 2906, 2907, 2908,2909, 2910: n = A,T,C or G
naatcagtttgtttctcttggatcgatgtgtttcccagaggcagtgcttctnagtgatgaaagaaatattttatcaaatgtagatgatatcttagcagctacagcagcagcttgtggagttacacctactgattttnccaagtcaacttcaaatgaaaccatgcaggctgttgaagatggtgattctaaatctcattttcagcagtcattagatgtgaggcatgtnacttcagattttaactctatgacagctacagtaggtaagccacagaatataaatgatacttccttaaatggaaatcaggttactgtgaacctttcaccagtacctgcccttcagtcaaaaatgactcttgatcaacagcacattgaaacacctggtcaaaatatacccactaaagtaacttcagcagtggttggaccaagtcatgaagtccaggagccaagttctggcccattcaagaaacagtctgctaccaatcttgaatctgaagaagacagtgaagctcctgttgatagtacattaaataataacagaaaccaagagtttgtttctagtagtagaagtataagtggagagagtgctacatcagagagtgaatttaccttagggggtgacgacagtggtgtgtcaatgaacccagctaggagtgcacttgcactgttggccatggcccaatctggggatgcagtcagtgtcaagattgaagaagaaaaccaagatttaatgcattttaaccttcaaaagaaaagagctaaaggaaaagggcaagttaaagaggaagacaacagtaatcagaaacagctgaaaagacctgcccaaggcaaacgccagaatccaaggggaacagatatttacttaccgtatactcctccttcctcagaaagctgccatgatggttatcagcatcaagaaaaaatgagacagaagatcaaagaggtggaggaaaaacaaccagaagtcaaaacaggatttattgcttctttcttagattttctgaaatccgggcccaagcagcagttttccactcttgctgtacgaatgcctaacaggactagacggccagggacccagatggttcgtacattttgtcccccaccacttcccaagccttcatctacaacacccacacctttagtgtctgaaactggcggtaacagtccatcagataaagttgataatgaacttaaaaacttggaacatttatcttcattttcttctgatgaagatgatcctggatatagtcaagatgcttataaaagcgtctctactcccttaactactttggatgctacttctgataaaaagaagaaaacagaagccctacaggtggcaactactagcccaactgccaatactactggtactgctactacttcctcaaccactgtgggtgcagttaagcaagaacctctccactctacttcatatgcagtaaatattctggaaaatataagctcttcagaatcctcaaagcccattgaacttgatggtcttccttcagaccagtttgcaaaaggacaggacactgttgccatagaaggttttacagatgaggaggacacagaaagcggaggagaaggccaatacagagagcgtgatgaatttgtggtaaagatagaagacatagagacttttaaggaggctttaaaaacaggaaaagaacctccagctatttggaaagtacaaaaagctttattacagaaatttgttcctgaaattcgagatggtcaaagagaatttgctgctacaaatagttatcttggatattttggagatgcaaagagtaaatacaaaagaatatatgtgaagttcattgaaaatgcaaacaagaaggaatatgtcagagtgtgttctaaaaagccaagaaataaaccttcacaaactatcagaactgttcaagctaagccaagtagtagcagtaaaacttctgatcctctagcatcaaaaactacaactacaaaagccccttccgtgaaacccaaagttaaacagccaaaagtaaaggctgagccaccaccaaagaaacggaaaaaatggaaagaagaattttcatcatcccaatctgactcatctcctgagatccatactagtagtagtgacgatgaggaatttgaacctcccgctccctttgtcactcgctttttgaacacaagagcaatgaaggaaacctttaagagctacatggaattgcttgttagcattgccttggaccctgacacaatgcaagccttagagaagagcaatgatgagctacttttacctcatatgaaaaaaatagatggcatgctaaatgataaccgaaagagacttcttttgaatcttcatttggatcaatcattcaagaatgctttggaaagttttcctgaactaacaataattactcgagattctaaagcaaagagtggaggaactgctatttctaaaatcaaaatgaatggcaaagcctataataagaaaactctaaggacttctaaaacaaccaccaaatctgcacaagagtttgctgtcgatccagagaaaatacagttgtattctttgtatcattcactccatcattataagtaccatgtttatctgatatgtaaggatgaggtactttcttctcatttacttaaaaaaaatgtttttcagaatgttaaggagactctagccatagtattttggagtgttttaaagagagttgtgaaatacatgtgtgtatgtattttgtctatgtattctgtaaataatgacttgatttattgttctgagtctctctgctatgttttgtgctcagatttacccgagcctcaccacctcttgtaggagctataattggtaatgttttgaagctgttggtgcttgctttacatcgccataataaatgatgtttttttgnnnnnnnnnnnnnnnnnnnnnnnnnnnnn

SEQ ID NO: 9767 - DNA, 2978 bp, Homo sapiens
  misc_feature 1, 2, 2974, 2975, 2976, 2977, 2978: n = A,T,C or G
nncgctccggggacgcgcgatgacgccgtggcgggagaagcgtttccggtggcggcggaggctgcactgagcgggacctgcgagcagcgcgggcggcagcccgggggaagcgtccgggaccatgtctggagaactaccaccaaacattaacatcaaggaacctcgatgggatcaaagcactttcattggacgagccaatcatttcttcactgtaactgaccccaggaacattctgttaaccaacgaacaactcgagagtgcgagaaaaatagtacatgattacaggcaaggaattgttcctcctggtcttacagaaaatgaattgtggagagcaaagtacatctatgattcagcttttcatcctgacactggtgagaagatgattttgataggaagaatgtcagcccaggttcccatgaacatgaccatcacaggttgtatgatgacgttttacaggactacgccggctgtgctgttctggcagtggattaaccagtccttcaatgccgtcgtcaattacaccaacagaagtggagacgcacccctcactgtcaatgagttgggaacagcttacgtttctgcaacaactggtgccgtagcaacagctctaggactcaatgcattgaccaagcatgtctcaccactgataggacgttttgttccctttgctgccgtagctgctgctaattgcattaatattccattaatgaggcaaagggaactcaaagttggcattcccgtcacggatgagaatgggaaccgcttgggggagtcggcgaacgctgcgaaacaagccatcacgcaagttgtcgtgtccaggattctcatggcagcccctggcatggccatccctccattcattatgaacactttggaaaagaaagcctttttgaagaggttcccatggatgagtgcacccattcaagttgggttagttggcttctgtttggtgtttgctacacccctgtgttgtgccctgtttcctcagaaaagttccatgtctgtgacaagcttggaggccgagttgcaagctaagatccaagagagccatcctgaattgcgacgcgtgtacttcaataagggattgtaaagcagggaggaaacctctgcagctcattctgccactgcaaagctggtgtagccatgctggtgagaaaaatcctgttcaacctgggttctcccagttacggaaaccttttaaagatccacattagccttttagaataaagctgctactttaacagagcacctggcgtgggccaagtgcctgatactcccttacactgaatcatgttatgatttatagaaatacctttcctgtagcttttatagtcattgtttttcaaagacgatataccagccctcacccaggttttaaaaaagcactggtaggcatagaataggtgctcagtatatggtcagtaaatgttctattgattatcaatcagtgaaaaaagaaatctgtttaaaatactgaattttcatctcactcccattgcaaatcaaggagatctcagcagtgaactgggaaaatacaaaagctctgggctaatctataaaaacttaccctgaaatattaagggcagtttgcttctagtttggggattgcgctagcccaatgaaggtgatgaagcttttggatttggagggtaaaagctccttcacaccccttccaaaagtcagtcacagaccactgcaacatgccttccctgctggatcattatatacattcagattgtgagtggattgccttggttgacttttaatttattgttttttgttcttataaagatgataatcttaccttgcagttattgactttatattcaattatttacatcaaataatgaaataactgaaatgtacaaatgtcaaattttggaagtatattcaataccaatgctgtatgagtgggctgaatccagttcattgttttttttttggtaagaagtgagactacagttccagctacctacatgtcttttcttgtcatccttatagatctctttggctttcagaaagatacagtgataatgtgtgtatgaatcagtcacaatgaattttacttgaatattgtatgttgcattccacttcatttgaaaataatgaaaccatgtaccactgtttacatcatctgtagtgatttcatagataatatatttaatatgacagattatgtttcaactctgtagatgtttaacgtcatagacagttggccctctgtatccgtgagctctatatctgtgaattcaaccaagtttggatggaaaattttttttttttttttttttttttttgagacggagtctcgctctgtcacccaggctggagtgcagtggcgtagtctcggctcactgcaagccccgcctcctgggttcacgccgttctcctgcctcagcctctctgagaagctgggactacaggcgcccgccaccacgcccggctaatttttttgtatttttagtagagacggggtttcactgtggtctcgatctcctgacctcgtgatccgcccgccttggcctcccaaggtgctgggattacaagcgtgagccaccgcacccggcctgaaaatattttctaaaaagataaaaaatatacataacgatgaaaaataatacaaatttaaaaaccaatacagtataacaactatttacatagtgcttacattgtattaggtgttataagcaatctagagatgatttagcaagtatacaggaggatgtgcctaggttatatgcaaatactgtgccattttatatcaggaacttgagcatctgcagatattggtatcggagggcggtcctggaaccaagcatccacggatactgaggggtgacatttcatgaagtgtagatcattgtattcagagattgtaaatgaaaaaaatatagaaactatttagttttggtagattttttttctgacaatgtgaccagactgaatttcctcataaagaaaaaatggcgtgccnnnnn

SEQ ID NO: 9768 - DNA, 1454 bp, Homo sapiens
  misc_feature 1, 2, 1447, 1448, 1449, 1450, 1451, 1452, 1453, 1454: n = A,T,C or G
nnccgcccacgcgtgcgagaaactatatagataatgggatggtcggatactacatgctgataactcgttaacctacaatcatttcatgatacagctgcttcttattaatcatacaaactctcaccatgatgtgaagagtttcacaaatccttcaaaataaaaagtaatgacttagaaactgccttcctgggtgatttgcatgtgtcttagtcttagtcaccttattatcctgacacaaaaacacatgagcatacatgtctacacatgactacacaaatgcaaacctttgcaaacacattattatgcttttgcacacacacacctgtacacacacaccggcatgtttatacacagggagtgtatggttcctgtaagcactaagttagctgttttcatttaatgacctgtggtttaacccttttgatcactaccaccattatcagcaccagactgagcagctatatccttttattaatcatggtcattcattcattcattcattcacaaaatatttatgatgtatttactctgcaccaggtcccatgccaagcactggggacacagttatggcaaagtagacaaagcatttgttcatttggagcttagagtccaggaggaatacattagataatgacacaatcaaatataaattgcaagatgtcacaggtgtgatgaagggagagtaggagagaccatgagtatgtgtaacaggaggacacagcattattctagtgctgtactgttccgtacggcagccactacccacatgtaactttttaagatttaaatttaaattagttaacattcaaaacgcagctccccaatcacactagcaacatttcaagtgcttgagagccatgcatgattagtggttaccctattgaataggtcagaagtagaatcttttcatcatcacagaaagttctattggacagtgctcttctagatcatcataagactacagagcacttttcaaagctcatgcatgttcatcatgttagtgtcgtattttgagctggggttttgagactccccttagagatagagaaacagacccaagaaatgtgctcaattgcaatgggccacatacctagatctccagatgtcatttcccctctcttattttaagttatgttaagaattactaaaaaacagtaaaaggttccttaaaaaaattcacgtaacaacaacaaacaaatcatccgtaactatcaatccacttcacactgccaacgacgcgactgcatcccacgtccgacagtacgaacacaatccaccaacacgtacagtggggggcgccttaaattacccgcagggccaactgaagacccctctttgaagaggcaccatctgattataaaactgcggggcaatcaatcacggggaaccgctggcttgcgaaacctcgtgtatctcgccacagcatctgctgtactagtgtgaccannnnnnnn

SEQ ID NO: 9769 - DNA, 3294 bp, Homo sapiens
  misc_feature 1, 3293, 3294: n = A,T,C or G
ncaaaaccgtatcagaactcacaaattagcataattagtcccaagcttgatttaaatgtttgaagaacagcaaacatcaaataatataataccaaatagaatattatagtctctatgaggtaataactcatagatttaaacttttatttttacttatcttggtcataagttggcattctctcacattccacatgatatagagggctacgttttggaattttccttttcttaattgcccagagttatcagacagattataaaaatggcttttaatggcttaaaccatttctaaacctctatcttagcagatcaatgcaggatctaattcttttgataagttctagctctaaaagtgatagtgggactgtatgttttctgatactggtggcttatgttattaaaccttttttaaaaaaggttcactctaaaagctgaactacatccttagttttcagtctacttgactctatcaggagctttttaaggaaagtaagtataacatgcaaaggaagctttttttgtattcattttggactcctgtcaataaaaatagaagtttgttgactcgttttatgtttcaatggtgtgtgtctttttactatcaggacataaatagggcaatccacttctttatttttcaactaaagattgaatagtattgtacattactgctaaagtgactgctatttctgtatactgtagaaaaacccaggagtgagagggatttcccctcatagtacaactggaaggatagtgcttgtaaagagtagagatgtgtacatgatgaatcattgagggagggtggatatttttattcctagatatggaggaaacataagtctgtagtattataaaactgattgtaataattctttcctatcaaaatctccataggtcaaaatattgttggaatactaaaatttgcaaccttgtttactttaaaaggttgccactttcagtgcagaatactaccggcatcttgttactgcaatagttggaaataaaatgtgaaaattagcaaaaccatgcatggtttttttggttctaaatttaagatgtaatatttcctataaaagggtgaaagcagtttctttctctataacctcaatcaccagtttagtgagagcctttcttggcaggcaggaggcagtgtcaccgaggatttttttcatttacttcattgtacaagtaggagggtgggtttaattttcaaatcaggttctgctgtgaagcaccagtgtcttgaggcagctactgattacctaagtgtggtggcagggggtaagccagctggtgtcaagtgaaaggagggattagagaaaacaggtgtggcacaaaggcaaggaaactgagcagacaagacagaacaatgtgtagaatgcatatttcctagttttcttgaaagatttcaagaaaagttttttttttctagtggctactttgccttaaagaggctttataagttcattcacacagctggcttctctggttttaagattctggagaggatgataacctagtaacaccgcagtgcttaaaaaaaaaaaagaaactaccatcaccagaaaattccaccagtttgttttccttttctctttgtgtgatgtgtatgtacttcccaactaagtaaaataaaatttcctctagtgagtgctttaggtaacctctttccatatggcagtagtgaaagaactgagccttcagttgatagttcttctctctccagcaagtcgctaaactccacatcccttcgtttttcctctggaatgagaataacaaactatcctagtttgcatttaatctaatggaaacttgagcaaagtttcaattttcttcctataaagaaactgacattttggcaacaattgatgagcctatagatcatacagtgtataggaagtgaaattgaaacagttaaattatgtgatatttttctctaattggtaaagtacctattaaaatacagctgttcatgaggagacttaccacaattcaaagtgtagcagttgtgtattttagcattataatatttgattgaggccctgaggtgttaatatctcaatctcagagttagatgttcatgtcctttttgaattttttaaacatttttcataattttttttttaagttagggagcacattgagtgaagttctctgtgtagaacaataccttctgctctgcttctcccagctttcactgagggctggaaaaggacaggcctgtccagctgtactgtcccactgtgtatggggaagctcaggctctggtggaagcagggggcatggatgtcaaacaactgatgtggaaacagggagggagagatataatgaggctctctaggcatgttatttttgaccacaagttttgttcagtttgcttcagccaatccaaaccatatactagagtgttctgtagtcacaattcttatttcaaatgtaattcagcaccttacataatttttgagaggttgtcattcatcacatatttactgagtttctatgtgccaggctctgtgactggatactggagctatcaaaatgaaaaaaatagtgttaagaactcactcgctggtgttagagcaggtagatgagtggcaatccatttaaatccatttgccttggctattatttggaatgcctttttttttttagctctatctactgtaggcgaagaattatttctttaggggctagctggtatttgctggccttttttatctctctttctctttttgcttgctaaagacggagtctcgcatcggtcctccaggcgggaggacgtgccggggcacgatctcagcttcatgggaacctcgcctcccagttcaagcgattcttctggctaagccctcctgagtagctgggactgcggtgcatgcaccaaaccagctaatctaacactcagagagacggaatttgccacgttgcccagcctgtttcgagctccggctcaagtgatcaggcctgcttcagcccccagagggcggcaattacgggcagagtcactgggcccagacggggggggttgggggacaaaggcgaggaaacagtcgccccgcgtcctgaaacgcggctgtgtggagaaaacacactcccccacaggcggtaacccggggagcggtataaagggctcacgagcaaacggtgggggcccaacacttaccgggtggagggtcacaagtttgaagaccccctcacgaacgcggcggtcggaaaaaaacggcacatgtcgcgacacacaaaagacggggacgagcgccacacaattctccccagaagatgcgaagcgcaann

SEQ ID NO: 9770 - DNA, 1967 bp, Homo sapiens
  misc_feature 1, 2, 3: n = A,T,C or G
nnnctgaaaaattatataactacacactccgcctggatcttcaacaatgtgttgttcacacttttagcgttcacccaggtcctctcccctctgttcggaaaacccttgcctccattgatttttcccgttttcaccgaccactgatttccatatgcatcataccggcctaaatttttctctgttatggcaacacccacactgtttgtagccgtttaatcgttgctagttccaatccacattttgcacagccagtatatacgatgttgggaagagaagaaaaaatactcttcagagaactgtgagcatttagcgctatcttctgagatgctgtaataggaaatgccagctctgaaatctgggctttaatcagaaccactcctgaacacttatcctctaggtgggttgctaagtctgatatcttcacaaaggagggtgcacttttttgaaattttgctttaaatgtaattgcccttatatcatcatcaaacaagcactcacaggatgaccaaggcgttgtatgcaattctaggttttctagtgtgtaattgcactgaacaaaaagatatttaaattcccaaatataaccttttttcctttgaagttgagggtaccaggctgctccaggaccccataatacaagcgcataatgttgatcttgggcctgttccactgttaacataacttttttctgcttctgtcctctataactgtatactgcctctgtcagtatagtgaaatcaacaactcttagtactgcgtggactaatacatcaggttgaaggtgctccaattctacaaagtctatactgttcaccctctgaggctgcctcggaggaagatctctgaggtaggaatgttttgaggacacatatgccagtaagtcttgaagtacaacttcactaactacactggaatattcttcaggctgaatagatgaataactcccaagatttaataactgactgctaaatgttgattgtagtactgtctcgccaatccattggtcctcatgaataacaacatctgtgagtaaaattatatctccaagaaacactgtaaatgcccaaaatgctgcagtcctccacagaaaaaccttcttcttagtttctgattgatcaattactgtaactgttgctaaaggcactttagagccagaatttggtccgaattttatgtttatttccttcacatggcatggagatagcaccatgactaaacaattatacttctggcttttagaatcacagttttttattaatgatgtttttttaatactcttaaattcagacacatttctccgatccatttctacagcagaatctcctccattagaaatcaacttcattttcttagctacttgaaggactctagatagagcttcagactggcccactttatcttcagaggtacagcttcttttaatagcacttttgtggaaggtatttagttgggaacacagtattcctgagctacacaactcaatacgtatctcatttggtggcagttcatcttcagaactgaaaagttcttgagatcctgtatgttcttcaagacctttatcagagtttatgtgaatgcggctattttctgttttaggacaaacaggactaaaaagttcaagggaatatgcttggttttgtccactttcatatgcttctgtaaaaccatcaagctgaatcgaattctcttcaggtattcttatctccccgtaacttgcctttggttcagtctccatgtttacattccctttatttacaggactccgccttttatctttcttttgagctaaaaaagcaacctggctggaggtaattatactgagaaattctgtatcagttgatattttaaggtctgagaccttcctaactgctgcttcagaccttgacttatctactgcgttcgaggaaaataatcccaaacactggttttgtatttcatgatattctgttggcacgcactctctttgt

SEQ ID NO: 9771 - DNA, 889 bp, Homo sapiens
  misc_feature 1, 2, 861, 862, 863, 864, 865, 866, 867, 868, 869, 870, 871,872, 873, 874, 875, 876, 877, 878, 879, 880, 881, 882, 883,884, 885, 886, 887, 888, 889: n = A,T,C or G
nngcttcactgtggtttataagcctacgggagagcaccgttgctcagatgctactgtgagcttcctgtccggtgttagaaagtaactagttaaaagttcattttagaatgtatgggtttttgggggatgaacccaagaattacgttaattaagttccaaaggactgagaaccaattttaatattttcacatttataggaaagaaattcatatgtccctgaaacttctaggacaaaaccaaacaagtaaggagggaactgttgcaaagccatttcatcgagaaggggacagaaggagaaatacacacatgtatacacaaacagaatggttgagaaaacgttttaataaaatgtgagggttgtatgtgtgcgtgtatatatttacacttaacctctaaaattctcttctacagtatctctgttatgaatatgatggaaaagcaacattttggtggtgagactattgttaaaataaatttgagaaagacgaaaattttgtgagtcttgataattacaagtcaacagctatcgaaagttagcacagcttgtctgtggtgctgtttttttccccactgcagtggacttatgctgttttcatgtttagaaacaaaaaggtttcatgtgattcatgtgtaagatgcacagtatttgacatcctgattatgtaatccctattccatctatccagtcttacacttatggttggcctcaaatctattgcatttatgataatgtattatatctagttgagtttaatatttttttattagcctgtaaataaagatggcatcttctacattaaaatgatattgatctcatttttttaaataaacattttgtttccttgacgttaaaaaaaaaannnnnnnnnnnnnnnnnnnnnnnnnnnnn

SEQ ID NO: 9772 - DNA, 1980 bp, Homo sapiens
cgcgtccgggaagggagggtcatattattttcggctttatttatgtaacatttgctagcttgtaaaaggcgaatgtgaaatattgcatctgcattttccaaggctgattcgtgtagctacccttgccacagttgtgacggatgtatggatgttcttgaacatttcagaaggagtggtagaaaaaaacacacattcagccaaccacttatatgaattgaatgtatcagaagtgtactgaagggactggagatggttttcctcagatgagggggccccaaaattgatagtgcacatctgcacgctttctgcgaggcctcagaacttttcccagggcccctccctcaaattgtctccatgggaaacttgacccagtggcaagttgcactttggtgatcttggtggtctacacacccgttctgtggagagtcgatttacataagctgtgtatacacacacacacacacacacacacacccctaccccacactgactgtctaccgacaaagaccctatttcctggcaaacggcctcctgaaccctgactttttgtgtacatacttgtaaacacggatttttctgggttttggtttgctttttccttttttccccctgcccctgttctagcttgttcttcttggtttgctttcaacctgcttgatggatgtctgcagagtgctctctaagagtccacctcagtgcctcgtgtgctcagtggtcatgggaaaggagcgaaggaaccatccttggttctcccagcttggttgtgtagcaatccctcagcattgtttttctcagcttcttggcaaaaattaaaacaacaacaacaacaacaacaacaacaacaaacagaaggataaactggcttgcctgtggaccctccccggctctggggccagtcgagagccactgagggacccagcactcagagacacaacacacatgtgtagctgcttctggctgagtgtgtttcctgtcaccaatggcctgtttggctggacgatgcctcggcttgaccttttttgaaaagtgctggttagttcccgcccctggtaaacctggggtaggtgggggttctgtcttaactcgaggggcacctgggatccaggacgcttctagggggctctggctgcccgtgttaatgaaggacagcgcttctgcgagcaccctgggaactgggtcttgggtagcaaagccctcccagagaaaagatgggcacaactaaggctttcctgagcaggaagggggtgaagaccaatcccttcctttggtcctttggtacgcaccccctcagagctgagatggaagacatggctagttcttttcagccttgtggagcctgtcagtcgccatcatacctcgagtgaggcccagctagataatgacttgtccaagatggcacacgtggaaagttgatctgcaccagaacccggatgactgtcaccttgaagcgtcctgttctccttctgtgctgtcccaggaagtgtctggcgggcgtgggcagcacagctctacactgtacgattcactagggcatcctgcgagcctcactagccttctggttcatgcctttgacaagcatttttgtgccccctctgcttactgtgacagtcgatgatgaatcttgcgttgccattttctgctgtgggtaactgcgtgcagtgtcttgccttgctttctcttcttactgtcccacagcttggtttcatgttacaaacagaaaagctcgaggctcccaccccgccacatcccaacttcatttccccctcactgtagcccatttccaccccaccacaaagttgccacaggttttctttgtatagaatatttattttgaagctctattttaatagtatttattttagaaagtctactattgtaagagttcttctgtttgtgaagaaaaaaacaagttaaaaactgaatgtactgatttagaaaatatatataaatatatattgttaaatatacacgggactgccg

SEQ ID NO: 9773 - DNA, 3021 bp, Homo sapiens
  misc_feature 1, 2, 3013, 3014, 3015, 3016, 3017, 3018, 3019, 3020, 3021: n = A,T,C or G
nncaattctagggaaactcggccagtgaccagcaaatatatttagaacccttcctgttttatgtctgtacctcgtccacccctcaggtaatacctgcctctcacaggtacagctgtttcttggaaatcctccaaccaaatagcagttttcctaacttgattagcttgagctgacagactgttagaatacagttctctggccacagctgatgagggctttctgtactgcacacagattgtgtactgcaccccagtccaggtgactggtacccactcgagttgtgccgtgcacaacctgtccagtatatgcatgtggtggccctactgactggtaatggttagaggcatttatggatttttagctttgaggaaaaaccatgacttttaacaaatttttatgggttatatgcctaaacccttatgccacatagtggtaaataattatgaaaaatggtctgttcataattggtaggtgccttttgtgagcagggagcataattattggtttattatggtaattatggtgattttttaaatatcatgtaatgttaaaacgttttctaacagtttactgttgcttatctccaagatattatggaattaagaatttttccagatgagtgttacatagattctttgaatttagtataaaagtactgagaattaagtttgtacttccataagcttggattttaaacactgatagtatctcatgagtaatgtgtgttttgggagagggagggatgctgattgatatttcacattgtatgaaataccatgtttgaaactcatagcaataatgctatgctgttgtgatccctctcaagttctgcatttaaaatatattttttctttataggaattgatgtataccatgaagtcattgtcagttgtagtagctctgatgttgaatgagatatcatgttttagcattccattttactgactagggtagaagaacacttttcttggctacatttggaggatacccagggagtcttgggtgttccttatctggggaagcaaacatttcactagtctctttttttcatcctttaaattgtaaattaaggattactcaagctcaccattattcaagattgggactcgcttcccagtcgacactctgccctgcctgtcattgctgcaaagagctgctgctttgccaacctaagcaaagaaaatacggcttctcttgcattattttcccttttggttggtttgttttctagaagtacgttcagatgctttggggaatgcaatgtatgatttgctagctctctcaccacttaactcactgtgaggataaatatgcatgctttttgtaattaactggtgctttgaaaatcttttttaagggagaaaaatctcaaccaaagttatgctcatccagacaagctgacctttgagttaatttcagcacaactcattcttcagtgcctcatgactgaaaacaaaaaacaaaaaaacgaaagcatcttcacaatgaagcttccagatagcaccgttttgctaaaagatacattctcattgttttccaacagtgatggcttccacataaggttaaacaaactaggtgcttgtaaataatttattacagtttactctatcgcatttctgtaacatgaaatgcatgcccttcttcaggggaagactgtggtcaagttaaaaaaaaaaaacaatattaaacaacatgaaactgcagtctgtttttgaaaatgagaatgtcctaagtgattcagaagagaggagggaagttgtgcactctgaaaatgcatgaaaaacaaaggcaaaaactagtgggaaatgtgtagaactgttaactgagacggcttcgagtcttccttctggaatctgttaaatttcacaaagtcatgagggtaaatggagaaaatatttctgggattacaatgaatgtaagcccaaattgtggaattgccagtaacctggatggggaaaagcatttcccatagcactccatgtaatatgagtgctctgtgagatgttcatcagtgttttatagaaatggtgttgctgggaaaccaagtttgcacctggaaacttacaatgcactttagcgcagtaagggcttggcatccggtagtgaaaaactgtctaacccagcattgcccaaactattttgacaccaggacctttttctcctttgggatacttatgaacctctcactaatgtcctgtggagaacattttgggaaacactatgttagatagttctttaaggagacaaaacggtaatgaacagatagcactggggcagaatatgcatgcattttgtaacgtccagtgtggcgttgaatagatgtgtatttcctcccctgcagaaaataagcacagaaaattataatgtaggtgatcggagctctttcctttgatagagagaacagccccaatgatcctggctttttcactgaacgtatcagaatacatggatgaattggggtaaataaggttttaattcagatctagaagaaagtattgtacgtttgaatgcagatttttatccacagatagttgtagtgtttagacatgacaggacctatcgttgaggtttctaagacttactatgggctgtaaacctgttttttaaaactattttagaaacctgagacttgccgtctggcattttagtttaatacaaactaatgattgcatttgaaagagattcttgaccttatttctaaacgtctagagctctgaaatgtcttgatggaaggtattaaactatttgcctgttgtacaaagaaatgttagactcgtgaaaagatactataggtactgggattactgcgatttgtgaggcaaacttttggatggggttgattatgctgtcgggttgcagacccgaaaggggttgttttaacaaattggcaaaaaaaaaaaaagttgggcggcgcaagataaacttgggggcgaaaaaagaagcagagcgcggggtgtcaaaacgcgggaaatgtttatcactactcctcaggtgttgaagaaaaagaaagaannnnnnnnn

SEQ ID NO: 9774 - DNA, 2310 bp, Homo sapiens
  misc_feature 1, 2310: n = A,T,C or G
ncgaccctggaaagagttcatgtcagatgctagaccagcaagttacccaactcaaaattcagccaatgattctttactatagagtacctatcatgtgtcaaataatatacagacttcactactaaccctcacaaaaacttgcagggtaggtggaatgagccccaatttaatttggaggtaatagtgggtcagaaagattaaatgacttgccttaagtcatagagttagcagtgagtggcagcactgggattcaaacccaggtttgtgtcttgtccaaagcctgtgcttactgctttaccattgtgctctttagtttgtaaagtatggtaagctggcctgttatttgtttagtatcttctggattttttttttttaattatagagctagcttaccgtgtgtatcatgtaaaaaaaattcataagattaacaatttccatgagaatatcataaactcagggcacacattctggccattcctgactaaaaaacttcaagcagaataagcagctataaaatagaaaagaaaaattaaggataaacggcattgtgaaaaaaaaccgagccacacagatgagaattaaaaattaacagccagcaaactcaaaagaacctttgtcctccttgagatatggtgatgatcaaaaagttagcaaggaatattaatcaaggaattaaagggcattaggaatgctatagtattggaagaaattacatcttaacatttcaaagccccatttcacttaagagtaaaatctaatctgatgttttttactctgaattttattcagtaatttttattcataattcatgataattggtaatgtagtataattgttagtaaatgcagtacaaattgttctactgttttaaaaagttttccgcagaacagtgcatttatggcaatgctatgtttaatgagttagggacatcaaatatatagtagttccttattttcagttgtgaaaatgaaatggctaaagcagaagagacgtctattttagtcttttaaaaatgtgtgtgggtggtcttttttcctcagaagcccaaagcacatgtatattttgttatttctccttgctatattcctgagactatactaaaaactttaagaaaaggaacaagaaaaaggtaaattcatgtgttccccactgctgtgtctagaaccaagatcacattatatcattgttaaaattgtgttatctagaaagtgcaatatagggaaaacactctaagaatcttttaaaagcctagtgtttcccttatttgtcagaatatgtggtagtggcatccataagtatcttttaacttgcatttagcaggacaaatagtgtgatacttatactgatgacaatcatccccatttaatgaccagcagtcactgagcgctgtgaaaattcactcagtgataccccgtgttggtcttgaaggaaaccgtacatatgaatttttggatagctaatgtatatctctcaagtgccaacatttaaaacttgtaattatttttgatgtgagtatttcaggtatgttagtataccttcctgccttcttcttaaacatcatgctcagtataattcacattttcatgatgaaaagttaaagttatattcataatgtattattataagtatccagctctgatgtatgtaaaacacttcataaaatgtaaagggctataacaaatatgttataaagtgattctctcagccctgaggtatacagaatcatttgcctcagactgctgttggattttaaaatttttaaaatatctgctaagtaatttgctatgtcttctcccacactatcaatatgcctgcttctaacaggctccccactttcttctaatgtgctgttatgagctttggacatgagataaccgtgcctgttcagagtgtctacagtaagagctggacaaactctggggggacacagtctttgagacagctcttttggttgctttccacttttctgaaaggttcacagtaaccttctagataatagaaactcccagttaaagcctaggctagcaatttttttagttgcaactaagtaagatatactacaaactaggatgctgctagactagggaataaacagcaggtccaaagtacagcaagcaccaacaagggtctgttttgcagagggcatcatgctttagaaaaagagagtccggggaaatccgtagacttaattttggggcccaccttgctaccttaaaagggtgatttccgttgtgcaccgtctcccctaaaaatttatttctcagagccccgtgattctcacagggatggaacacccctgtattaaggcan

SEQ ID NO: 9775 - DNA, 1892 bp, Homo sapiens
  misc_feature 1892: n = A,T,C or G
acgcgggggcggcttcttagctttacgatggcaacaagtatggcggctgctagtggtagatttgaaagtgcgaagagtatcgaagagcggaaagaacagacccggaatgccagggccgaggtgttgcgccaggctaaagccaattttgaaaaagaagaaaggcgtaaagaacttaagcgacttcggggtgaggatacatggatgctacctgatgtgaatgagagaattgaacagttctcacaggaacactctgtgaagaaaaagaagaaaaaagacaagcattcaaaaaaagcaaagaaagaaaagaaaaaaaagagcaagaaacagaaatatgaaaaaaacaatgagtcatctgatagctcatcaagctctgaagatgagtgggttgaggctgttccatcccagactcctgacaaggaaaaagcctggaaagtgaaagatgaaaagtcaggaaaagatgacacccaaattatcaagagggatgagtggatgactgttgattttatgtctgttaaaactgtgtcatcatcatcactcaaagctgaaaaggaaactatgaggaaaatagagcaagagaaaaaccaagcgcttgaacagtccaaactgatggaaagagaattgaatccgtactggaaggatggtgggacaggtcttccacctgaagactgtagtgtgtcatcgattactaaagtttcagtggtagaagatggtggattaagctggctaaggaaatcttatctaagaatgaaggaacaagctgagaaacaaagtagaaactttgaggacattgtagccgaaagatatgggtcaatggaaatatttcagtcaaaattagaagatgctgaaaaagctgcatccacgaaagaagattatagacgggaacggtggaggaaacccacatattcagataaagcacaaaattgtcaagaaagtagagaatcagacttagtaaaatatggtaacagttcaagggatagatatgctacaacagatactgcaaaaaatagcaataatgaaaaatttattggtgatgaaaaagataagagacctgggtctttagaaacgtgtagaagagaatctaacccaaggcaaaatcaagagttttcttttggcaatttgagagctaaattcttgagaccctctgatgatgaagaactgtcatttcacagcaagggcagaaaatttgaaccacttagttcatcttcagcattggtagctcagggctctttgtgtagtggttttagaaaacccaccaagaacagtgaagaaagattaacatcatggagtcgctctgatgggagaggagacaagaaacattcaaatcaaaagccatcggaaaccagtactgatgaacaccaacatgttccagaagacccaagagaaaaatcacaagatgaagtcttgagagatgaccctccaaaaaaagaacatctacgggatacaaagtctacatttgctggcagtccagagcgtgagtccattcacatcctgagtgttgatgagaagaacaagttgggagccaagattatcaaagcagagatgatggggaatatggaattagtgaacaacttaagttcaacttgaaaaggcaattaattcaagaaataatacgcaaggatacaaagaaatctggggtcgagaatgaagacagcgagaagtaatccttggcgaaacaacagcggagacgaggctggtgacacaccgaaaatctcgggacccacggggacaaagaacgaggtcaccctgggaagcaagggcgagctgggaggaacagaggagtggacagaaagagagcgaaacacctaaacgcaaggaacagcaaacgagggcccgaacggaacggcaagagtggagcggcaactaggcaaaggagaggccggcgcccgagcacn

SEQ ID NO: 9776 - DNA, 2180 bp, Homo sapiens
  misc_feature 2180: n = A,T,C or G
ggagtcgacccacgcgtccgggcgcgcgcgcgctcgcgtcggaggaccggaaaggaggcggggctgcggcggcgcgcgctcccggaacgcgcgcaccgcagacggcgcggatcgcagggagccggtccgccgccggaacgggagcctgggtgtgcgtgtggagtccggactcgtgggagacgatcgcgatgaacacggtgctgtcgcgggcgaactcactgttcgccttctcgctgagcgtgatggcggcgctcaccttcggctgcttcatcaccaccgccttcaaagacaggagcgtcccggtgcggctgcacgtctcgcggatcatgctaaaaaatgtagaagatttcactggacctagagaaagaagtgatctgggatttatcacatttgatataactgctgatctagagaatatatttgattggaatgttaagcagttgtttctttatttatcagcagaatattcaacaaaaaataatgctctgaaccaagttgtcctatgggacaagattgttttgagaggtgataatccgaagctgctgctgaaagatatgaaaacaaaatattttttctttgacgatggaaatggtctcaagggaaacaggaatgtcactttgaccctgtcttggaacgtcgtaccaaatgctggaattctacctcttgtgacaggatcaggacacgtatctgtcccatttccagatacatatgaaataacgaagagttattaaattattctgaatttgaaacaacatatttttatacttaatgaattgtatctcattaatctcttcccttacatcttcatgtattgttggtttgttttttggttttgggttttttttttttttttttggtataagaactaacatcaaaaggcctgtttaaagggaaaggttaatgggctacttaatattatgaacaaaacaaaaaaacaaggctgccacagtggaatattatcttacaagaataagaactacataaaacagatttgtaaaaaatacatatttgaagtattccctgtatttccattattctttatggaatataaagtaagcatgaaaggtagttaaaactttcaggtgcctgtagagtcataataactgtattttatgccttgcattcacgcaaattcacattggatgtgatttaaaagtagacattctctttttcctcttttaggatatgtttgattactggaaaattaatatggttatttgttagaagtctggtttataaaaaagccaaaagtgatggaatttattccatttgtcttaggaaggcccataatacttgtttttcttacatgtgactagcaactttctccacttaaagactaaatacctctttatatgatgtaaattattctaattcattttaaaatcttttaggtcagcaaaatgtgtgtcttcagtgctttctctaaaaacgttcctttatagctttgtacttttttttttagcgttgccattgaaagttaaaatgtttgcatggtttaccctctgagttatgtttcttctagtgagcatgcctgctgtcactaagtgaattatttactactttttgtaggtctatattttaataattattgggataataataattgtggtatgctttccatttacaaaccactcatatactttagtgtatgtcatcctcaataatctaatgaggtaagtagtataagtgttagctctttgcagataagaaactgaaacccagaagtttattgaattgcttcattgttacctagccagcaaggagtggaattaaaacttgaactcagatcttctaattttctgagctcatcctttctcttatacctcagattggagactactcaattttacttaaaaacttactgataattttgggttaacctggacaaccctttctatttctagaaaaggttcccacttttatatggaaagtgaactaatgttcaagcggcaacaactaaaatgcggaacatttcgatactctgaaaaaacatatgtgcttatattgaacagctaaggggactccagggtgggacaatagcatagattgagacatcaacaggatggaacacagaaggaataagatgatgagagaggggagagaaaattaggacggatttagctgacaggagaagggagtaataaaggaggaataaagaaacaaagataagagacaggaan

SEQ ID NO: 9777 - DNA, 510 bp, Homo sapiens
  misc_feature 1, 2, 3, 4, 510: n = A,T,C or G
nnnnccgccgcagtcccgccggcagccgccgccaaccaccaccatcaccaccaccatgcgctccacgaggcgcccaagttcaccgtggagaccctggagcacacggtcaacaacgactcggagatctggggtctcctgcagccctaccagcacctgatctgcgggaagaacgccagcggggtgctgtgcctaccagacagcctgaatcttcacagagacccacagcggtcaaacaagccaggggaactgcccatgttcagccagtcggagctgaggaccatcgagcagtctttgctggccacgcgcgtaggcagcatcgccgaattgagtgacctggtgtcccgtgcaatgcatcacctgcagcccctcaatgccaagcaccacggcaatggcacccccctgcaccacaagcagggggcactgtacctgcccgcccgcccggccctgtacaccctttgctatttcatgcactgcccacaaatggaatgggaaaaccccaacgtggagccn

SEQ ID NO: 9778 - DNA, 2098 bp, Homo sapiens
  misc_feature 1, 2092, 2093, 2094, 2095, 2096, 2097, 2098: n = A,T,C or G
ncgtccgcccacgcgtccgcccacgcgtccgggatttttgtcactttctgtgtgaactaaagtgattcaatgtctcttttggattgcttctgcacttcaagaacacaagttgaatcactcagacctgaaaaacagtctgaaaccagtatccatcaatacttggttgatgagccaaccctttcctggtcacgtccatccactagagccagtgaagtactatgttccaccaacgtttctcactatgagctccaagtagaaataggaagaggatttgacaacttgacttctgtccatcttgcacggcatactcccacgggaacactggtaactataaaaattacaaatctggaaaactgcaatgaagaacgcctgaaagctttacagaaagccgtgattctatcccactttttccggcatcccaatattacaacttattggacagttttcactgttggcagctggctttgggttatttctccatttatggcctatggttcagcaagtcaactcttgaggacctattttcctgaaggaatgagtgaaactttaataagaaacattctctttggagccgtgagagggttgaactatctgcaccaaaatggctgtattcacaggagtattaaagccagccatatcctcatttctggtgatggcctagtgaccctctctggcctgtcccatctgcatagtttggttaagcatggacagaggcatagggctgtgtatgatttcccacagttcagcacatcagtgcagccgtggctgagtccagaactactgagacaggatttacatgggtataatgtgaagtcagatatttacagtgttgggattacagcatgtgaattagccagtgggcaggtgcctttccaggacatgcatagaactcagatgctgttacagaaactgaaaggtcctccttatagcccattggatatcagtattttccctcaatcagaatccagaatgaaaaattcccagtcaggtgtagactctgggattggagaaagtgtgcttgtctccagtggaactcacacagtaaatagtgaccgattacacacaccatcctcaaaaactttctctcctgccttctttagcttggtacagctctgtttgcaacaagatcctgagaaaaggccatcagcaagcagtttattgtcccatgttttcttcaaacagatgaaagaagaaagccaggattcaatactttcactgttgcctcctgcttataacaagccatcaatatcattgcctccagtgttaccttggactgagccagaatgtgattttcctgatgaaaaagactcatactgggaattctagggctgccaaatcattttatgtcctatatacttgacactttctccttgctgctttttcttctgtatttctaggtacaaataccagaattatacttgaaaatacagttggtgcactggagaatctattatttaaaaccactctgttcaaaggggcaccagtttgtagtccctctgtttcgcacagagtactatgacaaggaaacatcagaattactaatctagctagtgtcatttattctggaatttttttctaagctgtgactaactctttttatctctcaatataatttttgagccagttaatttttttcagtattttgctgtcccttgggaatgggccctcagaggacagtgcttccaagtacatcttctcccagattctctggcctttttaatgagctattgttaaaccaacaggctagtttatcttacatcagacccttttctggtagagggaaaatgtttgtgctttccctttttcttctgttaatacttatggtaacacctaactgagcctcactcacattaaatgattcacttgaaatatatacagaaattgtaatttgcttttttttacaaaagggggctaaagtaacactttcctacttatgtaaattatagatcctaaattcacgcgccccgtgggagctcataagaatactggttgctggaaacaaaaaaaaaagggggcggtaaaattaccgagggcaaaattataggttacagttttggaaaggccaaggggggttaaaaagggggggtaaacnnnnnnn

SEQ ID NO: 9779 - DNA, 1325 bp, Homo sapiens
  misc_feature 1, 2, 3, 4, 5, 6, 1325: n = A,T,C or G
nnnnnncgacaaacgcacgattcccatccattctctcttttgggggatcatctccctcccgagggggttccaccaactccgcgagaggtttattggtggccgcgcaccgaagagccccatggattagacaatggccttaagcaggtgtacacggagatgtaaccaactgtggattacttcaattgctatgagtgttacaactctcctgtgcctgaaggttgtgcactctgccagcttgtgctgtgggtgctgcttgttcttggatacctttctgggaccaatactcttcaagagatgttgtctgagtccaaggccactgctttggctttggctttctccttttcccgatctgtctgattgacaggggctggagtggtccgcccactggctaccttggtaggctccttcagtctggaaggcgtaaggcctccctgcttggtgctgaggagactggggtcaatgctgctgctcacagggcgaggtccaccccgcccgccggtcacgctcatagaacttgacttggctggccggggcaggctgcggtactggatgttagaacgggctccaggagccaggaatcctggctctgcactgttggaaacatctaagctagtcttgcgcccatttactggcttgacagggatgcctgaggacttctggatcttgctgagagtggctgaaccaccagtttgcatgacagtggctgtgcctgtggcaggaggaggcttcttgtagccaaaggatcccgaagtggaggggcgagcaatgcccgaggggggcttcttagcatcactcaggcggtcccgaccagcatcagaggaggagcgttggagcccagtattcttcactgcaagcttacccttgtctgtagctttgccctcaggtttgcctgcgactttgagggcactctgggctgtgtgagtgatgggggaagttacagccacaggtggggtcttgcccttcttcagggaaccagggtggcccaggctgatgggctttttcagttctccacccttggatgaatcatcacagctctcaggccgctccctccgccacttagaagtcccaggttccatcttcaggctaccactgtcgtactccagttttttaggggctttctcctctgattcactaaaccagctcagcccactttctgccagtgagcgcttctctgagtctgtgcgtagcactattgttgagttcctgcgagaagcagtgggattaatagtcttgcattcagtgtgtcaaattgatgtactaatgaaaaatacctaaactgtggggaataagaattaaatctatttcaagcacatgcaacttggaan

SEQ ID NO: 9780 - DNA, 2399 bp, Homo sapiens
  misc_feature 1, 2395, 2396, 2397, 2398, 2399: n = A,T,C or G
ngtagttacactgacggtgcaaagtgacacttttaaaaattctgtcattccttctacatttactagctggcattatttcattgaagaagaactcctcctctttctttttcaatatcactctccgtggattcttctttatattaaatatgttgtaacttattgttgttattcttttgaatgctcaaattgtccagatttgaccaatgcagtctttgttattttttaactccgcaatccaggttaaactaagctatttttaatgcccagagtaatttataatatttcccactcccaacaggaattgagaaagggactccagaagttgggggcttattcagacttcttaaaagtctaccttcttcctctgtactttcagcccaaagtgagacttttgagttgggaagagatacttctgaattaaactactaatcactgtcacccaattctaatcccaaccatctttattctaggcataccatactcactgccatgcttacccttcagttgggcacttttgtcctccttcctattggccttctggttcctacccaactgtccagtccataggcttcaatgacacctttttcccacccctgtggtagcgttggctgcctcctttacctactcaagtaaccgctttaccgctaatttattgctctctgttttcatctataggatcttacctagccatatggcctgctgcctctgccaatttaaaaacagcattgaggctgtctgcaagacagtcaagctgcattgcaacagtgcatgtctgacaaacaccacacattgtcgtgagtccaaattgcctggtgataaattgttacattattttaagtatttgtttttaaatttatttttaattgatgataaaattttaagctaatgatataattgctttatttactcattcagatttaaactccctcaacttctgaactactcccttgctgggagtcaggttctcagttattattacaaaatttaataatggaactgttccatatgcataaaggaccaagagaagggaatgagaaggctagggaatgacattaacatccacaccctgtgtattgtgctccctacttggtgatttgcccccagtgataatttcttcatatagtgcgatgtagtttgtaagctggttttatatgcatgaggtctcaagtactctctgccttttaggacaaatgtagatccagttttgtttttgtttttacaattttataagagtacaagtgatgctgttttatttgaagcctgagagcttctggttccataaccagaaattgctccctggctcttctaatggaatggagggcttttccattcttagaccatccaactctgaacttgctctgaatctcaaacctttctattcacagaacaaatgctcaagtgctttcaagagtttttctgtagattaggtttattagcaccaacttcatgacttctaaaatgtgactgcttttatgtccacatagcttgaatacaggtatctaccagtgatatggggtggataattaataatgcttggctacttatataaagacagagttgcttattattcaaaagttttttttttaccaactaaattattcccttctccccaagaggtgggcagaaaagcattgttaatctccttttacggacgaggaaaaacaagatcagaggtgctaagtgctatagcttagtgccaggtcttctgtccccaattctgggttctccccaagcccatgtttctcctttctcacaatttttacttcttcctctgaccctcagcaccacccaaaatacttttaattctggaaaagaaacccagctgcacactggcacacttgaccttcatgcggccagaagctttggatggttccccatccaaaatattagagatgaaatgaaagcaaagtaagcatctgacaaaagctgctttttcccttctgcattttaggacctcaagtaatgtttatccagaaactgctatcataccatagattcattgtatatttaacaacataggcataccatctggcaaattaaaaatctcttaacctataccctggatctctgcccaaatttaagaaaaggactagggtgggcacagtgttttttccatgtcacttcttctttaatggggctacgatatgtggtagcagagaatggggtgggtgggtggagtgcatgccagatgaggatctatcagcaatgggagggggcctccactttagcatctccaccctgctcctctcagaggatagcctttcattgcattcagctgtgatggtagtaagaacacaggcacactgaggatgaggagggaggcttgtgctctctctgcatctgaggcaggacagcacagggtacggagcagtctgcagagaggacagctcatcannnnn

SEQ ID NO: 9781 - DNA, 1613 bp, Homo sapiens
  misc_feature 1, 2, 3, 1610, 1611, 1612, 1613: n = A,T,C or G
nnngtatcagtcgtgcactcgcgcctcaacataccagggtgcaatttgatcacccccttgctgctgaaatgtgtggaaatgttcgctgcctagattctggcgcgcgacaccactgaactcgtggccacgcgttgaaacacaggggattaacctgggggtaactgaaccttcttactgcctcctaggtgttcccacccacgcctgtaactccggcagaagaggccctggaatttaacagaggtcaaaaaccgagaggggttcccaatagggtcaatgtcttcgtatccatgtcttatttccgcgtaataaatggccccggaagtaaaggaagtaatggtctggatataaatgagatatggttttgtgaggaagaaacatagaggattattcttaacaactgtggcagccttgccaatatggaacccaatttcagagtttgtgaaatggtacaagtctcataaactatctcagcactgcatccgtatttgtgggcacctgtgccaaaagcaccttgatatgtttcttagtgtaattggccagagatggccaatagatgtcttctcaagtgtttttgatcaccaggtcagtgctattgggagtgatataatatggtggttcctaaagttatttttggtctcttttttttttttttttaagtgctatgatagattaacaacacctgccttggatgcaggaattaggtggggctgcacacgtgcatggtattttctatccctatgctaggttttgtttctgttggctgtcttcactagacttgagatgacttgatttacagtaatccctatgtgatgtaactagtctagaccttcccttctccgcaattcccagctccaggtttcagaaagtatgccacactcaacccttctctccagttcatcctgtattaatttcttcccatattaattcaaagggagtggacaggtccctggctgaaaagaaataaagagatccccaaagtggtgggggcttccacgtgcagttgactaattttcacttaacttttggaggctagacatgggagagagaaaagcactgcccagtcacaggtatggaagggagtactgctagctggaaaaaccatatagaaaacatgatgaccatgttgagttgttggtgctgaggctgtgaactctttggcttccttctgatggccctcttgagaacaatctgtactgttcttataaaagattctttctcccagaattatatctcctcagagcaacagcaaggttctcaggatcgaagcctactctagcctgaagggctaggaagattaggataaggataaggataataatccaaaagtctcgacaattccagtagtctctggatggctcccacatcatagaaattttaacactgttccacttgtttacaaaatctaacactggcttagacattctggactttcagtgagggttccagcatctgatgtccctcaactcctttccagggtgagaggcccacttacaggaaacttaacttctcaccatgtggacccatgagggtttttctcttgcagaagggctaaaaagtgaggagctatggaaaaatgtgggtcacttttaaggcagactgtttggttgtgnnnn

SEQ ID NO: 9782 - DNA, 849 bp, Homo sapiens
  misc_feature 1, 2, 848, 849: n = A,T,C or G
nnatctcagtatataaaataatattacttcaccagtaacagatttcattatcttgctgaggagcatcatagcattcaagcatacattaatagaggtggagggctctactggactaatatgtgattaatattttatatgtagggataaaacagaagaattaatggaattgacagatgagcaaagaaatgaactgatgaaaaaagaaagcagtcgactccagaagactggacatcgtgtaacatactcacctcgtaaagagaaagcactaaaaatatatctggatggagcaccaaataaagatctgactcaagactgactctgatagtgtagcattttccctgggagagttttggttttaattagatggttcactaccactgggtagtgccattttggccggacatggttggggtaacccagtgacaccagcactgattggactgccctacaccaatcagaagctcagtgcccaatgggccactgttttgactcggaatcatgttgtgcactatagtcaaatgtactgtaaagtgaaaagggatgtgcataaaaataaaaaaaaacaacaaaaaaagctaaccttctattagaaaaggggacaggggaatgagtaaacttcttttattgcggacaaatgtgcacatagccgctagtaaaactagcctcaaacaggatgctcatagcttaataataaaagctgtgcaaaggccatgaaaaaaatgaaaaaaataaaaaaaaataatgcttaagcaccactaacttaaaagtgtaattacaattacttgaatttaagtaaaaagaaaaattctcaaaattctattatggaacatggggggacaattccgaann

SEQ ID NO: 9783 - DNA, 1357 bp, Homo sapiens
  misc_feature 1, 2, 3, 4, 5, 6, 7, 8, 9, 10, 11, 12, 13, 14, 1297, 1309,1356, 1357: n = A,T,C or G
nnnnnnnnnnnnnnacatcgtgggcccgcggccgcttttttttttttttccatttatttgtgccttcctttcaccagggtttcaaagtttccagggtccatcagatcttttactgccttggtgttaaatttattcctaagtaagtattttttttatgctatcataaatggcatcttaatttttcagttaggtcattattttcattatttatgtataaaaatgctaatgctttttgtatgttgattttgtattctgcaactttactgaattcacttgagttctaacaaacagattttttttgtgtgtgtatctttggggtttttacatagagcccagttttagttttaatagaaatgtttataatagtggatggaataaagactttgtatgattactgtgaaccactatctctctctatatatatagatagatatgaatgagtatgtgtataaatacataaagcaaaggctttgagaaacaatactcatctttgctttctgtaacatactgtggcactttctgttttattttcattataaaatgtcaaacatgacccagtggggttgtgattagcaattagagaaaccccatcctaggtaataaaaagttttcccaaatagcacctatatgtctttctgactgtggtttaatgagtaattaagaccattcagccaagatttacatttgctgccacctttaatagcactgatgaaaagtagaacttttttttttgacttctttttcactgtgcctctaatcaagaaatttttgttaaaatattaagggtttttaatgtttaaagaatgagacataaaaaagttgcagaaaataaatgataaattcttatttattgaaagacattcagttgaggaatagggatataactgtttgttaggtaagcttatatggcacatgattaagttccactaattcgtatttctgcattatgctttctgataattccggagcattatactcatgcagcggtggtagagggtgaactagagaagataagaatgtcttcctaggccggatgcggtggctcacgcctgtaatcccagcactttgggattgcgaggtgggcggatcacttgaggtcaggagttcaagaccagcctggccaacatggtaaaacccgtctctactaacaatacaaagattagcctggtgtggtggcacgggcctgtaatcgcagccccttggaaggccaaggcaggagaatcgcctcaacactggagtgggaggttgcagtgagctgagattgtgccactgcactccagcctgggcaatgaggcangaccctgtctcnaaaataataaataataataatataatgtttttctagagtttcagtcnn

SEQ ID NO: 9784 - DNA, 969 bp, Homo sapiens
  misc_feature 1, 2, 3, 4, 5, 863, 965, 966, 967, 968, 969: n = A,T,C or G
nnnnnatttttttttttttttttttttcttatcaaaaatattttatttacaaaaaattaattatactatacatcctatactggaaatacattgaataattgctaaaataaatacaggcaattaattcaactttttataagaatgagagaatttgacatttgaatgttatcaaagcttaacttagaacataaatagttaaaaaggcaaactcaagttttcatctcatttattggcatggtgtgttttgttttccacaagctctccaatcagtgagagtcttgagtctcagatgtacctttttgtactctgaaggtaggatgtgcagctttttcttaggcaggatagatgtaacatagatgactgcataaaaaagaggcagaaaggcaggaagcccattttttttttaacacttctccatgtgtctctgcctcaccataatgctgtttattcaattattcatatattccgattgtgttttcaacacaggtctacacagcaccagctacaaggcaaggtcaatcgtgtaaaaaataaaactggataatggaggccttgcagtaactaaattagccaagttcagagtatgtggttcaacaatttttatatgtgccaatcattgatatacttattaaaccctgatgtcacttctactgggtagacatttttatacagggccagaacaggaaattagaagttatgatctgtgtaattcagaaaaaccaaaatcctcatttgaaagtaaaagagggtagatccctggtgatttctatctgccaatttgaatttaattgtttaataatttatccaactaaaccgggtaaacattatacttacatggtaagggaacgtgcaagtttgaaaanaaaaaaagacagccaaaactgtttaaagtgtgagtgggacccataaattcaggcccagaaccaaacctttgttaaacgggtttgttgggcccaaatttacannnnn

SEQ ID NO: 9785 - DNA, 8167 bp, Homo sapiens
  misc_feature 8164, 8165, 8166, 8167: n = A,T,C or G
ccggccggggagttgccccaggggccgcgggagttgctgagaggagacagggttgggctttctcctcgcccagaccccaccccaccctgccgaccccaccccctgctccttcctccccgggggcgcgcactcgggcacgcgctcggaagtcgggggtcggcgcggagtgcaggctgctcccggggtaggtgagggaagcgcggaggcggggcgcgggggcagtggtcggcgagcagcgcggtcctcgctaggggcgcccacccgtcagtctctccggcgcgagccgccgccaccgcccgcgccggagtcaggcccctgggcccccaggctcaagcagcgaagcggcctccgggggacgccgctaggcgagaggaacgcgccggtgcccttgccttcgccgtgacccagcgtgcgggcggcgggatgagagggagccatcgggccgcgccggccctgcggccccgggggcggctctggcccgtgctggccgtgctggcggcggccgccgcggcgggctgtgcccaggcagccatggacgagtgcacggacgagggcgggcggccgcagcgctgcatgcccgagttcgtcaacgccgctttcaacgtgactgtggtggccaccaacacgtgtgggactccgcccgaggaatactgtgtgcagaccggggtgaccggggtcaccaagtcctgtcacctgtgcgacgccgggcagccccacctgcagcacggggcagccttcctgaccgactacaacaaccaggccgacaccacctggtggcaaagccagaccatgctggccggggtgcagtaccccagctccatcaacctcacgctgcacctgggaaaagcttttgacatcacctatgtgcgtctcaagttccacaccagccgcccggagagctttgccatttacaagcgcacacgggaagacgggccctggattccttaccagtactacagtggttcctgcgagaacacctactccaaggcaaaccgcggcttcatcaggacaggaggggacgagcagcaggccttgtgtactgatgaattcagtgacatttctcccctcactgggggcaacgtggccttttctaccctggaaggaaggcccagcgcctataactttgacaatagccctgtgctgcaggaatgggtaactgccactgacatcagagtaactcttaatcgcctgaacacttttggagatgaagtgtttaacgatcccaaagttctcaagtcctattattatgccatctctgattttgctgtaggtggcagatgtaaatgtaatggacacgcaagcgagtgtatgaagaacgaatttgataagctggtgtgtaattgcaaacataacacatatggagtagactgtgaaaagtgtcttcctttcttcaatgaccggccgtggaggagggcaactgcggaaagtgccagtgaatgcctgccctgtgattgcaatggtcgatcccaggaatgctacttcgaccctgaactctatcgttccactggccatgggggccactgtaccaactgccaggataacacagatggcgcccactgtgagaggtgccgagagaacttcttccgccttggcaacaatgaagcctgctcttcatgccactgtagtcctgtgggctctctaagcacacagtgtgatagttacggcagatgcagctgtaagccaggagtgatgggggacaaatgtgaccgttgccagcctggattccattctctcactgaagcaggatgcaggccatgctcttgtgatccctctggcagcatagatgaatgtaatgttgaaacaggaagatgtgtttgcaaagacaatgtcgaaggcttcaattgtgaaagatgcaaacctggattttttaatctggaatcatctaatcctcggggttgcacaccctgcttctgctttgggcattcttctgtctgtacaaacgctgttggctacagtgtttattctatctcctctacctttcagattgatgaggatgggtggcgtgcggaacagagagatggctctgaagcatctctcgagtggtcctctgagaggcaagatatcgccgtgatctcagacagctactttcctcggtacttcattgctcctgcaaagttcttgggcaagcaggtgttgagttatggtcagaacctctccttctcctttcgagtggacaggcgagatactcgcctctctgccgaagaccttgtgcttgagggagctggcttaagagtatctgtacccttgatcgctcagggcaattcctatccaagtgagaccactgtgaagtatgtcttcaggctccatgaagcaacagattacccttggaggcctgctcttaccccttttgaatttcagaagctcctaaacaacttgacctctatcaagatacgtgggacatacagtgagagaagtgctggatatttggatgatgtcaccctggcaagtgctcgtcctgggcctggagtccctgcaacttgggtggagtcctgcacctgtcctgtgggatatggagggcagttttgtgagatgtgcctctcaggttacagaagagaaactcctaatcttggaccatacagtccatgtgtgctttgcgcctgcaatggacacagcgagacctgtgatcctgagacaggtgtttgtaactgcagagacaatacggctggcccgcactgtgagaagtgcagtgatgggtactatggagattcaactgcaggcacctcctccgattgccaaccctgtccgtgtcctggaggttcaagttgtgctgttgttcccaagacaaaggaggtggtgtgcaccaactgtcctactggcaccactggtaagagatgtgagctctgtgatgatggctactttggagaccccctgggtagaaacggccctgtgagactttgccgcctgtgccagtgcagtgacaacatcgatcccaacgcagttggaaattgcaatcgcttgacgggagaatgcctgaagtgcatctataacactgctggcttctattgtgaccggtgcaaagacggattttttggaaatcccctggctcccaatccagcagacaaatgcaaagcctgcaattgcaatctgtatgggaccatgaagcagcagagcagctgtaaccccgtgacggggcagtgtgaatgtttgcctcacgtgactggccaggactgtggtgcttgtgaccctggattctacaatctgcagagtgggcaaggctgtgagaggtgtgactgccatgccttgggctccaccaatgggcagtgtgacatccgcaccggccagtgtgagtgccagcccggcatcactggtcagcactgtgagcgctgtgaggtcaaccactttgggtttggacctgaaggctgcaaaccctgtgactgtcatcctgagggatctctttcacttcagtgcaaagatgatggtcgctgtgaatgcagagaaggctttgtgggaaatcgctgtgaccagtgtgaagaaaactatttctacaatcggtcttggcctggctgccaggaatgtccagcttgttaccggctggtaaaggataaggttgctgatcatagagtgaagctccaggaattagagagtctcatagcaaaccttggaactggggatgagatggtgacagatcaagccttcgaggatagactaaaggaagcagagagggaagttatggacctccttcgtgaggcccaggatgtcaaagatgttgaccagaatttgatggatcgcctacagagagtgaataacactctgtccagccaaattagccgtttacagaatatccggaataccattgaagagactggaaacttggctgaacaagcgcgtgcccatgtagagaacacagagcggttgattgaaatcgcatccagagaacttgagaaagcaaaagtcgctgctgccaatgtgtcagtcactcagccagaatctacaggggacccaaacaacatgactcttttggcagaagaggctcgaaagcttgctgaacgtcataaacaggaagctgatgacattgttcgagtggcaaagacagccaatgatacgtcaactgaggcatacaacctgcttctgaggacactggcaggagaaaatcaaacagcatttgagattgaagagcttaataggaagtatgaacaagcgaagaacatctcacaggatctggaaaaacaagctgcccgagtacatgaggaggccaaaagggccggtgacaaagctgtggagatctatgccagcgtggctcagctgagccctttggactctgagacactggagaatgaagcaaataacataaagatggaagctgagaatctggaacaactgattgaccagaaattaaaagattatgaggacctcagagaagatatgagagggaaggaacttgaagtcaagaaccttctggagaaaggcaagactgaacagcagaccgcagaccaactcctagcccgagctgatgctgccaaggccctcgctgaagaagctgcaaagaagggacgggataccttacaagaagctaatgacattctcaacaacctgaaagattttgataggcgcgtgaacgataacaagacggccgcagaggaggcactaaggaagattcctgccatcaaccagaccatcactgaagccaatgaaaagaccagagaagcccagcaggccctgggcagtgctgcggcggatgccacagaggccaagaacaaggcccatgaggcggagaggatcgcgagcgctgtccaaaagaatgccaccagcaccaaggcagaagctgaaagaacttttgcagaagttacagatctggataatgaggtgaacaatatgttgaagcaactgcaggaagcagaaaaagagctaaagagaaaacaagatgacgctgaccaggacatgatgatggcagggatggcttcacaggctgctcaagaagccgagatcaatgccagaaaagccaaaaactctgttactagcctcctcagcattattaatgacctcttggagcagctggggcagctggatacagtggacctgaataagctaaacgagattgaaggcaccctaaacaaagccaaagatgaaatgaaggtcagcgatcttgataggaaagtgtctgacctggagaatgaagccaagaagcaggaggctgccatcatggactataaccgagatatcgaggagatcatgaaggacattcgcaatctggaggacatcaggaagaccttaccatctggctgcttcaacaccccgtccattgaaaagccctagtgtctttagggctggaaggcagcatccctctgacaggggggcagttgtgaggccacagagtgccttgacacaaagattacatttttcagacccccactcctctgctgctgtccatcactgtccttttgaaccaggaaaagtcacagagtttaaagagaagcaaattaaacatcctgaatcgggaacaaagggttttatctaataaagtgtctcttccattcacgttgctaccttacccacactttcccttctgatttgcgtgaggacgtggcatcctacgttactgtacagtggcataagcacatcgtgtgagcccatgtatgctggggtagagcaagtagccctcccctgtctcatcgataccagcagaacctcctcagtctcagtactcttgtttctatgaaggaaaagtttggctactaacagtagcattgtgatggccagtatatccagtccatggataaagaaaatgcatctgcatctcctgcccctcttccttctaagcaaaaggaaataaacatcctgtgccaaaggtattggtcatttagaatgtcggtagccatccatcagtgcttttagttattatgagtgtaggacactgagccatccgtgggtcaggatgcaattatttataaaagtctccaggtgaacatggctgaagatttttctagtatattaataattgactaggaagatgaactttttttcagatctttgggcagctgataatttaaatctggatgggcagcttgcactcaccaatagaccaaaagacatcttttgatattcttataaatggaacttacacagaagaaatagggatatgataaccactaaagttttgttttcaaaatcaaactaattcttacagcttttttattagttagtcttggaactagtgttaagtatctggcagagaacagttaatccctaaggtcttgacaaaacagaagaaaaacaagcctcctcgtcctagtcttttctagcaaagggataaaacttagatggcagcttgtactgtcagaatcccgtgtatccatttgttcttctgttggagagatgagacatttgacccttagctccagttttcttctgatgtttccatcttccagaatccctcaaaaaacattgtttgccaaatcctggtggcaaatacttgcactcagtatttcacacagctgccaacgctatcgagttcctgcactttgtgatttaaatccactctaaaccttccctctaagtgtagagggaagacccttacgtggagtttcctagtgggcttctcaacttttgatcctcagctctgtggttttaagaccacagtgtgacagttccctgccacacacccccttcctcctaccaacccacctttgagattcatatatagcctttaacactatgcaactttgtactttgcgtagcaggggcggggtggggggaaagaaactattatctgacacactggtgctattaattatttcaaatttatatttttgtgtgaatgttttgtgttttgtttatcatgattatagaataaggaatttatgtaaatatacttagtcctatttctagaatgacactctgttcactttgctcaatttttcctcttcactggcacaatgtatctgaatacctccttccctcccttctagaattctttggattgtactccaaagaattgtgccttgtgtttgcagcatctccattctctaaaattaatataattgctttcctccacacccagccactgtaaagaggtaacttgggtcctcttccattgcagtcctgatgatcctaacctgcagcacggtggttttacaatgttccagagcaggaacgccaggttgacaagctatggtaggattaggaaagtttgctgaagaggatctttgacgccacagtgggactagccaggaatgagggagaaatgccctttttggcaattgttggagctggataggtaagttttataagggagtacattttgactgagcacttagggcatcaggaacagtgctacttactggtgggtagactgggagaggtggtgtaacttagttcttgatgatcccacttcctgtttccatctgcttgggatataccagagtttaccacaagtgttttgacgatatactcctgagctttcactctgctgcttctcccaggcctcttctactatggcaggagatgtggtgtgctgttgcaaagttttcacgtcatcgtttcctggctagttcatttcattaagtggctacatcctaacatatgcatttggtcaaggttgcagaagaggactgaagattgactgccaagctagtttgggtgaagttcactccagcaagtctcaggccacaatggggtggtttggtttggtttccttttaactttctttttgttatttgcttttctcctccacctgtgtggtatattttttaagcagaattttattttttaaaataaaaggttctttacaagatgataccttaattacactcccgcaacacagccattattttattgtctagctccagttatctgtattttatgtaatgtaattgacaggatggctgctgcagaatgctggttgacacagggattattatactgctatttttccctgaatttttttcctttgaattccaactgtggaccttttatatgtgccttcactttagctgtttgccttaatctctacagccttgctctccagggtggttaataaaatgcaacacttggcatttttatgttttaagaaaaacagtattttatttataataaaatctgaatatttgtaaccctttaaaaaaaggaggaagaataccgaggggccaacagcgagcccttttttacacgggctcacgggcgtaaaaaagaacgcgaaacaggaagcacgagcgcgataaagccatcnnnn

SEQ ID NO: 9786 - DNA, 1934 bp, Homo sapiens
  misc_feature 1, 2, 3, 4, 5, 6, 7, 1932, 1933, 1934: n = A,T,C or G
nnnnnnncattaagattggccgagtgctaatagctgggggggcgaatgccttttgattcccgttcaagcgcgcgtgtgttgattgtcgctttgcggttacgtaaatttggggcattttccgtttggggagcaaggccgcatggtgacctgcaaggggaacattttaggttatcacaaaagcaatacccttaaaagtaaaaacaatctccacttgatattagtaatttgaaaaacttagcatatctacaactactgcttaatcaacacttttcattgattcaacattatcacttaaatgcagatgcaaaataaccttgcatggcaaacatgtttactctgtgctaatgaaactatgaaacagttcctgcaagttcacagacaagtcaatcaatgattgactacagaacagactggtgagtgttacaaaaaaaaaaagacctgcccaggggaccactaggggtggaggaagaacacctgggtctcactcactgggcacttgatgctttcatttttatctgtaagccaggggacaattatattaatattgtatgaatacactgctactgggaaaagcattcattcaacagatgcccactacatactctgtaccaggtagtgtgttaagtgctgaaacagggaaggacaaggcacatcctacgggggctcgcagtgtgggcaggtgctgagctaacgcacacacacaagggctgggtactgccagatctgtatcactccggagcaacgacctgtctctctgaatgatctctggcatggtaaaagagttaactgtatttcaaaaggtgaaacaaaactttttttgctttgttatgcatgtttcaaattgatcagtggttcaggcctggagtatgcatcagaattatctgtgaagcttagtgaaagtgctgatgccagagcccacccaaagcttactgcttcagaaccactggggacctggcagttctgatgtgcacgactagtcaagaatcctttaaaggctgataaagcaatcttgaaatcactgtcaatgcaaaagtggatgttcctcattaataagaactcaaaaaataaagtacagctagtataagacttgttttttgtgcctataaaacccaagtgttagctactttctaactataaaattctatccaaaaagacttgcagtcaaaacaccgagccaaaaaacaaaaaaggcaccaaagcagtgccgacttcaatgtgcaaaggccttttacgtgctgatattgtaagcaatctgtgtgcatgtgtacatatgcatctgttttcagggaaagaaaagctgttaaagccaattaaggttatgaattcttgctactactttaatattaaacctttaagtgaaaatttattgaacactattacaaatgtggcaaactgacatagctggtttactgcacaaactttaatgtcaaagggattagatcagagctccagtctcacttactgggcctataacattgtgcagggcacttatctcacctcaggaaaatggaagtaactgcttcattttacagaggtattaaatgaaagaaatgagaaaactataaaccaacattgaagcctgaattattgcttagtatttaaagtctagtacaattgcaatgtttttaataaaaaaactcattgataggtgtatttttacagtgtatctaaaagcagcatttaacattaaaaacttagtatttaaaagagtacacaaccaggcagggtgtggtggctcacgcctgtaatcccaacactttgggaggccaagatgggaggatcacctgaggccaggagttcgagaccagcctggtcaacacagcgagaccccaactttttttttttttgagacagtttcgctcatcgcccaggctggagtgcaatggtgtgatctcggctcactgcaacctctgcctcccgagttcaaatgannn

SEQ ID NO: 9787 - DNA, 1495 bp, Homo sapiens
  misc_feature 1, 2, 3, 4, 5, 6, 7, 8, 9, 10, 11, 12, 13, 1493, 1494, 1495: n = A,T,C or G
nnnnnnnnnnnnnacgcgtccagctgcgcgtgggggcgggcgcctgtagtcccagctactcaggaggctgaggcaggagaagtgtgaacccaggaggcggagcttgcagtgagccgagatcacaccactgcactccatccagcctgggtgacagggtgagactctgtctcaaaaaaaaaaaaaaaaggagacacaagacttactgcaaaaatatttttccaaggatttaggaaagaaaaattgccttgtattctcaagtcaggtaactcaaagcaaaaaagtgatccaaatgtagagtatgagtttgcactccaaaaatttgacattactgtaaattatctcatggaatttttgctaaaattcagagatacgggaagttcacaatctaccttattgtagacatgaaatgcgaacacttacttacatattaatgttaactcaaccttagggacctggaatggttgcattaatgctataatcgttggatcgccacatttcccaaaaataataaaaaaatcactaaccttttttaaggaaaatatttaaagttttacaaaattcaatattgcaattatcaatgtaaagtacatttgaatgcttattaaaactttcccaattaattttaactgtgttattgaatttacttttactaaactactgttctctttgtctcttttttaactaggctctgattttgacccctaatttaagctttaagaatagaaatcagctaatatagaatcagacaaaaaggggattaaatgagcagtttgagttacattattttattgtattaaatttatttgatttatattgtcatgttctcttgccagagagaatctgtaggaaaatactgtatcttgtatactgatcattggctttttctagaaaaactgtctctgattctggacaaagctcagttatagttacgagaaagatatggtacagggaggaaaatactgccttttttttttttttaaaggagattttcagactaaatagaatggtcaacaatgatgtatcaacggttccttttcttagacacaagtttccaaagcttaaaagcgaggtggagagaaataccatatttatggattcaccataagtatgtcttcttcattaatcgtctgggaaacccattgtgtcattaatgtgtttgggctaggttttcaaacttaccaaatggtttacaaaacgccatgtggaggtacttttggtagggttcccacttaccagattttcttgtgtactcgggatagcattggtctttccaatcctgcggctttccagaatagtttggagggaatgtttcccttattccaatttttttataccgggaagatgtgggagttacatttctcggcgggcggctcctctgtttcttcgcaattccttggtcacttttcttgtgggtcccctccaacttttatttgggagtcgggggttttggcccaaggagcgatgtccgttgcacaacggggtgttcttggcgnnn

SEQ ID NO: 9788 - DNA, 355 bp, Homo sapiens
  misc_feature 349, 350, 351, 352, 353, 354, 355: n = A,T,C or G
actttccattcattccagtgagaagcactagaactttaaaatttcagaattggatgaaaataacaaagatcacccagttgaatcatatttttttgttcagaagcaaaaactgaggctcagagacaaactgtcctgtccaagattatacagaaaatggtgggaagagttgagaagtttctcaataatgccatgactgttgaatcataggaacaaaagccaagagatggatccttacaatagtttaacaatataaaccacatggaacatttcaagaaagagttaaacaatgatctatgtttaaaagctatctctacctggcatagtatcttacatttataattctagcacnnnnnnn

SEQ ID NO: 9789 - DNA, 283 bp, Homo sapiens
  misc_feature 282, 283: n = A,T,C or G
agggcgaattggagctccacgcggtggcggccgcccgggcaggtacttgttgtcacaatttaaaacttcctcttctacatacatgttccagagagcatcttccaaacctgatacatttttgactgctactgttagatctaagaagtcttcctgcctctcgctaacgttcttacattctttacaaacaatctggttaacaatggttccatttttttgagaggcccccccccgccccaaggaggtccccactaaagaagtttccacagccctgaagaggattcnn

SEQ ID NO: 9790 - DNA, 1424 bp, Homo sapiens
  misc_feature 1, 2, 3, 4, 5, 6, 7, 8, 9, 10, 11, 12: n = A,T,C or G
nnnnnnnnnnnngctgtcttctgccgagtgtgttccgcgtttgatttgtgtacctggaatatgtgttccttgggtgaaatggctccgggtttatggccgaccatgtagtgtccgcgggcgcagtaaggtgtaggagtgaataatgctgacaggcgttaaaatgaagcatccagaaagtatggtgcaaattgatgtaatgacaaattagttgcataagtatgtgacaaagagtgatatatgaagacgttgctcgatatacatcttataaaccgatactacaaatgatgaacattacagtagaaaatagtcaaagaatatgaacagaaaatttaccattcattcactctacaaatatttatcgagcacctcttctgtgccagacaagtttacacatgggacacagcagtgaacaagacaaaggacaaaggtccctgccccaaggagcttacattctattggagaggggcaaacaataaacaagtaaattatgaagtattttagacggtgataagtactactggcaaaaaagaaaaagaagggttaagtaaggcgatcaggagtgaggcatggggagctcaggggctggggaggtctcatcaggaaggagacatttgagcaaagctttgaacagattcaggtagttgaccacacagagcaggggaaattgccatggtgcggcggaggggcaggagaaggccaagttggctagaacagaaagagcaagggaccaagtggtgaggaccctggaggccttgaacaggactttggcttttaacctgagaaccattgcagagctttaaggagaagagtgaaattttgacttatgtctcaaaaaggatcattctggctaccatcttgagagcagacttttggggtacaaaggtaggagcaaatagaccatttaggaggtcagcaaacacatggcaacatgttcactctcacgggtaaccaaaaaaatgcaactaaaaaaatgtattcacctgtttttaacctatccaatttttaatgttcttttagaaaacagtactcagtatcagtaagggtgaattaccttcgggcaggtaaatgggaaccacctttctgggaccagctgggtattctgtgccaaagcctcaaaaacactcaaaccctttcaccagaaatccaacttctaataaattaatctaaaggtctaataatcggaggtacttattgagtgcttgtatgcaccaggctctgaactaaacgcgctccatattacccccatttaaattcttaccattattcctgtcttacagaaagaaaaaaggcatggtgagtcacacagttcacaaatgagggctagaaccaaacccaggcactgtgacctgctacacaggagaggcagatatgaagatttcttcaagggtgcttattacagcatcatttataatagcaaataaagt

SEQ ID NO: 9791 - DNA, 1530 bp, Homo sapiens
  misc_feature 1, 1530: n = A,T,C or G
ncactccagcctggacgacagagcgaggctctgtctcaaaaaaagcaaaacaaaataaaacataccaacatctaatctctataaaatatttttagaagttatccaggtgagccaccatgcctggccttattggcttagtttttaaattatcctccaaaaattttgggcctttttctgtggggaaacaagtgaagctgctcttcagcatagacactacctttatcccatcattttagtaaaaactaggtttgtttcacttctgaggtgtcttattaatgtacttcatctgagaatttgttgatcttatgcgagctatataagaactgccattaaaaaaaatgggataatagatgattttatcagtatacctgtggaatatgtacaaactggatctatagatattttgaactggaccaggtgggtattgaagtaacccatcaaaatatgctctgcagtgattccgcttaatgtttaaattcagtaacgtacttgaaaggcaaatttcagtgctttgttatgttggaggagggcttactgatgcgtgctaagaccgatttctgattgagggatgaaccttgggctcatttttttcttgtgaagtctctttctagaaaattttttggtttgttctttttaaaaaatacatacttttttgaatgtatcatgtcttcattaacaacagaaaatccacatggtgtttactaaacttgtttacgacattaaaaatttcctttttatttttagtagcccaggttgagtttttcacaagagatttttttcttagctgaggtatagttgtatagcaagaagaattaagccagatttttgtgtgtggaaagacagttttctatccacgtctttttctgtttgtcagaaggtgggagtatggtccaaataaatccattaggttactcctgcagcatgcgcttttagcttctctcttgactgaggatcaaatatccctttgtgagctggccctcagctcctttgctcatgtgtacaaacctcagatgttactacattttatatctaccagagctattcaagcaatagtatttgaaccactagccttttaaataaaattctgccccattactgatgtgcagatattgagttcactttcattttttgccagatttctttgcactactttaggtaaaaatagttaatctatttttctttgacatcctagtttgcgtcagtgacagaacttactgcttagtctttgtactttttaaaaaatctataaatttaatgcactgtccaagtgaaatgtcctagttgtcattgtgattaaggggccaactttccaggcagctagcagagatactattctcttcctctcccagcaaatttgtattccttcgcccacgcattcctgctatactagatggcagccagtgatggaactataaagatgtctgtggtcatatgttgaatgtggcagcttgaagatacacgttgcgccaaggtgccaatacgacgcaggcgaggcagcaacccggctatgtatgcgcgatagccgcctcn

SEQ ID NO: 9792 - DNA, 5112 bp, Homo sapiens
  misc_feature 5084, 5085, 5086, 5087, 5088, 5089, 5090, 5091, 5092, 5093,5094, 5095, 5096, 5097, 5098, 5099, 5100, 5101, 5102, 5103,5104, 5105, 5106, 5107, 5108, 5109, 5110, 5111, 5112: n = A,T,C or G
acaggtccccagcttactccagggatgatgtcagaaaatgaggtcctaaacatgcagctttcggatggaggacaaggagatgtccctgttgatgaaaacaaactccatggtaaacctgataaaaccttgcgcttttccctctgcagtgataatctggaaggaatatctgaaggtccttcaaatcgctccaattcagtgtcctccctagacctagaaggagagtctgtgtcagaacttggagcaggaccttctggcagtaatggagttgaagctctacagctgttagaacatgagcaagctacaacacaggataaccttgatgataagctaaggaagtttgaaattcgtgacatgatgggattaacagatgatagggacatatcagaaacagtgagtgagacctggagtacagacgtcttgggaagtgactttgaccctaatattgatgaagatcgcttgcaagaaattgcaggtgctgcagcagagaacatgttaggcagtttgctgtgcctcccaggttcagggtcagtgcttcttgacccctgcactggttctaccatatcagagacaacaagtgaagcttggagtgtagaggtattgccaagtgactcagaggccccagacctaaagcaggaggagcgtctgcaagaactggagagctgttctggactgggtagcacatctgatgatacggatgtcagggaggtcagttcccgccccagcacaccaggcctcagtgttgtgtccggcataagtgcaacctctgaggatattcccaataagattgaagacctgagatctgagtgcagctctgattttgggggtaaagattctgtcactagtccagacatggatgaaataactcacggtgcccaccagctgacctctcctccttctcagtcagagtctctgctggccatgtttgatccactgtcttcacatgaaggggcttctgctgtggtaaggccaaaggttcactatgctaggccatcgcatccaccaccagatcccccaatcctggaaggagctgtgggaggaaatgaggccaggttgccaaactttggttcccatgttttaactccagctgaaatggaggcattcaagcaaaggcattcttaccctgagagactagttcgaagcaggagctctgatatagtatcttctgtccggagacccatgagtgaccccagctggaaccggcgtccaggaaatgaagagcgagaactccctccagctgcagccattggtgctacttctttggtggctgcacctcattcatcatcttcatccccgagtaaggactcctcaagaggagagactgaagaacgcaaagatagcgatgatgagaaatcagacaggaacagaccttggtggagaaaacgttttgtttcagccatgcctaaagctcctataccatttagaaagaaagaaaaacaagaaaaagacaaagatgatctggggcctgacagattctcaacactcacagatgatcccagccctagactcagtgcacaagctcaggtggctgaggatattctggacaaatacaggaatgccattaaacggaccagccccagtgatggagcaatggcaaactatgaaagtacagaggttatgggtgatggtgaaagtgcacatgattctccccgtgacgaagcactgcagaacatctcggctgatgatctcccagactctgcaagccaagcagcccacccgcaggattcagctttctcttacagagatgcaaaaaagaaactgaggcttgctctttgctctgcggactctgttgccttcccagtgctgacccattcaacaaggaatggtttaccagaccacacagacccagaagacaatgaaattgtatgcttcttaaaagttcaaatagctgaagcaattaatttacaagataagaatctaatggctcaacttcaagaaacaatgcgctgtgtgtgccgttttgataataggacttgtaggaaactgctggcttcgattgctgaggactacagaaaaagagccccatatattgcttatctcactcgttgtcgacaaggactacagaccacacaggctcacctggaaaggctattgcaaagagttttgcgggacaaagaagtggccaatcgatactttaccactgtctgtgtgagattactgcttgagagcaaagaaaagaagatcagggaattcattcaagactttcagaaactcaccgcagctgacgataaaactgctcaggtagaagattttctgcagtttctttatggtgcaatggcccaggatgtcatatggcaaaacgcgagtgaagaacagcttcaagatgcacagctggccattgagcgaagcgtgatgaaccggattttcaagctcgccttctaccctaatcaagatggggacatacttcgcgaccaggttcttcatgaacatatccagagattgtctaaagtagtgactgcaaatcacagagctcttcagataccagaggtttatcttcgagaagcaccatggccatctgcacaatcagaaatcaggacaataagtgcttataaaaccccccgggacaaagtgcagtgcatcctgagaatgtgctctacgattatgaacctcctgagcctggccaatgaggactctgtccctggagcggatgactttgttcctgtgttggtgtttgtgttgataaaggcaaatccaccctgtttgctgtctactgtgcagtatatcagtagcttttatgctagctgtctgtctggagaggagtcctattggtggatgcagttcacagcagcagtagaattcattaaaaccatcgatgaccgaaagtgaccaagaccaaggcccaccaaggcagcagactgttaatcagacaaacagatctctgagaaggtgcatcagctgctttgaaggctgaagattgttttgtatgatactgcacagcatcaggcattttaaagcagatctttactaaacaggttaatgagctaacaagcaggttctctcgtctttgggctctttcctttctgagttgcatattctattttcttgtccccaagtagagactagtactacaaaaagggaccacatttttcaagtatttctaagtataaaaaacaaaacaaaaatctcttaggaaatgtctagacctccattcttggattccctttctttccttttattttaaaaaagaacagtacccctcttttaagatgctgtcttacattaatgagcatctaatggaaagaaggtatgagttgcactgaggattagaatagtggtgcgttagtggcattatctataaatacactcacctaaattgaaagctaagaaggaaatgtaaatataatatatatttatatttgatgtaatatggacatctgcagattctaataaacaaggactattgctgatagtaggctgtgacatactgtcttgtgaaatggtttccttgacaaaatttaagctgagcttaaaagcaaaaaacaaaaagtacacagaaatatttattaaaatgtaatacagtttattgaactttctaggtatggagtttgatggacagggctgcctttaatgagtgtgaaggtcactaagtcacttagacatctcaccgtggaagtttgtgagcctgcattaggagatagactgattaccatacatgacataaaaaggaacagtggatagctcatactttatggtggttcttctcctccgaaataatatactgcagaaatcccagacagagctccttacaaacctttaattgtaatatatttttgatgattattcacattgaatgcacagaccaagaattcagtgaatgtcattttttaaaaaactaatttgtattgtctgctctagtgatacaagttttactagtgataaactattttaatcaaccatactattcttatggaaaaaaatatctattttggcaggtttctgtgcctttatttccctcttctgaaaaaaagtctgtgttttcatagtttggtttgcattgtatatcaataattaatcaggaatgggttttggtgcctgaaaaattggccatggaggcacaccaaagcttcaagcacaagtcttgtacatgggccatcactgtctggtttcacttcgtgtgtttcctaaacacatttagctgcttttttaacaaactcagccccatacttgagtcccttgttgttgggagcatttccaggcatcttttaagggaactgtgacaaacagcctcgggcagatgaacacggaggctctctgttgtctgtctctgagatctttgtgtctgggaatgcctaaagattttatttttttttctttgtttttattttattttattttatttttttgagacagagtctcaccctgttgcccaggctggagtgcaatggtgcgatcttggctcactgcaacctccacctcccagttcaagtgattcccctgcctcagcctcccgagtagctaggactacaggcgcatgtcaccaagcccggctaatttttgtatttttagtagaaacggggtttcaccatgttggccaggatgatcctcaatctcctgacctcgtgatccacccgccttggcctcccaaagtgcgggattacaagcgtgaaccaccctgcccagccagaaactagattttctttatgcctccaccccttcttattcatttactttacaataccaaaataacaaattgcataggagtgtgggatgtggtttctgccttctagagagagatcagaattaaactagtactatgaaatgtccttttgaatgttaggtcaagaaatccatgtacagagtcgtgcacttcattggctgtaactgtcaaacttgccttgtattagaagttaaatcccatcgtaaatacatcacgaggccagctgtgtgatttctgagacctagatgagagtccatttacttcagcctttgattcagtaaatgttaagcagcagaagacttcgaatggttgaaattcattgttacaggatttaactcataaaccaatgagagattttttttttctctgcaatggttgctaagtctattccatgttaacactgtggaaataaatatgaagatgtggacannnnnnnnnnnnnnnnnnnnnnnnnnnnn

SEQ ID NO: 9793 - DNA, 2732 bp, Homo sapiens
  misc_feature 1, 2730, 2731, 2732: n = A,T,C or G
nagtgctcgccccgctttttgctcggtttcccaggtttaacatgtggtgttacctcctaggcttgtttctcggacaatcttcttgggggcacaattccgtgcccgcccgctttgttccccggtttaccgcccttccctccgtggtccctttccctccgccagtaaaggctccaggtccacagggctctcacctgggatctccgccagcggctcttcgcgggtggcagaactaggagggcagctgtacccagcacatctcagagagatggaggcaagctgggttcctgatgatttccagctaatacaggtccttcctcctgcatgcaggcgccccgtaacgctttataacagacgcctctagacttctgtgggggtaaagtgaaggacccaaagcgacacaagtagtgtctgttcacacttccactttcaaagctaactactagctgttcaaatatactccatacagctttcagcaaatcaaagtgtttacctctcccacaccaagggaagaaaagatgcagactgcctttaaagcacctgtcagcaaggcgagggttttaaagatcagccttgagaatcaaagcagcagcagaagtgtcattactccagtgctctcccttcccgttcgtgggtcacacagagacaggcacatccccagcgctttgcaaacagaagcgctcccaaaagttggctagagggtacacttcggcaaagggatcatcttccccctggcttgctggactcttggaaatgcgtctgaaagcccttgccatcccgtcttgtgctgatgacagcatgagcccggttgcaccttgctcagcaacaagctgcgagatcctcagcttctcactcataccccaccttgagctgctgacggcggcctggagaaccgtgtgtggctgttcctggatgacatctgctgtcactagccttcccagaacacccgctgcccagggttcctgctgccttccccggtggacagattttgcagggaagactgaggaaatgggagggggagctctgctctaaagcagaaggcacagaaggtggggtttttgttttatagggagactgcccagtgtgctgcaaaaggaaaaccaacaacagggagtgcccaactcaccccctctgcatgagcaaatgcagatggacactggactgtgccgactgacaccgggactcacacttgctggtcagtggacgagaggtaaaagcaggcaggattattacaggaataaatctgcacttccaaagaggcagctcccatgactgagttacaatgcttggagcccccgagggcagagtggcaccagctgggaggttgacactgcatcactgcttcggatgccctcacaggctctgactcgctgccaggtgctggtgaggctggaagaacttccttccttcctatgtacaatgcaaacagtgccgcttccagtgctacccacacgggtgcagcctcacgggagagttgcggagagagggaatgcgttcagttcagccagcggacggccaggggtaagcggcccctagtgggtcacatggcctatgatgtctggagaccgcagatcttcaccctctggagtctcatttgcagagtctcatttgtcgtccggtcactgtggccacctcaccctcgtcaccacgggcctttcctgtgccgtgctcactctgacactgagatgctgccaggcagttttttttttttaaatcagtggagtaagttctaagggagccccatgtgcttaagataaaaacgtagctggtaaagtggaggcagaggctgcttctgtgaggctgcatatatcttacaggacaaaaagttttgtacttgaaaaccaaattctgggaaatagccctgcaggtttttgggaagcgtctccctccctgtcgtgagttccacctgggccctccgggagaacagggacaggagaaacacaagcaaagcagacaggcccggaattgggagcctgagccctgcatattttggaagggaacccctcgagggactagtctggaatagtaggccaaacggtaggaagctttgattactctgctaacttgggggcccaagagtagggctaaagcattgtctgcagagaaacaaacagggaaattcagtaagaagggcctattttaacttgcagttagcaggagaatttgtccccagattttgatctagcttaaagtcccttgattccttcccctctacaaatggcaatcacggttgccctagagatgctgactgacaaggtctcccaaaggaggggcccttctgccatttatgggcccctaagtgcacacgtgggcttccatgcggatggaatcattggtccccaccagggaacctggactgtgggagctgccgccaccataggacccaagggcttccagaccaggaagaggcaaacagcctgcctgggaacacagtgctggaacttgggacttgggttctgagcggggctgctccctgggctgttgtcatcactctttcctttttttttttttttttcttttgagatagggtctcactctgttttccaggctagagagcaatagtgcaatcacaccccactgcagccatctgtctcctgggctcaggtgatcctcccacctcagactcccgagtagctgggaccacaggagggcaccaccatacctggttttaaaactttttgtagagatggggtctcactatgttgcccaggctggtttcaacccggacggcgnnn

SEQ ID NO: 9794 - DNA, 3518 bp, Homo sapiens
  misc_feature 1, 2, 3, 3513, 3514, 3515, 3516, 3517, 3518: n = A,T,C or G
nnnacgcgtccggtccatcttttcccgccgttcactggcttttgaaggagggtcagagttaaccccgctctctggaattaacggctaaaagccagaagttgcggggactagtggtcgcggacgtccttccggtcctaaatcttaaggggcaaaggacatactctgggactgttaactaggccctggaggcgggaagaggatgtgtgggtggggtcaggggtgagaggtcagagggccgcgaagtgggcggagcgagccggagtcggatggcggctacggcggctcattgttttccgctgcaggggtgctgaaggggggacgcgggtcggacgcgtccggctgtggaagagagcggcggccgctcacaacatgcacagcctggcgacggctgcgcctgtgcctactacactggcacaagtggatagagaaaagatctatcagtggatcaatgagctgtccagtcctgagactagggaaaatgctttgctggagctaagtaagaagcgagaatctgttcctgaccttgcacccatgctgtggcattcatttggtactattgcagcacttttacaggaaattgtaaatatttatccatctatcaacccacccaccttgacagcacaccagtctaacagagtttgcaatgctctggcattactgcaatgtgtagcatcacatccagaaaccaggtcagcgtttctcgcagcacacatcccactttttttgtacccctttttgcacactgtcagcaaaacacgtccctttgagtatctccggctcaccagccttggagttattggggccctggtgaaaacagatgaacaagaagtaatcaactttttattaacaacagaaattatccctttatgtttgcgaattatggaatctggaagtgaactttctaaaacagttgccacattcatcctccagaagatcttgttagatgacactggtttggcttatatatgtcagacgtatgagcgtttctcccatgttgccatgatcttgggtaagatggtcctgcagctatccaaagagccttctgcccgtctgctgaagcatgtagtgagatgttaccttcgactttcagataaccccagggcacgtgaagcactcagacagtgcctccctgaccagctgaaagacacaaccttcgcccaggtgctaaaagatgacaccaccacgaaacgctggcttgcacaactggtgaagaacctgcaagagggccaggtcaccgatccccggggtatccccctgccccctcagtgatccttccctgttccctcccactactcccccaagttggggaaaggagggggaacctacgagaaaaacagctcaggttttatcaccgactgggaatagacaacctcaatgctgaaccgcactggagaaaaggggcaaggtacccctgctgaggtgtatgggctgccatctcaggctgtcttgaggacctgggctccctctgctactcccaggaaatgggctcctgacacagcagtctgccaccacagccccaggagggtgtcaacaccagcaaatgctgtatttgcagcatgtccaagatgacccttctcccctacctctacctagccactggcagggaggggagacagtggtgatagcagcagcactctaggcatggtgaacgcctgggaccaagccatgtggcgttttttattttgcctttctggaagactcaagatatgtctcttcattctctctcagtatttgtttactttggtttttttgtttttaatctcagagagaggtgtgtttagtgggcacaagctgtaatattcagcaaaactttgtcgactggcactgtttacaagtctgttagctgcataagctcaataaaaagttggtctgggcattacatcccctctggcaggccaatagctgcatcaagctgttgggagaaatgggagggcaggggaaagatgtaaagccaaagtacagcaggaacccaccacctgtttcccttccttctcccattctactcccagtccggaatgccacgaggaccttaaccttgtttctggctttagctgctagttttcccaaatctcagtgctttccctttttgaacttcccttctattaaacttaaaacagatgtcttaattaatcaggctgtcttggaagggtattgtattgggagacaaggggcggtggtggacctcaccttcaatccaagttttcaaagatattttctcaataactctaaaagggaggtgcttgggattaaggtgacagtccacttgatccttttctttgttttagtgtgaatttcagcagctccatctgtcttcatgattgtacttgagcagtattagctgtatgagttaattttattcagattgaagatggagggctgggttctgctcactcagccttttcttttttttttttttttttttgaccattctcttttagtctatgggaattacagggttgccgctaaaatattcacttgttcatatcgtgtcagagatttcctcttctctggagcttaggtggctcttcacaatccataggcttgaatctgcaacctagtgtaaactgccttgctttccccggttctttcccctgctagcacctgctttctcatccctatctccagtcaaagatgggattgcttaatccaactctggagagggaccaagtcttttctgcccacatctcacacaattgaggtgtctgaacaagcttggggagggtctataaggggtaggctcaaaaaaaaaaaaacccatttgcagaggcagttttgccaacacaagggctctttcaagccgactttcacaaagagagccggacttgttagttggcttctgtctctttagagccaagaaaatagtaattaagtggcctagatataggaagggcagaataagcacttactccccctgccttccaagatgaagaggagaagcaggccaaccctcaataattgcaagcctgaagagaagtgatcttagagaaagcagagaacagaatggactggatagacatcttgactctattcagcccgtagtctgtgatctggagagtccagttaaggtaacccagatttttgacaaccgccttcctgctgagccaaagttttctcattacccctccactggggaagcagctgaggcccagggccttgctccctgggaaattctcttctctccatctttcggtgcattggccatgttactgtgccaaagtgtcttaattcttgtcccatctattctcagctggccttggaacccacataggagttggtgggggagggatggatgggtattattcattgtagttgatcctggtgtgttattaaggggacctcctattgtgtcatccctcctaaggatgaataaccgtcgcttgcaaccacaaaaaggggctaagtaccaggcaatcgcagcccttgtagggcacagaggtaagagaggggcaaggcggacgctgtttaccgctggtgaacacaaacaatatttatttgggaaaaatacaagacgannnnnn

SEQ ID NO: 9795 - DNA, 1154 bp, Homo sapiens
  misc_feature 1, 2, 3, 4, 5, 6, 7, 1152, 1153, 1154: n = A,T,C or G
nnnnnnnctctctgggtcgtcgtgccgtccgcttgtgcgtttgtcccttgttgtttttccacgccctgggtgggtctccggtctgcgacccgctcacgcgtgtctgtgtcggaccaggctctgcgcggcgtgatatgcctgggtgggtctacccactgcactggcacggctgtgacgggtcccttgcagttcatgtgtatcaatgtggtatgagtggatgcggggttccaaagagcagaagtttggttcccaggacagtttcctagatgaactacttttcctcccagccctctctctctttaccgagggtgagcaatacaaaaggggtgtgctgcagctccagctttcagagtaccgccacagatccacagcctgtcctgatctgagagctgagccgatgccttttctttctggctgtgtctttttaccttctggacaagtaggatgaggtgaaaggagctgtccttctaagtctttgtatctccatttgtctgcagtttctcctcggtctcgtgtgtctgtgtgtgccagtcccttgtgctgacacaggacgtcccttaaagtccagtcctggcgatttctgaatctcactctttccctctttaaagttccaggatccttcttatctccctttcccccatagtctggcttagtctctttgtttccgggcgtaaaagcactgggattaatatgttttccaggctgagggaaaacacaggaatgtgatgtcgaaaagggacttttttttttctttcactgtgcttctctcctccctttatttctccctacctttttcctcctctttttcttcttctttttcttctttctcttgcctggattcagtcccagaaatgttaggactacctcagttttgctccaaaccaaactcaaacaacagcagccactggaaatcaaggaaacttcactaagaatttaacagatcagcaaaacaccgcctccttcccattttagcacgttcagagtggactcagtgaggagtgagaaggctgttctttggggtggggtaaagtttttaaactccacacatcatcataaatcactttagaagaggatgactggtgccttaaccccttccaaaccaagtcatcggggtaacttctcttccagtatgtttttaccgcgtcgactccnnn

SEQ ID NO: 9796 - DNA, 1224 bp, Homo sapiens
  misc_feature 1, 8, 12, 1223, 1224: n = A,T,C or G
natcgacncccnttggtagggatccgcgccattgtgttggtacccgggaattcaggcattactgatggagtggctaaagagtacagattatggaaaatatgaaggactaacaaagaattacatggattatttatcccgactatatgaaagagaaatcaaagatttctttgaagttgcaaagatcaagatgactggcacaactaaagaaagcaagaagtttggtcttcatggaagttcggggaaattaactggatctacttctagtctaaataagctcagtgttcagagttcagggaatcgcagatctcagtcatcttccctgttggatatgggaaacatgtctgcctctgatctcgatgttgctgacaggaccaaatttgataagatctttgaacaggtactaagtgaactggagcccctatgtctggcagaacaggacttcataagtaaatttttcaaactacagcaacatcaaagtatgcctggaactatggctgaagcagaggacctggatggaggaacattatcacggcaacataattgtggcacaccactgcctgtttcatctgagaaagatatgatccgccaaatgatgattaaaatatttcgctgcattgagccagagctgaacaacctaattgcattaggagacaaaattgatagctttaactctctttatatgttagtcaaaatgagtcatcatgtgtggactgcacaaaatgtggaccccccttctttcctaagtactacattgggaaatgtttggtgactgtcaaaaggaactttgacaaatgcattagtaaccaaataaggcaaatggaagaagttaagatctcaaaaaagagtaaagttggaattcttccatttgttgctgaatttgaagaaatttgctggacttgcagaatcaatcttcaaaatgctgagccggtcgtggaggactggattaaagcattcaccaaacttatcagagaagtatctgttcatgtggagaagttgcaatgaagcaaaggaccccagggtgtggtttgatggaactttccccatttggcacctttccttggaattctggtgagccgaaaagagccaaatatcgacctggtttgtttctgagacctgaaaaattttaagggaccgccgggggggaggcaccttcacctgatgggcggagaaggcacaatgagaggggcgcgacaacaccgatgtgtaaggcataggaggcaccnn

SEQ ID NO: 9797 - DNA, 753 bp, Homo sapiens
  misc_feature 1, 2, 752, 753: n = A,T,C or G
nnactactatagggcgaattggaacttcacaccgcgggggcggccgcccggccgggtacaggatttctatttatccatagataggtatctatacatacacatctcaagtgcatctattcccactctcattaatccatcatgttcctaaatttttgtaatcttactgtaaaaaaaagtgcactgaacttcaaaacaaaacaaaaaacaacaacaacaaaaaacaagtccaaactgatatatcctatattctgttaaaattcaaaagtgaacgaaagcatttaactggccagttttgattgcaaatgctgtaaagatatagaatgaagtcctgtgaggccttcctatctccaagtctatgtattttctggagaccaaaccagataccagataatcacaaagaaagcttttttaataaggcttaaaccaagaccttgtctagatatttttagtttgttgccaaggtagcactgtgagaaatctcacttggatgttatgtaaggggtgagacacaacagtctgactatgagtgaggaaaatatctgggtcttttcgtcagtttggtgcatttgctgctgctgttgctactgtttgcctcaaacgctgtgtttaaacaacgttaaactcttagcctacaaggtggctcttatgtacatagttgttaatacatccaattaatgatgtctgacatgctattttgaagaaagaccgatggaccatgcatctggccgtcctttttcacacaggaaacagcnn

SEQ ID NO: 9798 - DNA, 1541 bp, Homo sapiens
  misc_feature 1, 2, 14, 22, 30, 1529, 1530, 1531, 1532, 1533, 1534, 1535,1536, 1537, 1538, 1539, 1540, 1541: n = A,T,C or G
nngaaagccgttgngcctccangtaccggnccggaattcccgggtcgacccacgcgtccggcattctggaatccgtgagtgcctccaaccataaacccagaaatgctgccatagaggaacccattagcaagatcaataaccatcgtggatattccaaagagcagagcatttaacccagaatctgaaatctcagtaataacagaaatgtcaatatgagattgtggttattaacaatatgttatcctcactactttatttcttttttcatccaggtgtttcattaagtattctcatttatatgctcatagaagtcatcagatcaacacattcactccaacacctgggtataaaggcgaattaaaacctgaagaattactttattattcattaagaactgcattcccacatcctcacaccaatatcttccactgttactgtgcagtcataataagagttgggttatgtgatttatgcaaaattgttattggtgtgttctaatgatttttttccaggaattcaagtaagtgaagtacaaatacttagcaccatagattgtaaaaatagaaagaggaaatgagaaaacttaatgtcgttcttgtacagttgagttttgcttctttataaactgtctgttaaaatcaggggttgctgttagactgtcaagcagaagtgatggatgttcaaggaggcaggttgccccaaagtgttttctaactttcaagtagagaactttatgctctaataagaaaaatacaactcattcttaaccacccccccaaaacagagaaaacacatacatttatgcattttaaagataaaaagtagtttctcaaaaaaatctgaagttctctgaaaaccagcttattaaaagtgctgttttgtggtgaaaattgaaaccaaatccactcacatttcctatcgggtcttgaaattcttggtggtgtgtcaccattccactagatggcagtgttgcttactgagtgtcaatggcttttttccccgtaaatggaatcatgtttttctcccccaaagtacaataaagctgccttgtctgcaccaacaaccagacacaccagaacacacacaccaccagcacacaccaaaagggcaaccaccaccaagaaccaccaccgaccaccacacgcaggcacgccacaccccaagagccacaacgacgcacccgagagccgaccacaaacagagcacaacacgacgccgacaccgcacaccgaggaaaaaaggcacagggaaaccagccaagggcacaaccgagctgacacaacacgagaaaccgaggaactgcagcgcgcgaacaacaacagagagcaacaccaacacaaacagagaggggcgcaaacacaggcgcaccgtgcaaacaaattaggccaccaaacaacgagacacaagcgagcgcacagaacagcagaagcaccggcacgaagcagagccaagacaagagaagacacagacagacgcccgagccaacacgccgaaaaacaacaacagaaaaagaaaaaaacagagcgaannnnnnnnnnnnn

SEQ ID NO: 9799 - DNA, 1947 bp, Homo sapiens
  misc_feature 1, 1942, 1943, 1944, 1945, 1946, 1947: n = A,T,C or G
nagctgggtggctggatatggactctgaagcagaagatgcttcatgaaatatttttggtttatctaataactttggtccaaatacgtatacaggaactatatactgaggtagcattactgaatttgccatacgaaacatcttcactttcatccatcaggtcagaatttgggagtcaagtcacagactacttaaattgggtctttttcttcttagacaaatttatacgacttttttacatttttggccatcttcctatttaattcttttatgcgatgaatgtatatttcatgaggcaataattaaccttcaccaacttggcaggttgctttgttagtcaattataaggctaacaaaatataaaggtcatgactttgggagaagaaatgccttgtgactctaagaggttcagtgactgctgatctacactttaggacttgtatgatcaccccctttttatactagaatttaggctgtttggagttgacttttactatttcagctatcagaatgatgcagcattgaattcctcccaagtggctaatctagtacgaatacattagcaacccaaatcagcctataaggaatcaagttaaatgatcttatactcatgtccttttttctacacttgggattttcacgcaaaaataaagactgacttacttggtaatattatgattacagaatttgagttgcttctaaaaaataatgcagagagaaatactgaaaatgatgaagactttttcaaatgttataatacggtcatttataaatgactatttatatatgtcagttacatacatagtgacagttatagtaaaacactaggaacctgtacttaaaaagaaaaaacaaaatcctgtacacaaaacaagcatacatatataaggatttgaatctatgtatatatattttacatttttcaacatttgtgttttattccattaacataaccatttacagttattccagaaatttcagtcatacacagtgctcttgaatccaaagagtggtctagtgtgttggcattttcatcaagtacagtcctagaaaatgtcaagttgaacaataagatattgaggcacattggtcactgtgtattctgaattctttagtatggtcagaggaagtagttaatatatttcatgttgattctttggctactcttgatttttgctttgggtaacatcctcatcctgggaacattcattaccacttaatagcaagataacattaaaaaaaaatccttcattgccacatttaatagcatgtttaaaaaggcagaggttgcaatgagctgagaacgcactactgcactccagcctgggtgacagagtgagacactgtctccaaaaaaaaaatgtttaaaatgagaccaaaccctcatggagacatttctctgttctattagaaacgcaatggcattctcatagatcctctttcttttttatgatcacttgtctaaccagagctgctatgtcaggcctgatgacttcaatgggctcctctggcctccagaacttcacaacttgaccctcagggttgacaagatacttccaaaaattccaccttggttccttctttgaagaatcaacaagaaatctaaatgcaggttctccttcagatcctagaatcttaatcttgtggaagatggggaaagttactccgtagttttttcttgcaaaagattctacttccttgcttgggcggggctccgattctccaaactgattgcagggaaaagccaacacgctgaagtgggatggtccaaactctttgtgcagttccttcagccctaagtaatttctgtctgtgagttggcagtcactggccacgtttacaactagtgaaactttgcctttatacttttccagagaaacagttcttccttttgcatccttcacttcaaaggcataaaagctgttgattttaggtttgaggaannnnnn

SEQ ID NO: 9800 - DNA, 994 bp, Homo sapiens
  misc_feature 1, 2, 3, 4, 993, 994: n = A,T,C or G
nnnnagcttcagctgttagaacagtcagaaactattgattcttccctttaggaaaaaatgctcaggcagaacggggtacatccacaggaggaatcggacgagaggatgtgacattcggtccaggagagaaagagcagtttctgttaaagatgtaacaaatggatttccaaagtctacatgacattcacttttcaaacttcccaccagttgaatttctttttttccttaagaaacaggtgatgtcttggaaaacagctccttatgtctctctgtgcatctccattttcctagtctctggagtctcaaaaagagtggcaaagcactttacagtagtaactgaggaatcagagtctctgcttcagcgatatctagtttgtacagttgggtgatcttttgtaattcctaggaggtaatgcatttttaatgttttctgaagctttgtaagtgtgagagagggacaagaagtgcagttctgttctggaattccttattgctttcaacggacactctttgtgaaaaatccaagtaatattttagttcaaacttgatcttgagccaaggcccactgccacctctgggatgggagtcggacctacataccaagtgacaagttcaccttaacatctgcttccagaatggctttgattcagccgtgccaggcaacagaacagggtcagactcctgctctgttattggcttgaagactaggatcccaaaggggttggaggcagggaatatttgaaaattcagactggaattccaggccaaaagctcaagaccaccagcctctcctcctgcctggaaaaataagcctttgtgaaagactgatttaccatgtacaattgtgattgtgaacgttgttgagtaaacctccagactttctctaaaaaaaaaaaaaaaaaaaaaaagaaaaaaaggggggatatcacgggccgcgcacttgagggcaagagttaaaagcggcaagcgacagcgggaccggtaccacacgann

SEQ ID NO: 9801 - DNA, 6542 bp, Homo sapiens
  misc_feature 1, 2, 2816, 2817, 2818, 2819, 2820, 2821, 2822, 2823, 2824,2825, 2826, 2827, 2828, 2829, 2830, 2831, 2832, 2833, 2834,2835, 2836, 2837, 2838, 2839, 2840, 2841, 2842, 2843, 2844,2845, 2846, 2847, 2848, 2849, 2850, 2851, 2852, 2853: n = A,T,C or G
  misc_feature 2854, 2855, 6542: n = A,T,C or G
nnaagtgttcaaggactatatttctaaaatggacccagcctctaccctgggactaagcactgagtccatccatggctacagcatcagccacgtgaaacgagtgttggatgcagagccccccgagatgcctccttgccgtcgaggtgtcaataacatatcagtctccctcaaaggtctgaaggagaaatgcgtcgacagcctggtgttcgagacgctgatccccaagccgatgatgcagcactacataagcctcctgctgaagcaccggcgcctcgtcctctcgggccccagcggcacgggcaagacctacctgaccaatcgcttggccgagtacctggtggagcgctctggccgtgaggtcacagagggcatcgtcagcaccttcaacatgcaccagcagtcttgcaaggatctgcaactgtatctttccaacctagccaaccagatagaccgggaaacaggaattggggatgtgcccctggtgattctattggatgacctgagtgaagcaggctccatcagtgagttggtcaatggggccctcacctgcaagtatcataaatgtccctatattataggtaccaccaatcagcctgtaaaaatgacacccaaccatggcttgcacttgagcttcaggatgttgaccttctccaacaacgtggagccagccaatggcttcctggttcgttacctgaggaggaagctggtagagtcagacagcgacatcaatgccaacaaggaagagctgcttcgggtgctcgactgggtacccaagctgtggtatcatctccacaccttccttgagaagcacagcacctcagacttcctcatcggcccttgcttctttctgtcgtgtcccattggcattgaggacttccggacctggttcattgacctgtggaacaactctatcattccctatctacaggaaggagccaaggatgggataaaggtccatggacagaaagctgcttgggaggacccagtggaatgggtccgggacacacttccctggccatcagcccaacaagaccaatcaaagctgtaccacctgcccccacccaccgtgggccctcacagcattgcctcacctcccgaggataggacagtcaaagacagcaccccaagttctctggactcagatcctctgatggccatgctgctgaaacttcaagaagctgccaactacattgagtctccagatcgagaaaccatcctggaccccaaccttcaggcaacactttaagggttcggcaatcactgtcacccccggacagcagaacgctggcatcagctatcttagctcctcctctcccctctcctctttcagagcactggctctccagccccaggaggagaacaggagggaggaggagatgaaagaggagggacaggttcttggtgctgtacctttgagaacttcctaggaaggaatggtggggtggcgtttgggaacttgtgccccctaaacacatttactggcctcctctaatgactttggggaaaagatgattctgggtctttcccttgacttcttgtttcaattacaaactcctgggctttctggggaggggttcagaaaacatcaaaacactgcagcagttcctaaatgattctcacaagcaaccctgagagagacagtcttgtgagggagatctgggggaggcaggaagctcctcagattttctcacagacccttcccaattccatcaccactgccaacaactcctcccccagagatctggctggagcccagaaaaagaagcatgtggtttaaaaaatgtttaaatcaatctgtaaaaggtaaaaatgaaaaacaaaaacaagcaaacaaacaaaaaacaatggaaaagatgaagctggagagagaggaaccagttgccaaggtagagagctgcccgctcctgccctctggatgacataggggacatcaacaagacggctgccaacctgagaagtcaccaaaccacaaaaataaccttacagccttcagggaaagactaccagctctgtctttctaccctctaatttaacaatgcataagagtcaataaaccctacttttttatttttggtttttattttgttttcatttttttctcccatttgcctatttatttttttgtttcccttttttttttctttttccgtttttccatttcctcacatgtccacgagatgcttgggttgcttttccaggggctagtttggcttttccaagtgggttttctttggagaatctgatgccatgcaattggcatgacacctgccatgccactatctttggcatccatgaggcttatatgagacatgaagcattggctcagaagtagagggagaagaggaacccagttcccttgacttcccttttgagagcacacgttctgctgggtagctcaattgccagcctctgtcatgagaaggtatagccccatcttgatagaagagttactccgagctttatcatggaccagaggaaaaccagaaaactgaaaacattcctctgtcttgtggccagtttggcctttcactgcactattctgatggtgcctgactgaatccaaatatcctagctggctcttactatttttcacaaatgagcattcacatataagagatgaacatccatgtgagatcatcccaatcagaatataagactcaaggagtttgacttggtggccaatacctgccttccaaagagatcctacctttgcagatttgctcctttcccattgccttgaaggtctggcaatccctgttctttcatttgacaagtacttactgagtactcactatatacaaatcattaggttaaannnnnnnnnnnnnnnnnnnnnnnnnnnnnnnnnnnnnnnncgcgtccgcccacgcgtagacctgggcccttaagtttacagtccagcaggaaatgttaacctccattcagctacgcccccttgttatctagaccttcgggatcatctaagaaatgtagctgaaacccaaggagccagctagaaagaagcttttgattagatgtacaatacattgggggcagaagatctgggatcaattaagatggagcctgaaggactatggaatcttgcttgtcaggaatgggcaagtctacttcctgccatttctgaaagccccgcgggaccagcttctaggctgagctgcctagtaggctgaagcttcaggactctgcaggtcaaggatatgtgatgagcaccggcctaagtgtttgctcttcagattcctaagtagcacaagactttatcagaatctataggcataccaacctggatcactcttccacccaaccgaggagtagatgcatctgaatcttcatatcggtatattaagtccaaaagatggtccgggctgcccctcacaaaagcttctgcatccacgtggtaagctcccatggatgacagggttctgtatgatggagactattattgctattgctgctaattccatgagctgtgaagatccctaaccaactcagctgtaacatatgcaattctgtggtgggaagaggctgtgtgtccaaggatggtgctgaaatcactgccttaaggtctctgctgtgcagaatgaggaggcccccgagctggctgttctaacttagaaggaagagaagactggatgggcctgcttgggatctaggcctcttctaaaccctatcctaagctccagttccatggcaaggctcagacttttaatgccatcttaatctgatggttgagcgcttcactctattttctggtgctgcccagccagtgccttctgccatggatgttactggctacttgagaaaaaggagaggggagaaccccttctttcattccaactgcctccgaccccaaagggattcttggctctctggtaaccatggataccaccatgaattttatttggatcctcagcaggttgattctggaggcctcatgctatgactttttatttctcttcctgggatccaccaccctctactctcagctgactgctgcatttaggccaggtctccaattgctttcctccagaaagtgtgttcccgtctagtgaggtagtattgaagcctcggctttccctctggagcctgggaccctgtttacagttgcacatctgggcccctcactgtggggattgatcattctcatgaaggaatcacagttatatggcaactgcagaaggctgagcctcctcatggtgctataaccccttgggacactcatccagacttctctgaagcagaaaacctgagctccccactcactgccctagaatttatggcaaggagcaaatctacagcattctctcccacctacgtcctgcttcttggttgagactactgggatccttcagaaaagaaacactgggtcccatagctaaattctcaaccgccaggcaccttcagaagaatccagcctaatactggaatttgtgctattatcttcctctccagccccccaactccatccctcaccacagttgtctaggaaatgacatgaattcaatatctaatgtcaaccaatggggagagccacaactccaggagaggttcctgagctgagtcccttaatttctggatgaagaagaccaacaagttttgtccaatgtatttgtttctcagaccttgcctaggcactaaaaataaaatactaggtcattggaggctaatgtgggacctgatgtctgcgtgtgtgtgtgtgtgtgtgtgtgtgtgtgtctccctctctcacacacacaagagcagtttgctgttgctgtttcctaccttctgaggcttcaaagtattttttaaaatctatgctttgtggcagctctacggtgcttatctctgtctttgtgtcaatccttaagtacccatgtctttttcatgtctaaccattgggaaggtagaggctggcagggaagacaaatctgctacaagtccatgggaagaccctacaatgaaatgttcattggttggtatactgttttagtcttgaattgccaactttccaactgatctatccatattccttaagtactaaagacaaaatagagggcttctttttctctcttaatgtcttgccttctggttttcctggtttgcaagactaagtgtacctaatctcaccatctcttcacttctagctctctgaaacaagggtcacactactcagagggataaccccttacagtggtctgaggagtaactatttcctaaagtattctaaaagagtaggaagagagaaatggtagcctgctgcttctcacagacacctcacatcctcacttgggatggcatccacatagaaaccctgcatttaggtaaaatttgcctgactgaaggggactcagtcctccaaatcaaggtcaagaagatatctgcatgagaccttaagaactctttattgccattatttggagagggcgggggaattgtcctaatcacacatttaacacagggaataagtgctgaagtgacccagatcaccaagcgcagttcctcatcatactttatttttgctttccttattccttggcactgactaagctaaagttaagaagccgacttcataagccaacccctgtgatgggatggaaaaatgggcttttgcagagggtttattaatagagatggatatactactcacaagttctggctcatggctccactgagaaggccatagtaataaaatgatcttatgaacactgttccccaaaggccaaagcctgaagatattgccccttataatccaatcagccttatattttaataagtcctgaatcaacctgactacggatatatggggccaccagggtgcatgggtgcatgtctgctcagcctagccctggaagtgagcactgccggccacagatcctgggaaaggtggtagtaacccagaagatgtagccttgaagggaggatacctatcaaaatgccaaagctgcagggacacgaagacggttgaaaattcaacctatgtatactagatccttccagtttgatggtttggtcattcttcttcatgattataccatggagaattttctgtgacaagggtggtcatggaagtaagtgagtgatcccctggtttctcattccttaaagcagtggttcgcaaagtatggcacaagaccagcagcatcagcagctttgggaactgttcagaaacgaaaatctcatcccatccagatctggcgaatcagaaactctaagcaacggcccggcaatccacgtttctatataagccctcctgggaatctgatgcaccactaaatgtcaactgctctcaacagcacgcccgtaccagactgtggcactcccacacgatgacctggtccccacaccaaaccgctcccctctccaccaccatccactgctcaccagcacccttcgcaccccccgtacgtcgcctcccagcgccagcacacaaccagtcccgatcgcaccaacacagcacgtcatctacaacccagacacacactcccacgcacaccgaccacgccacacagtcgccgcttcgtgccctacctcaccacccgctccccccccgactaccacgcgan

SEQ ID NO: 9802 - DNA, 2148 bp, Homo sapiens
  misc_feature 1, 2, 3, 4, 2139, 2140, 2141, 2142, 2143, 2144, 2145, 2146,2147, 2148: n = A,T,C or G
nnnncgcggccgcgtcgacacggctgcgagaagacgacagaagggggaggaggtgggggtgggcggaactcctagcggacacctcgtggcggccggaagagcaaccgagatgaaggtgaagatgctgagccggaatccggacaattatgtccgcgaaaccaagttggacttacagagagttccaagaaactatgatcctgctttacatccttttgaggtcccacgagaatatataagagctttaaatgctaccaaactggaacgagtatttgcaaaaccattccttgcttcgctggatggtcaccgtgatggagtcaattgcttggcaaagcatccagagaagctggctactgtcctttctggggcgtgtgatggagaggttagaatttggaatctaactcagcggaattgtatccgtacctcgcaagcacatgatttttcactgttggtgatgacaaaactgtgaagcagtggaaaatggatgggccaggctatggagacgaggaagagccattacatacaatattaggaaagacagtgtatactgggattgatcatcactggaaagaagctgtttttgccacatgtggacagcaagtagacatttgggatgaacaaagaactaatcctatatgttcaatgacctggggatttgacagtataagtagtgttaaatttaacccaattgaggtaatgtttttttttaagtatgttttacttattatggcttaataatttcagttctgtttataaaacttttgaatgtatgatagaaacttctgaattttaatggtgttttggcattttgtcagttttcccgattgtaaatgagttctgatacctttgctcaaatcccaacatgtttcccagcagtttagtcccagatactagagttaagcattgttagaggagaggtgtgtgcatttgcccattggggtaaaatccagtaaatatagtcttgttttaactttagttttactcatgccttcaacttcatgttccatagattatgtcattgtacatttaggaaaatgttaatttttctacctgccttggaggtcagaagaaggagcattggacatcattttgtctatttgtaattggtaaggtaccaatgcttcataaaaacatttgtgattattgttgaactgcatggtaattagttatagttatatttttctttgctcataagtctgaattgtgattcccagttcctccaggcctaagggaagagttggagattggccactacatgtcgtctgtttaggtctgaatttagaaatgaagctgtcctgaaggctaagctagcccttggactccagatctttctctgaactttttcttaatgcatacaatagatgacctgattgtccagaagactcagtagggatatgtttttctgttgaaagaaaaggcaatcatagcatatataagccaattttagcagttattgcgaggctaccattttaggtagtatgagagaaaaatcctaatatgcaagtgttatgctcttaaagacccaacctgataaaagataggaagtaaggttgagtcaaaatagtaaggtataaaaatagtttgtatgatatactggaaaatgagatgctgcagtgcgatgtgagcttggccttgaggaattactgagaagtcagaggacactcttcctgcaactaccacatgctcacacacacactttctagagcgctacaggtctagaataggttggcaaactagtctgtgagccacatgtggcccacctgcctgtttttgtaaatagagctctgctagaagtcagccatgtctctgcgtacatattgtctgtagctgcttcgtgctatgatggcagagttaagtaattgccacagagaccatatggcccacaaaacctaaaatacttactctctggccctttacagaaaaagttttctgattcctggtctggagtgtctgtctctattatatctttctcactccatcctccatcttccttccttatgtttcccttggttgtagaagagagaagtggcatggaaaggcagctacctttgcagagcaggaccaagtgtaaaagttgataacatatgtgaacattttttaaaagtgctatccaaattcaagatggtgacggtattacgtacnnnnnnnnnn

SEQ ID NO: 9803 - DNA, 2960 bp, Homo sapiens
aagcgattggtgtctataccttgccgtctctctttcagtcatcttcagattgtttgtcttggctgtaagtataactattgctatagatgaatgtaaaaagagtgtttaaaaagttcgttgctttaattgcactggaggtgaagctagttacatactttccttaacttcccttctgcttttgctgttgaagaggccaaatactttcttggcatgaaaaagtattataaggcccctaatccttaggagttattagtaagagctgtctttaaagcactggcagcttttaaggttttttttttcttttgtcctacatagagcaccagaataatttcacatattactatatttttgtgtctgaaatgtcagtagaaccttctgtccaccaaagaggaacatcttgaaggagttgggctgctttatttactctgtggagggatctgttctctctggctttactttgtctaatcactacccctttgctgtcgagccccgatatttaatgagtaaacaaactcatataaaaccagtttggccgggctggtgactggttttaagaaagtcagtgatgatttcacggtgtttggggagcggtacccacaaacctttagagccttttacaaagactgaagagttttaagtagagttcaacctgtggacaagctggtatagaactgttgaaacaggtgaaacatgatgcttctgcttcctttcagcatctatattggaaagcgactgagcacaccctctgccagcacctactgagggaaaggaaaagcccctggaaatgcgtgtgacctgtgaagtggtgtattgtcacagtagcttatttgaacttgagaccattgtaagcatgacccaacctaccaccctgtttttacatatccaattccagtaactctcaaattcaatattttattcaaactctgttgaggcattttactaaccttataccctttttggcctgaagacattttagaatttcctaacagagtttactgttgtttagaaatttgcaagggcttcttttccgcaaatgccaccagcagattataattttgtcagcaatgctattatctctaattagtgccaccagactagacctgtatcattcatggtataaattttactcttgcaacataactaccatctctctcttaaaacgagatcaggttagcaaatgatgtaaaagaagctttattgtctagttgttttttttcccccaagacaaaggcaagtttccctaagtttgagttgatagttattaaaaagaaaacaaaacaaaaaaaaaaggcaaggcacaacaaaaaaatatcctgggcaataaaaaaaatattttaaaccagctttggagccacttttttgtctaagcctcctaatagcgtcttttaatttataggaggcaaactgtataaatgataggtatgaaatagaataagaagtaaaatacatcagcagattttcatactagtatgttgtaatgctgtcttttctatggtgtagaatctttctttctgataaggaacgtctcaggcttagaaatatatgaaattgctttttgagatttttgcgtgtgtgtttgatattttttacgataattagctgcatgtgaatttttcatgaccttctttacattttttattttttatttctttatttttttttctctaagaagaggctttggaatgagttccaatttgtgatgttaatacaggcttcttgttttaggaagcatcacctatactctgaagcctttaaactctgaagagaattgtttcagagttattccaagcacttgtgcaacttggaaaaacagacttgggttgtgggaacagttgacagcgttctgaaaagatgccatttgtttccttctgatctctcactgaataatgtttactgtacagtcttcccaaggtgattcctgcgactgcaggcactggtcattttctcatgtagctgtcttttcagttatggtaaactcttaaagttcagaacactcaacagattccttcagtgatatacttgttcgttcatttctaaaatgtgaagctttaggaccaaattgttagaaagcatcaggatgaccagttatctcgagtagattttcttggatttcagaacatctagcatgactctgaaggataccacatgttttatatataaataattactgtttatgatatagacattgatattgactatttagagaaccgttgttaattttaaaactagcaatctataaagtgcaccaggtcaacttgaataaaaacactatgacagacaggtttgccagtttgcagaaactaactcttttctcacatcaacatttgtaaaattgatgtgttatagtggaaaataacatatagattaaacaaaatttttatcttttttcaagaatatagctggctatctttaagaaagatgatatatcctagttttgaaagtaattttcttttttctttctagcatttgatgtctaaataattttggacatctttttcctagaccatgtttctgtcttactcttaaacctggtaacacttgatttgccttctataacctatttatttcaagtgttcatatttgaatttctttgggaagaaagtaaatctgatggctcactgatttttgaaaagcctgaataaaattggaaagactggaaagttaggagaactgactagctaaactgctacagtatgcaatttctattacaattggtattacaggggggaaaagtaaaattacactttacctgaaagtgacttcttacagctagtgcattgtgctctttccaaggttcagcagcagttctatcagtgggccactgaacgggtatttaagatcttccggtcaaagaacctggttgccttgttcaacttgaggatatggaatctcacggctccactcggcacattaagccgtgttcgacccaatgggcaaatgtcccatttgagcacttctgg

SEQ ID NO: 9804 - DNA, 3546 bp, Homo sapiens
gcgtccgaaggtagcgtcttgatctgcgtggcgtggttctgtgccttgggaagagatgaatgggaagcggccagcggagcccggcccagcccgggtgggaaaaaagggaaagaaggaggtgatggcggagttttcggacgctgttacggaagaaaccacgataaaggggacatgccgggagttgcagtaccctcaggaagaagtcattgtcatggacatggacccttttcttcactgtgtgatcccaaacttcatccaaagccaagacttcttagaagggcttcagaaggaactgatgaacttggacttccatgagaatctgatgatttgaagaagagaagagagcctcacatctccactttaaggaaaattctgtttgaagatttccggtcctggctttctgatatttctaaaattgacctggaatcaaccattgacatgtcctgtgctaaatatgaattcactgatgccctgctgtgccatgatgatgagctggaagggcgccggattgccttcatcctgtacctggttcctccctgggacaggagcatgggtggtaccctggacctgtacagcattgatgaacactttcagccgaagcagattgtcaagtctcttatcccttcgtggaacaaactggttttctttgaagtatctcctgtgtcctttcaccaggtgtctgaagtgctgtctgaagaaaagtcacgtttgtctataagtggctggtttcatggtccatcattgactcggcctcccaactactttgaaccccccatacctcggagccctcacatcccacaagatcatgagattttgtatgattggatcaaccctacttatctggacatggattaccaagttcaaattcaagaagagtttgaagaaagttctgaaattctcctgaaggagtttcttaagcctgagaaattcacgaaagtctgtgaggccttggagcatggacatgtggaatggagcagccgaggtccccctaacaaaaggttttatgagaaagctgaggagagtaagcttcctgagatattgaaggagtgcatgaagttatttcgctctgaggcactattcttgctgctctccaacttcacaggcctgaagcttcatttcttggccccttcggaagaagatgagatgaatgataaaaaagaggcagaaaccactgatatcactgaagaagggactagccatagtcctcctgagccagagaataatcagatggccatcagcaacaacagccaacagagcaatgagcagacagacccagagccagaggaaaatgaaacaaagaaagaatcaagtgttcccatgtgccaaggggaactgaggcattggaagaccggtcactacactttaattcatgaccatagcaaggctgaatttgccctagacttaattctgtactgtggctgtgaaggctgggagccagaatatggcggttttacttcttacattgccaaaggtgaagatgaagagctgctaacagtgaatccagaaagcaattctttggcattggtctacagagacagagagactctgaaatttgtcaagcatattaaccaccgaagcctggaacaaaagaaaaccttcccaaacagaacaggtttctgggacttttcattcatctattatgaatgacagcactgggcaaagctgaacaaaaatgtgacccttcgtaattactgggaagtctgaaagagctaagcatggagtcaaggagaactacatggtagcttgcctgacagtgttcttaaaactggttgtcttttactaggactcataatgattgtcctcaaccgagaccttgagcttgcagctacgtacttatctcttgattaaaaaaaaaaagttggcttttttttttttaacatttagtcctttttccatattggcttcttcagtgaatttttaagttcaatttgtttttattgaggtaaaatatttataacataaaactgaccagcttacccatttttaaatatgcaattcagtggattaagtacattctcattgttgtccagccatcaccatcatccatctccagaagttttccatcttcccaaattctgtgcccattgaacaataactccccacctccccttcccctagcaacagccatactttttgtctctatcatcaacttcactactcatatttctcatgtaagtggaatcatacagtatttgtccttttgtgactggtttcacttagcataaagtctttaagatgcatccatgtttccagtgtttcggtttttttagaaaaactcatacgtgattgcagccgggcatggtggctcacgcctgtaatcccagcacttgggaggccaaggcaggcggatcacctgaggtcaggagttaaacaccagcctgacaaacatggagaaaccccatctctactaaaaatacaaaattagctgggcgtggtggcacatgcctgtaatcccagctactcaggaggctggggcaggagaattggttgaacccaggaggcggaggttgcagtgagccgagattgtgccactgcactccagcctgggcaacaagagtgaaactctgtccaaaaaaaaaaaaaggatgaaaaaaaaactgaaaagtggaaaggggcaagctcaaggtccagtttcattaaatggaacagctaattttaaaatcagagaaacaaatgatatgctatacctcctaagataaggatatcagcaattcttcttacatcttgcgggatgtgagggctccgaggtatggggggttcaaagtagttgggaggccgagtcaatgatggaccatgaaaccagccacttatagacaaacgtgacttttcttcagacagcacttcagacacctgaaaggagaagcccagtagcacatcaacacgaagaatagggggattaccgccaatgcacattaatttcagggtcctccatgctaagcattacaacaacatcagataacaagtctaacaggaagctgtcatgtttggataatgggtgattaaaaaacataatccttgctactctatttgtggcttacagtctttacctggtgaaaggacacaggagatacttcaaagaaaaccagtttgttcccacgaagggataagagacttgaccaatctgcttcggctgaaagtgtcctgcaccaggaaacagaacacatcactaaaatctatcattaaccacttccagcctgcctcattttactctgacaatttccaaaaacttctgagggcatctagattgtgcccttcagacgctgaaatacctgccctttcaatctgctttcacttcataccttgcgagtatgactacgtggcatcattgtgcttacttaacacatcccatctatcatcagagacaggctgggacataaaggttctccaaaagttcccatggaggcccacatattgggtgtagcacattcagacaaacctagactcagtcaaatgggaggacacgggagattcttcgcacaaggaggctctatttgcatccacccttacaaggatcggtattcgaagtggacagatatcaacaccaaa

SEQ ID NO: 9805 - DNA, 5578 bp, Homo sapiens
  misc_feature 1, 2, 3, 4, 5577, 5578: n = A,T,C or G
nnnnccgccgcattcgacccgcgccatggcagaggagagcgggtgccgggagggaagccgggaaccgtctccattctgaaactagggcggggaagccgccgcgggagcccgggaggggggcggaggcgggcggaggcggcggcgcggccagcgccccattcaccccgcctgagcccggggcgctgtgcgctgaggaaggcgcgggcgagccggagcagaagaaggagggagggagccagccgctgcagccaccaccgccaccatgtcctaccaaggcaagaagaacatcccgcggatcacgagtgaccgtctccttatcaagggaggcagaatcgtcaatgatgatcagtccttttatgctgatatttacatggaagatggcttaataaaacaaattggagacaatctgattgttcctggaggagtgaagaccattgaagccaatgggaagatggtgatccctggaggcatcgatgtccatactcacttccagatgccatataagggaatgaccacagtagatgacttcttccaagggacaaaggcggccttagcaggtggcaccaccatgatcattgaccatgtggtgcctgagcctgagtccagcctgactgaggcctatgagaaatggagagagtgggctgatgggaagagttgctgtgactatgccctgcatgtggacatcacccactggaatgacagcgtcaagcaggaagtgcagaacctcatcaaggacaaaggggttaactccttcatggtttatatggcttataaggatttgtatcaagtatctaacacagagctctatgagatcttcacctgcctgggagagctgggggccattgctcaagttcatgctgagaatggggatatcattgcccaggagcaaacccgcatgttggaaatggggataactggcccagaaggccatgtactgagcaggccagaagagctggaagctgaggctgtgttccgtgccatcaccattgccagccaaaccaattgccctctctacgtcacaaaggtcatgagcaagagtgcagctgacctcatctcacaagccaggaaaaaaggaaatgtagtctttggtgagcccatcactgccagcctcggcatagatggaacccattattggagcaagaactgggccaaggcggctgcatttgtgacatccccacccctgagccctgacccaactactccggactacatcaactccttgctggccagcggggatctgcagctatctgggagtgcccactgcaccttcagcactgcccagaaagcaattgggaaggacaacttcacagccattcctgagggcaccaatggtgtggaggagcggatgtctgtcatctgggacaaggctgtggccacagggaaaatggacgaaaaccagttcgtggctgtgacaagcacaaacgctgccaagatcttcaacctgtatccccgcaagggaagaatatctgtgggttctgacagcgacctcgtcatctgggatccagatgctgtgaagatcgtctctgccaagaaccaccagtctgcggcagagtacaacatctttgaagggatggagctgcgcggggctcctctggttgtcatctgccagggcaagatcatgctggaagatggcaacctgcacgtgacccagggggctggccgcttcataccctgcagcccgttctccgactatgtctacaagcgcattaaagcacggaggaagatggcagacctgcatgccgtcccaaggggcatgtacgatgggcctgtgtttgacctgaccaccacccccaaaggtggcacccccgcaggctctgctcggggctctcctactcggccgaacccacctgtgaggaatcttcatcagtcgggatttagcctgtcaggcacccaagtggatgagggggttcgctcagccagcaagcgcatcgtggcgcccccaggcggccgttctaatatcacatctctgagttaagcaagccttcctcaaagagaggggcagaagcaagaagagattgttttgaagccaaaatggtacaccgatatttaagaaggaaagcgaatccaaacggttgtgatctaaagaatcaataagcctcaagccttatgtttctccaatgttacgctcgcttgcctagctttacgaatattgctttgttttctgtttatgcatagccttgatttgtttgactcccctccccccatttacatgcatgcaatcagacaggccactaaggtaaaagagtctgctctatcatagtgttgagagcgtgtgtagtgctgcatcttatgacaaggggacagacaagctgggacgtcagggaaatgaacaaaagggacgcaggttatttggggtgagtgggtggtgggagcctggagcaaggtggagggtgcagaggggctggggtagggcatgtaggagggaggtgggtgggtcaggtgagtggaaggggtgttgtatattgtgttgatgacgtacgttatttccatggaagatagccgctgtggcagctgtcacatcaccacagctccctagggtctgccgagaaggcaggcagtctttgggttctgttctttgtcacgtcccctacaagtaaattttgtttctttgaacgtttattaaaatgccaagacccaaccatttcttccacctgcttgattgtgccagtgtttgctcaggcctctttcttagtgttgctttcaaatccttctctttcctgggttgggaaggccaggcagggacagagcaaatgacacttctcttcctcttgccctccctgcctctttggtgctcttaaaagccagcagctgagaacatagcacaggcccacgtggtgagggcacccacagcttaaagacgcttccttctaaacacggcgaggtcacctctcactcttctgtctttgcaaaccgagaagagtggcatgcttctggcatcccaagtcaggattttagctcagatgaggcagaatgaagggcctctcttacaggcagtttgtgtttgattctctcgatcctggcacatccatgataaataggagtttttgaaagttggttttattaggtgttccctaatttttaccgtaataggtcatctcagcttatatgaaagtcaagtggggaactgggaaagccaaagtcagtcttgagcagagggagcacattttgtggacctggttccacctttccattccaaaccacctgtttccccttccattagcagaaactctgggggaactttgtgtctcagtcctagaatctccccaagtgagtggaagtgacatgatgcagtcttcctcatggggcacctgaaagaaattagtgtgggtgcttcgatctaccttgtctgtcagagttgaatatctctttccctatcatgctgcttctgaaaattcagttttggagcaagtcctgtgagcaagataagaatctatagaaccaagatgctcattttcagaagaaatatgttcaacctgggatcagacttccatgctctggggaatccaagtggtagcacctgtaaccctgtgtactaagtgctttgaagagaagagcaggcctcagacaccttttaattgcttaggagaaaccattgtctctgactgcaggtttgaataagttgaagaccagagaaaagtacacactgggctacaaaggaatttggagatagccaaggaacaggatttcccctagcaagctaccttctgttcaaatcatgaaaaaagactatttccccttagaatagggaagcttgctattttaaagctcttgtagtgcttttcttttaagggagatgtagtaaaagggaaaatgtagctcttagtttacacttcaaagatgtgggggtctttcagagaactaagaataacagttttatgtgcagagagagtttgccagatctgaagcatatacctcattgactaggctgttactttgggataggttgcagtaccagccacagccagcagatagaggaaaagacacacataaactcgcttctgagcgtccacttctgcactctctgctctgctgttactcagcccctgagtctgactcatctctgcacaacctctctgtgccatgaagataagtcttccatggccaaatcggtcatccgcactgcccttgggacttccgaagtgaaccattccaccagaacctttgattctgcacaagatttccttgctctgggaacaacccccaaatgcccttgggaggaacaacatgagctcaggaagcctctctttcttcacttaccattactaactctccaagcatagaaatccctgggaattgcgagaataactcccactattttaaaatttatattcagatttgtttcgtttcataagacacatcaaacaggcctatacaaaaggtttaggaaaagaaaacaatggtgagtcccggccctcttcgaattcactggcacctcatgcaagtgtaggaaggcacgctggatcgtctatctgattccaaagctgtcctttgccatctcatcccttggcctgccccccaaccctgaggatgcccctgccatccccccaacctcctcatattgcctctgaacccagatggcaatccatcccggttctctctgagggccacgggcttgggtagtggaaagggtgtttgggaaattgttaaatcagttacccgtagtagagctatttcttgtacttctaagttttctagaagtggaaggattgtagtcatcctgaaaatgggtttacttcaaaatccctcagccttgttcttcacgactgtctatactgagagtgtcatgtttccacaaagggctgacacctgagcctggattttcactcatccctgagaagccctttccagtagggtgggcaattcccaacttccttgccacaagcttcccaggctttctcccctggaaaactccagcttgagtcccagatacactcatgggctgccctgggcagccagcattcattgtaagttccctctttgaaaactggtgtgtgggtgttcagttctgtgtctggtgggtatggacagacagtaatctcctgtgatctgtgctagctgtgaggcagctctggaacgtgaagagctgtttggtttgaaccgtgaacaaaactgtgttttgagtttagctgacattaaagaaaaaagttcatcacgtgactgttaatgtaaacctggttattaaaataactatgaaattaccaaaaaaaaaaaaaaaaaaaacggggggaatatattgggggggggaaaaagggttataaaggggacccaagggtccaatggtgttccccggccccacgtttcgttgacaaaggggggaaaaagtgcgcgggaccccccaatagagagagcgaataatccggaaaaccccaggctaaccggttagacgcctctcaacgaacagaccatagacaaacaaagaacaagcgcaacagacagcggaggcagcagacataaaacagaagaagacaacaacgcactacaagcagcagagagccgcagagacaagcaagcgaagaaaacgaacacaacacagtagaacaaacgaacacaacaaacaagacacaacagacgacggann

SEQ ID NO: 9806 - DNA, 1069 bp, Homo sapiens
  misc_feature 33: n = A,T,C or G
ggtgcatagcatggttagaggggctagagatgnacagtcatcaactggcggatatagcggtacatatgatccttagccacaagggcacaagcttaccagtagacaatacagacagagcttttgttgagctgtaactgagctatggaatagcttctttgatgtacctctttgccttaaattgctttttagttctaagattgtagaatgatcctttcaaattgtaatcttttctaacagagatattttaatatacttgctttcttaaaaaacaaaaaaactactgtcagtattaatactgagccagactggcatctacagatttcagatctatcattttattgattcttaagcttgtattaaaaactaggcaatatcatcatggatacataggagaagacacatttacaatcattcattgggccttttatctgtctatccatccatcatcatttgaaggcctaatatatgccaagtactcacatggtatgcattgagacataaaaaagactgtctataacctcaataagtattaaaaatcccattattacccataaggttcatcttatttcatttttagggaataaaattacatgtctatgaaatttcaattttaagcactattgtttttcatgaccataatttatttttaaaaataaattaaaggttaattatatgcatgtatgtatttctaataattaaaaatgtgttcaatccctgaaatgtctgccttttaaatataacacctactatttggttaattttgacgatttttttttttcaattaggaagctaaaaatactactttattccttatatgaacattcatccccctcctggcacctctaaacacacccaaataactcacaagtactgatttaacactctgtattactgaacttctttgaactattttgaactttgaatctcttctctgaataactgccgaaactcaaagataataattagttgatgaaggttatcaattaataaaataacacagaccagtcttaccaaactctaaatacattttaaaaaattggttctggcaatgataaaaagaatgttgagt

SEQ ID NO: 9807 - DNA, 2239 bp, Homo sapiens
  misc_feature 1945: n = A,T,C or G
gtcacggagtccacagagctgagcttttgagcagactctgagaagtatcattgcttgtgttgaaagaatacaacaggatttaagtttctctttagaaattgcactgaagaaaggccgggcgcggtggctccccctgtaatcccagcgctttgggaggccgaggcggggggatcacgaggtcaagagatcgagaccatcctggccaacatggtgaaaccccgtctctaataaaaatacaaaaattagccgggcatggtgacgtgcacctgtagtcccagctactagataggctgaggcaggagaattgcttgaatccgggaggcggaggttgcagtgagccgagatcgtgccactgaactccaacctgccaatagagcgagactccgtctcaaaaaaaaaaaaaaaaaagaaagaaatagcattgaagaaaataccgcacatcagaggaaagcttattttctgcatggtgtcttttcaaagatagaatatttgaagcatgttttctagcgattgtgtgaatgagggtgagctggctgaggcatcgctcaagctggggggtggtgtgtaagaagcacgtggagccacaagaggcacctcctatagtcagctaagggcttccctttctgcacccagcttttgggtgaagggtgatttctattagacacatctgtgcttcagtcatagatgttaatagaggaagcagttttcctgctgcagattcctgaatagagttgctgaaagagtctacttctggactcaggggaagttgaaggccagtctgtgtagaaaggctgaggcaacggggaaagacctgacagctagttacatacgctctgacatagtactcccatgatggcttccagtgacacatgtgctgatagaattctaaacctctggaatttccctgctggcgacttctatggccgttgactgtacagggtaacctgatgccagatgctatgggcgtgatgagaactagagcattgcagcatggaggaaactgtgaggcaccagatcctgtgcttctgcaggccattttctgaaaacccctgttaggaaggttggatttggcgtgacttgcttgagcaagagtcctggggagagattttgaggtttaatttaacggtatatccagagctaacagtgactcaactcgtctagttctgcaagtcagatgtacacttagagtctctctgtgaagggtttgggtctgagctgtgtagtatgtcaaactgccagtaagccagcccctcaccctctgatagatattcctttaatgcaccagacttcatgtttgataaatgattaatggttgaaattgtttctcttcttttgtgttttcccagttaatagatggtcactgtttccacaatgttttatactttcagctttttgtaacttaactataattacttaattttatttttttaaagcttgttgtggtctaatgagaagtatttttcagtgcataatgtttttctgagcttctgtaaatgccatcccaatgtggtttggttttgttgaacagaaaccaaaataaatttcaaaatgttaaagcaaaaaaaaaaaaaaaaaaaaaaaaaaaaaaaaaaaaaaaaaaaaaaaaaaaaaaaaaaaaaaaaaaaaaaaaaaaaaaaagcagagaccaaaaacacacaaggcacaaacggcgaccatgagaacagaaacgcggcaaccacacgtgtaggccccaacagaaacgcctcacagatggagcgcagccatcaataaaagaacgcacgccatgcacaccaacttctcaaccacagactatactcaatgacagaagcaccacaacactgatctgatcggatcaaacatacagcagacccggacccgcccgataagtgaatcaccccacaccacacaaaactatccacgcgaaggcaatgcacgaaacccacatcctccatttactgttagntgccaaaaactcttcccgactcctaggctcgctaacgcaaccctcacactcgtaccgacaaataacaagcaacaccgcacacccatctgtacagaacacagccacaaccaccaacacaatcagacaacgacactgaaccacaccacgcaaacaacaacaacgccagacccaaaccaacaaagacgaaccccccaaaacacaaacaaggacacaccacaccgcagacacaaacaacacacgcaccacagacaaccaaccagacgcacgaacacgaactaatcgaaaagacaccaa

SEQ ID NO: 9808 - DNA, 1260 bp, Homo sapiens
  misc_feature 1, 2, 3, 4, 1260: n = A,T,C or G
nnnncgtccgattagaacgactgaacatgagaaagggttggggtgggctgagccttttggtgtcattaactgaatacatgccagagatttttttttcaaaaagtgctttatccctacaatgtactgacagttcttacagttgagatttgttcttttcagctattgcttgtgaaaaaaagcaagactatgtcactctatagaaggctgttaaagtgactcaggcaggaattaattattctgtacctaaggggttacttgtttaatgggatggcattgactttttgaaaatcaagtggactgagtcattgataaaacatttctaagagtggggctagagaacatactttacatctgacatcctttggcctaacaacatctattattatagtgctcagcagtgtgggcattgaagaggcgcagaatgctttgaaagaaactaatcagaatcttggaacatcatgatcatgccattcttaagtaaatcaactattttcaacactgaagaaaaatgaaacattatttagaaaacaatgagattacaagttccaaactcagccaggaatgtggctcacacctgtaatcccagcactttgggacacctaggtgggagcatcgcttgaagccaggagttcaagaccagcttgggcaacgtagtgagacccctatctctacaaaaaataaaaaaattagctgggtgtgatggcacacacctgttgtcccagctactcaagaagctgagatgggaggatcctgagctcaggaggtcaaggctgcagtgagccgagattgtgccactgcactgcagctggggtgacagtgcaagaccctgtctcaaaccaaaccaaaccacacacacacaaacacacattacacacacacacacaccgaggtccaaatggtagcagggatccaaagggaacacagtatgtaggtcaaactggcaggtaacagtgtacagcctttgacaaactagaaatattagagtaggccaaacacacctccaaactgtaaggctgtgcacaaacataaaaagtgggccttccatctcctgaacgtggcgagtccatttacttgtgtacttgttctagtgagtggtgggaccgctttggatagcctcaaaaacttcgcgggggcagtggtaaaccggcgacgagacagacacagaaaatgggggcacccgctctaaggtcggcgaccaaagaactgacacgtcgggagcaaacatcttctcaaaaaggcagttgaataaagtggctccan

SEQ ID NO: 9809 - DNA, 3199 bp, Homo sapiens
  misc_feature 1, 2, 3, 4, 5, 6, 7, 8, 9, 10, 11, 12, 13, 14, 15, 16, 17,18, 19, 20, 21, 22, 23, 24, 25, 26, 27, 28, 3000, 3027,3164, 3197, 3198, 3199: n = A,T,C or G
nnnnnnnnnnnnnnnnnnnnnnnnnnnngtatttgcgcagaccattttaagattttcagtctcaacaaaacactattaaaacaaagaatctagtaaaatattgtgcatgtactgctaaacaattctagcaattttattaagcaatacctttattatttttgaatattcttaacagactggaacgaaacattttttttcaaaacaaaatatgcatactgtacgcatgtcgcagggttaagtatgatgcagaggttaaagtctgtttgaacaaaaacaaatgcccggggaaatttcatagctataaagttaataactaaattttgttcactaagaggaccttttctatggatttccttcatctctcagtcacactgcaaacttatctgaagtgcacttcccaagtgtagttagagaataggaaggaatgtaaaatttttttttaattatttgttttgtttgtttgtttgtttttttaaaaacagcccttattaactcttccttccactgattctactgtaaactcataaaagccttttatagaaagcaaattcatgtacactcagcaggtgaaatgttcccacaaagaaaataaaatacaaacagtgatcagacctcttttcctcaactacctagagcatgttagagtgataaagtttttgcacgttaataaaaatggctgacctatttattttttaaaaaagaagttgttcctctgtgataatgcagaattgcatacactgtatacctggaataattttaaaccatatgttagggaaatactggaataaaattgtgtatattctgtatattgcaggtgtttgagcatttctagtgtctcttccacaacaataagggaggaaaagaagtccagatatgtgtccgcaatccctttgttccctgtaattacaatggccaaaatgtgctcctatattactgcaacagaacaaaaatcacaatgaaagcccaccttcattgtcaaaagaaaaacttcctcactccccgcatcctgattctagatagctgctccctgtccaactggacccagcaagaaagggctgggcccacttggggatgggaactggagcaatacagttcatgatagttttttttaattttttccttttattttgttttcaacataaaaatgtgttaactgtctgattccacctattatggagagcacttgtttgttcagctaaaaaggaactcttgtcaggcccccttggctccgctctgtttctggtttgtgcaacaggggctcagaggcccatcaagcgtgcacacccattcactgtggttacacagacagaagcaagcggatgttgtttgcttaggggacgagaagagggcgagggaaaggaaaggccgggaagggtgttgttggttctgtgggtagaagggagacttagggattttttttatttttattttttgttgttttcttttttttgtcttttttattttttattctttttttgttgttgttttttgctataccatgaggtcatagcaatcattcctctaatagaagctgacaggacataaagacagaactatctgatgaacacacacaatgactagaaatatatagagagatagagacagtgaaaagacttagtttacctctgagaaaccatcccccaaaataaatcctgtattaacaagtgcaaaaaataaacaaacaaataaacccaaaccaaaacgaaagcaaataaaacctccaaacattaaaacacagtgtataaaatggtgtgagaaatttaaagtcactttccagccttttagtcaataaaaagctgtggttgtgtccttgtttggattcaggcccatctgtttaaattttaccctaaaggccttgcaataagtaattcgagggtaaaagcacccagtttctgttacatgagacagcagttgccatttttcacggcgggccagctgctgctgtggtgacactcgtccttccgttactcctcattggttgagttttcttccagcgtgttgatgcctccaaagctcagtccggctgtgttctgtgctgccgaggctgtgagcactgtgtgtaagagaatcagtacaagaacacacagcttgagtctgctgttgcacagtcttgttgctgatgacactgtgagcgatgtcctgtgacaggagccacttttctctacggtccctttggatgggttatttgatttttcttctctcctgacgtcacagcattctggttcatcattggttagaaaggtttcataaagccctgtacagatgaaactggagaggcctccgtagatgacttcatcattgtcgggcaatataaatggacacctcgtctgaacctccaaacagtattgcttgcaaggaattgtctttctgcagttaaactgtgtgacttcaaaatactgggaacagagccaggctttgtagacaatcttacagtcttcaggacaggatttcaccgagtactcctccgactgtaaatatttgtggagcacgctttcaaactcttcgtatttctcctgagcatggtggtcatagtcctggtaagcctcgacgcactgcctgcaagtggtcatctcgccgccttccttgagcaccacatccagactgcagttcaaagtgttgggactggacaaccccgagaacaactcccaaagtgtgtaggaattacaaaacgaaaggtaaaaatccgacaagttccagagcggagtgggatgcttgctcctcacctcctgcccgtcccccccggccgccccccgactccagttcctggcgcacaccgcgtccgcattctccaccgtgaagcactggcccgaggacgcgccctgggggtaacaagtctccagacgccacacgggcttggcagagtttcctagaaaaagagccttgccccggtcgtctttgcctcggttgcccttgccgccgccgccgccgccgtctcccggggaggggggcagggtgggggacgaggaggcggagaggagtctgtgtgcctgggcggcgggngaggactcccccatgctcgccaggagngcgggccaggagggctcctgctgccgccgctgctgctgctgctgctgccgctgcctctgctgctgctgctgctgctgctgctgccgctgctgctgctggtgctccttgtcccgggcccgggtcagcttggcctcggngcagaaccacaagtgatcagagagcaggactgnnn

SEQ ID NO: 9810 - DNA, 3201 bp, Homo sapiens
gcggttggggaccagtgcagggaccgggtcgcgccgtgctatggccctgtaccacactgaggagcgcggccagccctgctcgcagaattaccgcctcttctttagtaagtagctcccggaggttcgccgagcggcgcaccggagaaacctgggtgggggatggaatgggggacacttgggacgccccgcgcggtctcccttctctctttttggggccctcagcggtagccgcgcggtccaggccaccttacttcccgcgggagcgcgcaccgagtcacgagaactgccagcgaggaggcggcggatcaagaccccaaagcggagagcagaggcgcagggctgccggctggggggtagatagcgccctgtgccctgccagccgccctccccgagggggtaaggcagattgcaagcggcaccccgggggggctgcagcacattagccggcccggccgcgttacccggttcacacaagctcagtgaggaagggaaggcagagcccgcgcaacggccggcttcctagaggcgtaagaaacctcctactgcgggagctccctgacgtcggagaggcaggcggaactttgcggatgcctaatccagcgcgtcttctttttttggagggactctgatgaaggttctttccccagaagcttgacttggtacgcacaagtttacaccctgagtgtgatccaccatccaaagcctcgttggttccggagcagccccttttcctccccaagctgaacaagcccagaaggctaagcgacttcgggggtgtccctgagttgccgagctcagagaaaggacccaggtcttcgtgactcattgttccgtgtaccccattgtttcactgtgtacgttaaccgtaacagaaaatagcgatgtcggtcgcttgccttcactccccactgactgcagagccttggagtggtagtatcaaagtgggccttgcattatcgctccccttttcggagcactggctctggaggctttcagttctaagcaggccctcgagttcttcacgtcttaactctgtgaccccggacgagtttaagttgctaagccttgttttttctcatccgtaaaatagggctgcaagtattacatgacattatatatgtaaagtgattagtcacagggcctaaaatataaattactattgttaataccgataatcattatagatatttgtaatttatgagagatttgcagttatgctacatgagtttagggtcgaggattattttgtgggaaagaagagtttgcctaaagtcgtgtgattataatgcaactagtactagaatttctattttcttcaaaattggttgcagttttcaccctatgccacatattttcttctatctttggttaagactgatcaggtgaacaggaagtctcaaatttctgaatggattatgttctaaaaggttaccatgtgatgattaatgggaatagtcagaaaaaattatgaagtggcagttcgctttttaagcagattgaaaaaaggcctgtctactgcaagtattctagatttgcaataagtacggtaattaatagatacccaaataataaatatttatgaagtgtgctagacactgttaggcatagtacagagattcacaatattactataattatggaaaaagtaaatacactggttgagcaaaaacaggcttgagaagccaggagcgcacagagtagttgacccagtaccggatttggaatggggagtcctaggccataatcttggctctgccgttaactcgctgtgtgctgttgggtgggtggttacttcagttctttctcacagagccagtttcttcagctgtaaaatgaagcttttgaccttgaaacgatgatcctcaaggtccttctcagcactggtattccctgaaggcattggatgaataacggagattctaacagtctctgttaagacaggatgtcgaatgggggcatttttgggagtatgttggcctcttattgttggtttgtttctttagctgcaaatgtacttaggactcatgatttttctgtaactagagtgccacaaataaaatacgtttttcattcagttggataaacagggcaggaaagaagaaaacccgattttactaaggtaaatgggcaaaaactggaagaaaggggagtgtggttttggagagggtcccgatggtaagatcctgattggaaggtgtgttggttaaacaatttctgaactaaccgccagatggcatcactggccaggactgtttactacctgctagaaggggtagggcaaagtgaaacgaagccactctagggcgaatggggtaaggggaaagcaacgaataaattgccctttataaagatgatcacagattggatatttattactcagtgtgtctgtatgcagtactagggtggactaatgtctcacttcaaaaaaaatatgagtgtagtatacttggcctaaaattgttactcagtgttactaaagtgtaatcattttccacatctccaaatatattccaagtctctgaaatactagtgcattgggaggtagaacattttcgagcttcatgtctgtaaatggtttctctttactgtcattcagtaaaatcagaataaatgattgatgtaatacttaaaaaaaaattggtgttaaactttgtagaaagagtgagacaggatgattaggggaaagggtatcctgatgggaatcatcaggcctccttggtgccagccctgaccctgttagtatcttgctgtcacttcacctccctgcatctcattttttaaaaccatggaatgaggagattggaccagatgatcattttccagactgcttagttgaacacaagcatcccatggtatattattaggttttcgttaaaacagagggtttcatggtttaataaattagaacacttcccattttattacttttttgaagaagaatttgcctatttaagttctggaaaattcggatgtaacttctccaaaaactgaaccacagagtacttatttctcagaacatttgttaacatcttagtgacatcagggttatgatttctgcaacttccagaagcaactgtgctgtaacagttctaaactaatagtcaaaccacttaagttgtagtcctgactttaccgtcttggacaagtcactcgactgaattaaccagaggcatcccttaccttcagatgacatccggtagc

SEQ ID NO: 9811 - DNA, 2804 bp, Homo sapiens
  misc_feature 1, 2, 3, 2716, 2717, 2718, 2719, 2720, 2721, 2722, 2723,2724, 2725, 2726, 2727, 2728, 2729, 2730, 2731, 2732, 2733,2734, 2735, 2736, 2737, 2738, 2739, 2740, 2741, 2779, 2780,2781, 2782, 2783, 2784, 2785, 2786, 2787, 2788, 2789: n = A,T,C or G
  misc_feature 2790, 2791, 2792, 2793, 2794, 2795, 2796, 2797, 2798, 2799,2800, 2801, 2802, 2803, 2804: n = A,T,C or G
nnncgacccacgcgtccggctctttctatacttgtggtgtgagaattccattaaaattgaatcttactgatttttaatttgctgacttaatcttgaaacttaaatttaccagcatctgacagaccatctcaatggtttagagtctggatcatcatattagaccacctgtgatagttggtgtgaggtgtgtggtttttatatttttattagtaaattactttgtataacgaaataacattataaagttctcataaggaaatagaacttagattcctgtagttgtcatatttgtacatgtgtaaggcagctttctctcccaggctcatcagtggcatcttctgattgcaggtcggttagaccccgtttaaccatctatgtctgccgggagcagccaagcagcacagtgctgcaagggcagcagcaagctgcaagcagtgcaagcgagaatggcagtggggccaccctatgtttatcatgcaatctacttggaagaaatgattgcctcacaagttgctcgaaaacttgcgctggtgttaatatccctctccaccaaattaatcaggtttacagacagggtcccactggtattcacattcttgttagtgatcagatggttcagaattttcaagatgagagttgttttttattctccacagtaaaagctgaaagtagtgatggcatccacataattttgaagtgatgtcttatatagactgaactgtattcagtaccaaatagtcacgcttaaaagtgtgtgaagactgaatccaagaagtcttgggattggattttaccatatgaaatgtttcatattgaaaacacaagatgacctttctaatgagctgtatgagaggtgaatctcctcactgtcactgccatagccaagcatcctcatgagagtgagcacatcggcacagcatgcatccagctctggaggccacggtgcaggcatagctgcctgctgctctggcagaggccagtaaatacagttcctagaagcagcctttgctgtctttttacactgtatgcggtttggaaatgaatgtagaaacttactgtgggcatttacctttctgtgccagtttggcttttattgcctgaaccttatgctgacctggagaggagatgggggacagtgctgttgtggggccagcagtgaatctgtatgcggagagttgtgttgtgctgatgtggccgttggtggtcaggtaagaggctcggcaccttcttggaagaaatcatgtctgagggtgtacgtttgatatgatcatgccagattggagaagatccaagccaggaagatgggcttgaagcaaactgcattatcaggagtaccttggtgagaggatcagtgtaaatcctaataggtacaaagacttttgtgttttggctttgtcacagatttattgaaaaacttttttgcttctgcttccatttttagcattttagtttctggttttcatttttggagattccttgccttttaaactcgtggtttttctctcattttcttccctctctccctccatctctgaccacccccaccctaaccccccacccccaccatcctattaaacatttttaaagccctaccccagacattggaaataggtgacccaagtagggggagaaagtattattgttgatagcttctgactaggtgttaagggatcttcattatgaacaagatgaatttttttctggaaacactagatgttatcaatcaaacactaaaatgtaccatacaaatcccttaagcctctcaaatattgagctttagtacaatcatggatagacattctggtgatgatttaggggctttttatacaccacatactagcttctttctctataagagtgcctctttcataaaaccaaatgcttgtctgctagcatacttttcaaagggaatccactgttttctcactttcctcccatatctccgtccttcatccaaaaccttcccagaatccatcagcaagcatgtttgaggcctgtggtgtaggggactgaattttttttttaacttctattccattttaattgtaggatatctttgtccatatacccaggtgtcctgatttgaatgtactatttgatcctcattgtgttcaggcaaaaaataggaaatgagtaattttgagtttgaaatctctcccagaagacaaactacttcagtgagtaaaagctttgacattttatgttttattcataaagggggttaattatttgctacaaagaagcacgatctattttcatcatcgatttgaaaatatctgtaactcctatagatcctataggcagagagttttcctttctgactttttccctttgctttcgtgtgaccacatgttttctgtaccagtcactggggaaagaagtgagtttatctcgtttgttttaaaagttttgcttgtctatttagcattcctttttgggtctcaagatttatggaacaataaatgtcatttaatgctgtgtgcttattttgaattcctcatcaggttttagaagcggggtaaaaatacttagatgcttatcagacttgaaattatactgagtggcattgaacgtgagtttgtcccagtgaaacaggctaaataaattttggcaccagcaaatttgttactttgtttttttaatagtaggatgtacacatttcagtataataaatgttttctgattgttttgcaaaaaaaacaataaatattcaaannnnnnnnnnnnnnnnnnnnnnnnnncaccccccaaaccaaaaaaataaaaagcgggccataannnnnnnnnnnnnnnnnnnnnnnnnn

SEQ ID NO: 9812 - DNA, 1649 bp, Homo sapiens
  misc_feature 1, 2, 3, 4, 5, 6, 7, 8, 9, 10, 1638, 1639, 1640, 1641, 1642,1643, 1644, 1645, 1646, 1647, 1648, 1649: n = A,T,C or G
nnnnnnnnnncggaaaatccaccgtagaacacccccccttggcgcttttttttttttattgtttgttttgttttttctctctaaactaagtggcaccttgccagtagtccacttttaccaggatataggcgttctttatggcactggcaccacgactcttgcatgatacggaccgagatcgaaacccttacgctgacgccagttcggacaacaattctgtgtcccccatgataaactaggagccatttacacactgtaataaacaatgacattaatgtatatgtaaaactttacacctagttaactaagcagtaactggtcatctgatagcacctggatggggtttgctatatttagaactaaactaatactgaatgaaaacaaattggaattttaacagtttcaacactcacctgcatataataaaataaaaaatcaacctggctcacaacatagtctgatgtatgtgttttcaccagtcttctggctgaaacaggcaatttcttttacgcatccgaagaatccaataggggctttatatcagaccaaggacttcgtatttcaccttattttgttttaaagaaatagggataaagagtttgcaagtgcttgtgtacaataactacatcatttcccaccacactgatcattaatcatgtcagtctcaaaggactaacgttttatgtacattttgtattaactgaactcagctaaacagtaaaacctgttttacttaatctctgtcttgactaccagactatcatgatgtttgttggaactgtaattcctgctctccatttctctctgtcccccaagttgaaaatataacccaaatctttagaatttttgcctctcattccttgcaactccagtgggctagaatcttgatccagttttctccagactagatttcaagctactctgcatgatgtagaacatgtaaccatgtaacctcatcagctaccttttcccttttgacttttcctgttgcacacagttcagtctgactatccatgaatcttctttgggagaaagaaaaatggcccaatgtataatgtttctgaatggggaagggagaaaaaaaaaaaatcactgttctttgtagctctaaccatgaaagtaaaagcaacaaaaatatcccccagtgaatccctagaatcatttaataatgtaaccggtatctctttatcctgcaggtgtacacttaaagcgttctgggaatatgaatcccttctgcaccctggaatcaccagtccagccatgcatggagctggggaaagcaggccctgaattgtctagagagacttggtggaggaggccacggcccgccttgtccctgccgggtcccggccaggtgtgtgtgtgccccagctcgactctcggtggtctccaggctgcagcagaaggaataccttggtatttgtttcattttagtgtccatccttaccctcctggtctggtagagcctatggttattcttggattccacatacatgaaaagcgaagatttttctttgtttttatgcttaagctaacttcagttctgctttcccacaaaactacccccaccctggctcctgtccctggctgtcaatgcctttccaataggaagtcacgagagtgagaaaaaaatttcannnnnnnnnnnn

SEQ ID NO: 9813 - DNA, 4124 bp, Homo sapiens
tcgacccacgcgtccgtactctctggagtcgattgccccgagacacatgggccaaggaggggtcagcggcgaattctttcggcctgttggggacccctcgtgtccccacgccagactggacctcccgtatgaacttctcttcgcatcggcggcggcttccgtcacctccgctcccccgatcctattcccagtcgtatgccagcttggagagtcacgtgagagcaagagagtagctttctggttgtcctggtgccctgctcaggcaaactgactgccattctctgaggatggcagctctgtcccccacatttgccacgtccacccaggattccacctgtctccatgactcagaatttcctgtttcttcaaaagaccattcctgtccccagaatttggacctgttcgtgtgcagtggtctggagcctcacacacccagtgttggttcccaggaatcggtgactttccaagatgtcgctgtggactttaccgagaaggagtggcccttgctggattcttctcagagaaaactgtacaaagatgtaatgctggagaactacagcaacctcacttcactggggtatcaggtcggcaaacccagcctcatctcacacttggagcaggaggaggagccgaggacagaggagaggggcgctcaccagggcgcttgtgcagattgggagactccatctaaaaccaagtggtcacttcttatggaagatatttttgggaaggaaacgcccagtggtgtgacgatggaaagagccggtcttggagagaagtccactgaatacgctcacttgttcgaagtctttggcatggaccctcatctcactcagccaatgggaaggcacgctggcaagaggccctatcaccgccgcgactatggggtagcgttcaagggcaggccgcacctcactcagcacatgagcatgtacgacgggagaaaaatgcatgaatgtcatcagtgccaaaaagccttcaccacgagcgcgtccctcacacggcacaggagaatccacaccggggagaagccttacgagtgcagcgactgcgggaaagccttcaacgacccttcagcccttaggagccacgcaagaactcacctcaaagagaagccctttgactgcagtcagtgtggaaatgcattccggaccctctcggccctgaaaatccacatgcgagttcacactggcgagaggccttacaagtgtgatcagtgcgggaaggcttacggccggagctgccacctcatcgcacacaagagaacgcacaccggagagaggccctacgagtgtcacgactgtgggaaagctttccagcacccctcccacctcaaagagcacgtgaggaatcacacgggggagaagccctacgcgtgcacgcagtgcggcaaagccttccgctggaagtccaactttaatttgcacaagaagaaccacatggtggagaagacctacgaatgtaaagaatgcgggaaatcctttggcgatctcgtgtcccggaggaaacacatgaggattcacatcgtcaagaaacccgtggaatgtcggcagtgcgggaagaccttccgaaaccagtccatccttaagactcacatgaactctcacactggagagaaaccatacgggtgcgatctctgcgggaaagctttcagcgcgagttcaaacctcaccgcacacaggaagatacacacgcaagagagacgctacgaatgcgccgcctgcgggaaagtcttcggtgactatttatcccggcggaggcacatgagcgttcaccttgtaaagaaacgagttgagtgtaggcagtgtggcaaggccttcaggaaccagtcaacgctgaagacgcacatgcgaagccacacgggggagaaaccgtacgaatgcgatcactgtgggaaggccttcagcataggctccaacctgaatgtgcacaggcggatccacaccggggagaagccctacgaatgccttgtctgcgggaaagccttcagcgaccactcatccctcaggagccacgtgaaaactcaccggggagagaagctctttgtgtcatccgtgtggaaaaggctccagtgagcgcgcctgctttagagacacaggatgattcagaccggaaacagacctcgtgggtgtaagaggaagcctctgtgagctcgcaccttactgggtgcaaaagaatccacggaacttgggagaagtccagttcctgtaaaaactgggaagacgaggcgttctcatcccataggaggtttgtgagaactcacgccgggggtgaaaatgtacgtctgtagcatggagaagccttcagggtacattcagctcttaacaaacacaggaggacttaatggcagcttggcatttaatgtcaaaatccaagccgtggcatttaatgtcaaaatgacttcagaccacttctagccttctgggcccatgagtaataatgagcacactagggagcatctctgtaaacacagtggctggggaaacccttcctagtctcacttgattcctcatgacggaaatcacactaaagagagaaatcagtgaagtaaggaacgtggaaggtcatgaatgggccgcaaaccacggccagctgcttgtctttgtatggcttgccagctaacaatagtggttccatctttaaggaagaagaatgtttgatggagaaaatttgtggccaatgaagtctgaaatacttcctgtcatctgcccctttccagaaaaacttggccgacccttggtctacagcacgggttctcagtcgggcgacgatttggctgtctaggcgtcatttggcaatgtctagagacatttttggtagttagaatggggggaagatactcctgacttgtaataagaagacatcagagatgctgctaagtcggctccagcacacaggagccccccacaacgaagagttagtgcccccaaacgtcactgttgctgaggttgaaaataatcatgcagtcattcctcaattactgcctgcagcaattcctccatttttatgaatcttgtgagcacttacgctaggagaaatttcttttacaaaacttttaaaatacaattagtgctgataattcctatgtggaaatgattccagccatggtcccctcacttgagcatgtgaatattctcacggagagaagccccagcgagattttccggtgaatacgggattgcacttactctttcatcacggaaacagaccccccgagagaagccccaacgagattttccggtgaatacgggactgcacgtactctctcatcatgaaaacagagccccgttcataaaaatttttcatctttatttttaaggttatactcctctaaataacccttaagcctcatcaagaaaggtttgtttatagtatttttactatagcttcatccttgataacgtcctaatttccttctggacaacctccttgaccaatggcatattgagatctatgtgacatgaggatatttctcagtaccactttgttactggtacctgatgcacacggattgcgaccagagcatgatgcctccatcaagtggtaatatgtttgcagcctgctgtccagccaagagtgacagatacttctagtgacttccccggtatccactctcatcttcttccaatatcaagagaatccaggttctgtcagattagtaaggtgtgctaatctaaattttaaaaaatctcttacaggttttcttgcagctggtaccatccatgtctcacagccctggccactgacagatcagcagatgtcaccacatgggcttctgagaaagctcttgaatggggatcgttcttaaacatgaattcctccctgtatgttttgttctttgctttacttttcaccttgcaaagagatccagtacctagtattggaagatccaccttaacgaccgtgcatatgaaaaccacagtctaaggaagtgactgcagaaagctcacagcgaccctggcctcccctgtgggcctctttgagtgtctgcagcagccctggacttccagacttctatcacatgagaaaaaataaaactgattattggtttaagctgctatggatatttcattgtgtctatcttttaaatttatttattgtaagatagggtaccgacaggggaa

SEQ ID NO: 9814 - DNA, 1314 bp, Homo sapiens
  misc_feature 1, 2, 3, 4, 5, 6, 7, 8, 921, 1311, 1312, 1313, 1314: n = A,T,C or G
nnnnnnnnaactaaattatttattgggtccagtaacgtattccataaatattgtacacataaaaattgtgttatttttattcctgtatgctcagctgcccaataacagtctgaggattaacatatttgttaaatgcacaaatacattctttcacaaatattagtttaataattttatattaaactccctctatacttacaatatgaattagataattcagaataaacattccattggaaaaagctacacaatttgttataaaacatccttaaaagcatcagaaaattaatacagcaatgaagaattacaggaccaaattaagaatggtatgaaagcctgtttgtgacgcttatgtttgggttatctctttatttgagtgactataaatctcaaaagagaactaaagggagaaataaccgtatctactaacatgctaagggtacttaaacatctcttagtaattgagaaaattgaaagaaaagaaaaaagagaaagggagaaagagagacagcgaaagggataatgaaggagagaaagaagaagagaaaggaagaggaagaaaagtaaaaaggaggaggagggggaaggaagaaggaagaaaggtgaaaagaaagaatggtaaactttttaacaacataatttatccttctagaatatgaatgttggtctatttgatgatgtcccacaaattcattagtctctgctcattgtttattttttattctttctgtttctcagagacagtattttccattttcttctcttcaagttcatggcttcctctgtgtgtgcaaatatactcttaaatccctctggtgatttttaaatttttatcattgtagttttccactccagaatttgttatctctttgctgatattcctactttttaatattttttctgattcctttatttctttgnttatgttttccttttgacatttgagtataatgaagagagttgtttcaaagtctttgtctggtaagtttgatgtctgggtttccttagggattttttctgtcactttattttgttcctttgaatgagccacactttcccattctttgtatgccttgtaacgttttttgaaaactggacattctaataattataattactatgtggttactctgtaaatcagacctccccctacaaacacagtaatgttttgtggttttaaattttctttacttattatattggtaaggatttttttttttagtgaaattttccaaagtgatttacaaaactgtttggtcccgcgttaattaattctagaagtactcttgagggggggcccgggacccaacnnnn

SEQ ID NO: 9815 - DNA, 2514 bp, Homo sapiens
  misc_feature 1, 2, 3, 4, 5, 6, 2508, 2509, 2510, 2511, 2512, 2513, 2514: n = A,T,C or G
nnnnnnccggacgcttccggtggaagggaggcgtccgggggcttgctgggatcatggcggagaatcactgcgagctcctgtcgccggcccggggcggcatcggggcggggctggggggcggcctgtgccgccgctgcagcgctgggctcggcgccctggcccagcgccctggcagcgtgtccaagtgggtccgactcaacgtcggcggcacctacttcctcaccactcggcagaccctgtgccgggacccgaaatccttcctgtaccgcttatgccaggccgatcccgacctggactcagacaaggatgaaacaggcgcctatttaatcgacagagaccccacctactttgggcctgtgctgaactacctgagacacggcaagctggtgattaacaaagacctcgcggaggaaggagtgttggaggaagcagaattttacaatatcacctcattaataaaacttgtaaaggacaaaattagagaacgagacagcaaaacatcgcaggtgcctgtgaagcatgtgtaccgtgtgctgcagtgccaggaggaggagctcacgcagatggtgtccaccatgtccgacggctggaagttcgagcagttggtcagcatcggctcctcttacaactatgggaacgaagaccaagccgagttcctctgtgtggtgtccaaggagctgcacaacaccccgtacggtacggccagcgagcccagcgagaaggccaagattttgcaagaacgaggctcaaggatgtgagggacacagtattgacagctgaagaaatgatttacgttttcccgagatgtaatgaactgccatgtccaggaagcttggctgtgagaagaaacctgcttttgatcatttttctagagatctgggtgtgaatccttttttgcctctgaggtgggtggtgagagacgggcccagctgtccaaggccagacgtccccaagttgggggagcacggcggccgggtgggcgctgcctcttgggggggcctcgctctgttttttccaagtgccacgtgggactgaggcagacactcccagtcagcccgctcgatcctgaagatcgtgtgaaggaagcgttcttggtgctacacacagtctggaaaagcagcctgggcttcactggcaggaagcggccgcagccgcgtcagtgtccagcacgtcgtggcctctggtccgaccaccaggccctagtctcggtcagggagtctgctctgcctcccaggcgggatcgctggtttctctcgacctcgcagagctcctgacaaaggcggcttctgcgtcgtcactgcttcccggcgccattccgaggccgggccttcttctgacacgggctccaaccccacctgaccaagcccgggacagtcaaggcttctcaatttgtattttccaggcaagagaactttgtaccccttctctgtgtggatagactccccagcgtttttcctctggaaatgcccacagggcttgccgcgtggagactgatctgttccatccgttagcgcgaggtagcagtgtcgcctcgcccctcccactgcgggctcacggggagctggcgtctgtcagtgccttgtcacgcctggcatagaggttgggctggaggcctgtccactggcttctggagctgaaggtctgcgtcacggtgaaaattcgggatgtttacagagcatcacaaatgcctctctctcgccgctctctcattttctttgtataactatgcagccttccctctctttctgggatgtttgggacttcactcgacctgcacgggctctgcccgacatgccgtgggagctgctgggattcctttagaaaccgctgcccgcatgctttgaaaacagacctttctcagctggctgtggggacctgtcagagtctggggactcggcgtgcagggcgggctccaagcgctttgcttccggaactccggcttcccaaggggtactgtgcagactgaccaccggcctcccgcctgcaggtcagaggctctgacactgtctggtttccaatgcttctggagacttcctgcctaggcctcatcctcctctttgccagtcacctgattaaccaattctccagcattaggacttacctccttctttttgtaaggtctcttgtatgttgttaaatgtttggcttaaacaatttataaaagcctttctagaaggcagacttagccccagcagagcctgggaggaaggcggccgctggggctcctgggcatcctctctggggagctgctggccgcttagcgttgtttgatttttgaccttgacatagtagataggcttgtggtttttttaatttaaagatattaagacttaattcactaaaatttattctaaggggatatttatacttttatacttttttaggtatcgtattttatcagcttacagtttaatgcctaagtttcccctggaaatagcaaataaaattgtgtatttatgcaaaaaaaaaaaaaacaacggccgctctagatctagtggatactgcgannnnnnn

SEQ ID NO: 9816 - DNA, 1716 bp, Homo sapiens
  misc_feature 1, 2, 1716: n = A,T,C or G
nnaggtgaattcctggaaaaggcgcaaaattctgggcgaaggtgaacgtgcgcatatagctaaaggtctggaacagagccagttgaacacaagtgatgagattatcgcgtcggatataaaaagcatatgccgtgttgaaattttaaacatgccaagcaggcagaatgcacttttgtgtaaaggaattggatgttaccaaacactagaatgtcatgggttcaaaaaatatcctacacaactggcatacattttggttgatcttagtctgtgatacattaacagttcatgtaattatacctgatcatttgggataatgaaatgaagttagttgtagatgaagtaaagttataaaagagattaaaaatgcggtaactttttaagataataatcatacagaaggtatgaagttcattttcggtagtcttccaacctctcaggtgcctaataatttatgtttgaggataacaggtaacaaagatagtcgagataggagaacgtgtctattagtctttgcatctaaaaggcagtgagttacgttcctgccttccactgtgtttctgacatagcaatgtttgtttgatattggaacctggattcatattttatgtaaataatatcaagctgtatatttttcaaaggttttttaaactttggagactctttcttttgttaagcagttaaaggaataaaagagctggaaaaaaaattgtaccttcaactcaggttattccatataacatacgtattctctgctgttacgtaagttttccgattcacagagtccattcatgtacatcacttacacttaaattgtaaaaataattagtctgaccatctgactttaaaagactgttgctacacgtacatcatgtttaggagaatgtgggatatggggaaggggagaagaagacagtccagtggtgactagttgctgctgcttaacctatggcctattgctgcccattgtccctggttttaatccaagcctattatggaatactgcagtgagattatccattctcagcctgttgagctgcattaaattagaatgggaggctgtaagtaaaactcatgcctcttggccaggcattctgcaccagcgtgtccctctgtggcttgctggtcctggttgttctcagactggcagctgagctgcgcttggcttgaagcatactgaagcctgcagccagggacaccgccattgaatcagatggagggggatgaaaaagcagagaagggggcatgtggctggctattcttgctctctggagaacagcttcattgttaggagtagttaggctgaaagtggacttcccactgctgagccacccaagaggcacactgagcattagtgacgggtgagccacataagaataatgtttaaaaaagagaggacttgaagtagctatgcgaaaatttagaactttgcactttgttaacgcttatttatggtttagtgttgatgccatttggagtgacctatgggttggacccatgtctttttattattaaggtctcaatctggctctggttaataaacgtttcccgcttcatcccttaggaaaatggtccaagtctcctcaggcttttggatactgaattgttataaaacacatcaattctgccagtttataaaacactggaattgtattagacatgtctgagtatgtacctcggccgcccccccggtggaagctccaattcgccctatagtan

SEQ ID NO: 9817 - DNA, 365 bp, Homo sapiens
actgtccttacaacagtttggactgaatattcttgtttccattcacaaacatttctttctgaactagcaacagcactaatcaatagctacacttaagccatttaagactaagctttagatgtgtgtctaattatctggcaaaaataaaagaaccaaagagtttcatgttagcagcaaattaactagatttaagggtcttgatttttttcataagcctttggaagcctgcatattaaacactggtgagttttaaattctcaatggaaatggtgatggcatttactgaaccaagccagctcatattacaacgtttttttttttttttttcgtggttctgagtgcagtctttataaagcccagtgctg

SEQ ID NO: 9818 - DNA, 2829 bp, Homo sapiens
  misc_feature 1, 2825, 2826, 2827, 2828, 2829: n = A,T,C or G
naaggccgatgctgtgggggtgggcgtggagagaattcttctgtgggtcctctggtgttgagtggtcggcttggtgtggtgtgcggaggagctccaggcccgtcggcgcggagggtcttgctgtgttgcccagcctggtcttgaattcctggactcaagtgatgctcctgccttggcttcccaaactcctggaattacaacttggtctcacgtgtgaaacatggctacagattggctgggaagtattgtgtccatcaattgtggagatagcttgggtgtctatcagggaagagtgtcagctgtggatcaggtcagccagaccatttctctcacccggcctttccataatggagtgaagtgtcttgttccagaagtcaccttcagggcaggtgacattacggagttaaaaattctggagataccaggacctggagacaaccaacattttggagaccttcatcaaacagaattaggcccctctggtgctggctgccaagtgggcatcaatcagaatggcacaggcaagtttgtcaagaagccagcctcttccagcagtgcccctcagaatatccctaagaggacagatgtgaagagccaggatgttgccgtttccccgcagcagcaacagtgctcaaagagctatgtcgacaggcacatggaatccttgagtcagtccaaaagtttccgtcgtcggcacaactcctggtcatctagtagcaggcacccaaatcaggcaactcccaagaaaagtggtttaaagaatggccagatgaagaataaagatgacgagtgcttcggggatgatattgaggagatcccagacacagattttgattttgaagggaacctggctctttttgacaaggcagctgtgtttgaggagattgatacctatgaaaggagaagtggtacccgttcccggggcatcccaaatgaaaggcccactcggtaccgccatgatgagaacatcttggagtccgagcccattgtctatcgacggatcatagtgccccacaacgtgagcaaggagttctgcacggactctggcctggttgtcccaagtatttcctatgagctgcataaaaagctgttgtccgtggctgagaagcatgggctgacccttgagcggagactggagatgacaggtgtgtgtgccagtcagatggcactgaccctcctcggaggacctaacaggttgaatcccaaaaatgttcaccagaggcctacagtggctctactgtgtggacctcatgtgaagggggctcagggtatcagctgtggaaggcacctagccaaccatgatgtccaggtcatccttttcctgcccaattttgtcaagatgttggaatctatcaccaatgagctgtcgctcttcagcaagacccaaggccaacaagtgtctagcctcaaagatctgcccactagccctgtggacctggtcatcaactgcctggattgccctgagaacgtcttcctgcgcgatcaaccctggtacaaggcagctgtggcctgggccaaccagaaccgggcaccagtactcagcatagaccctcctgtgcatgaagtcgaacagggcattgatgccaaatggtcactggcactgggcctgcctctgccactgggggagcacgcaggccgtatctatttgtgcgacattggcattccccagcaggtcttccaggaggtgggcatcaactaccactcgccctttggctgcaagtttgttatcccactgcactctgcttagagggttcctgcgcaggcaggactctgctgtcccctgctgctcctgataacaaacgccttaaggatatgaagcttcatggaccttgttaaagttttttctcttttgggtttgtttcttctgtgagagaacagaacttacttaaaactgacctgtcacttgctcttagccagggaagtctttcccactgggttccgggctgggtggcaggctgagcgtgcagcaactccaggcatctctaccctcagccccctgcacggccaggtgggcctttgtttacagccgtaggcagctctcaagactgtgtttcaggtttacagccactgggcctgggcacacacattgaagagtgggccaggtcctgtctgggggcctgtacctgctctatttcagagcttgtggctttgtgtctcccctgctttccccacgcagacagcccttcctctgtagaaccagctgcacggcagctgtccaccagagggcagacctgcactctccattcatgtccagggctgtgacagaccaggccttcccctagccccacaagttgatttggggggttttgacccttactcctgagctgatccaagttttatgctgatttttccaaggatctctccctccttttccctccatcactcagaggtagggaagggggcggcattaggatggtgttactgtattgggattttatgttgttctgtcgtcttcagcacaggtagtataaggttatattactgtagaaccacagtgcccatcttgccagcagtgcccgcccccaccctcaaagctgagcaggttgagcctttgcctagtctggggccagacctcagatggggttatccttgagggagctggtgctgaacagagagctctggaggttgactaggcacatctcagccttggcgattcttgcccactaatttcaccctgctacggaaggacttagggatacaacaagaattgtccgggaacaccacagtaacatggcagtaccagcacaataagatagaactcaacgaaaataatgagaggagacacaaaacaaggcgagacataacattacttccacctgtggtcnnnnn

SEQ ID NO: 9819 - DNA, 1000 bp, Homo sapiens
  misc_feature 1, 2, 997, 998, 999, 1000: n = A,T,C or G
nngaatgtgcttgactggcgcgttccagtcccagggtttgctggggagccctcttcagatatgtactgccagcaatcccgtgtgttgggggaacaggtcccttccttgaaaggtttttggaagctaccggacaatctttcagaatgctactttaggtgaaccgcgcggcttaaacaggcatgccacacattgctgttccccatctggtactaatgaccctactagcctgggttatttgaaagtgtaattcccctctgacacaatatccctcacatacaagatgggatgtaccactcccgagaatattcccatctgtattttgtgctgatgttcctgcatccagttgttctcggtcatacttttgaccacttgtgactggagttcagtggccctggcaggcttgtcctgctcttgaccattccactgactaactttggtgttttgtttccaagttaagtgattcctccttttttttgttcaatgttaaatttaaaaataacaatgtgtatgggtcctcccatgtgtaatatggtaacatgtaacttgcagtgtttgccagctttcaaagcaggctttgtgaaaatgtaatacaaacagcagtgaatgggactcaaatgttgtgcttcctataaacagctccgctctttcagggaaggatggtaacaaactagaaggacaaatatgtacgtatttataacgtattaaaactcttttaagtagcttaaggtattgtgcaatggcctagcctagtagaaatgggggaaaagcattgctgtggaccattgttaaagtgacaggagttgtagggttacccctttgacaagcttccatagtcttcagacacgcacattgatggcatccctacagtcttcttcacttgaactttgtaaaactgcatatggacctgtaatcaacttttgatatttcttaataaaggcgttgaaaatcaaaaaaaaaaaaaaaaaaaaaattgtttctggccgggggggcctttaannnn

SEQ ID NO: 9820 - DNA, 4859 bp, Homo sapiens
acaaccttgacctaaccaatctcaaccagccactgctggatgtggaccacacatcttcaagacttaatcttttgacacctcgacatttgaatcagaaggggaaagcgcttcctttaagcagtgctgagaagaggaaagccaaatgggaaagtctgcagaataaacagatactggttccagaactctgtgctatacatccaattccagcatcactgtggagaaaagctgtttgtctccccagcatactttatcgccttcactgccttttgactgcagaggagctaagagcccagactgccagcgatgctggcgtgggagtcagatcacttcctgcggattttagataccctaacttagacttcgggtggaaaaaatctattgacagcaaatctttcatctcaatttctaactcctcttcagctgaaaatgataattactgtaagcacagcacaattgtccctgaaaatgctgcacatcaaggtgctaatagaacctcctctctagaaaatcatgaccaaatgtctgtgaactgcagaacgttgctcagcgagtcccctggtaagctccacgttgaagtttcagcagatcttacagcaattaatggtctttgcttacaatcaaaatctcgccaatggcagttatgatttagctaacagagacttttgccaaggaaatcagctaaattactacaagcaggaaatacccgtgcaaccaactacctcatattccattcagaatttatacagttacgagaaccagccccagcccagcgatgaatgtactctcctgagtaataaataccttgatggaaatgctaacaaatctacctcagatggaagtcctgtgatggccgtaatgcctggtacgacagacactattcaagtgctcaagggcaggatggattctgagcagagcccttctattgggtactcctcaaggactcttggccccaatcctggacttattcttcaggctttgactctgtcaaacgctagtgatggatttaacctggagcggcttgaaatgcttggcgactcctttttaaagcatgccatcaccacatatctattttgcacttaccctgatgcgcatgagggccgcctttcatatatgagaagcaaaaaggtcagcaactgtaatctgtatcgccttggaaaaaagaagggactacccagccgcatggtggtgtcaatatttgatccccctgtgaattggcttcctcctggttatgtagtaaatcaagacaaaagcaacacagataaatgggaaaaagatgaaatgacaaaagactgcatgctggcgaatggcaaactggatgaggattacgaggaggaggatgaggaggaggagagcctgatgtggagggctccgaaggaagaggctgactatgaagatgatttcctggagtatgatcaggaacatatcagatttatagataatatgttaatggggtcaggagcttttgtaaagaaaatctctctttctcctttttcaaccactgattctgcatatgaatggaaaatgcccaaaaaatcctccttaggtagtatgccattttcatcagattttgaggattttgactacagctcttgggatgcaatgtgctatctggatcctagcaaagctgttgaagaagatgactttgtggtggggttctggaatccatcagaagaaaactgtggtgttgacacgggaaagcagtccatttcttacgacttgcacactgagcagtgtattgctgacaaaagcatagcggactgtgtggaagccctgctgggctgctatttaaccagctgtggggagagggctgctcagcttttcctctgttcactggggctgaaggtgctcccggtaattaaaaggactgatcgggaaaaggccctgtgccctactcgggagaatttcaacagccaacaaaagaacctttcagtgagctgtgctgctgcttctgtggccagttcacgctcttctgtattgaaagactcggaatatggttgtttgaagattccaccaagatgtatgtttgatcatccagatgcagataaaacactgaatcaccttatatcggggtttgaaaattttgaaaagaaaatcaactacagattcaagaataaggcttaccttctccaggcttttacacatgcctcctaccactacaatactatcactgattgttaccagcgcttagaattcctgggagatgcgattttggactacctcataaccaagcacctttatgaagacccgcggcagcactccccgggggtcctgacagacctgcggtctgccctggtcaacaacaccatctttgcatcgctggctgtaaagtacgactaccacaagtacttcaaagctgtctctcctgagctcttccatgtcattgatgactttgtgcagtttcagcttgagaagaatgaaatgcaaggaatggattctgagcttaggagatctgaggaggatgaagagaaagaagaggatattgaagttccaaaggccatgggggatatttttgagtcgcttgctggtgccatttacatggatagtgggatgtcactggagacagtctggcaggtgtactatcccatgatgcggccactaatagaaaagttttctgcaaatgtaccccgttcccctgtgcgagaattgcttgaaatggaaccagaaactgccaaatttagcccggctgagagaacttacgacgggaaggtcagagtcactgtggaagtagtaggaaaggggaaatttaaaggtgttggtcgaagttacaggattgccaaatctgcagcagcaagaagagccctccgaagcctcaaagctaatcaacctcaggttcccaatagctgaaaccgctttttaaaattcaaaacaagaaacaaaacaaaaaaaattaaggggaaaattatttaaatcggaaaggaagacttaaagttgatagtgagtggaatgaattgaaggcagaatttaaagtttggttgataacaggatagataacagaataaaacatttaacatatgtataaaattttggaactaattgtagttttagttttttgcgcaaacacaatcttatcttctttcctcacttctgctttgtttaaatcacaagagtgctttaatgatgacatttagcaagtgctcaaaataattgacaggttttgtttttttttttttgagtttatgtcagctttgcttagtgttagaaggccatggagcttaaacctccagcagtccctaggatgatgtagattcttctccatctctccgtgtgtgcagtagtgccagtcctgcagtagttgataagctgaatagaaagataaggttttcgagaggagaagtgcgccaatgttgtcttttctttccacgttatactgtgtaaggtgatgttcccggtcgctgttgcacctgatagtaagggacagatttttaatgaacattggctggcatgttggtgaatcacattttagttttctgatgccacatagtcttgcataaaaaagggttcttgccttaaaagtgaaaccttcatggatagtctttaatctctgatctttttggaacaaactgttttacattcctttcattttattatgcattagacgttgagacagcgtgatacttacaactcactagtatagttgtaacttattacaggatcatactaaaatttctgtcatatgtatactgaagacattttaaaaaccagaatatgtagtctacggatattttttatcataaaaatgatctttggctaaacaccccattttactaaagtcctcctgccaggtagttcccactgatggaaatgtttatggcaaataattttgccttctaggctgttgctctaacaaaataaaccttagacatatcacacctaaaatatgctgcagattttataattgattggttacttatttaagaagcaaaacacagcacctttacccttagtctcctcacataaatttcttactatacttttcataatgttgcatgcatatttcacctaccaaagctgtgctgttaatgccgtgaaagtttaacgtttgcgataaactgccgtaattttgatacatctgtgatttaggtcattaatttagataaactagctcattatttccatctttggaaaaggaaaaaaaaaaacttctttaggcatttgcctaagtttctttaattagacttgtaggcactcttcacttaaatacctcagttcttcttttcttttgcatgcatttttcccctgtttggtgctatgtttatgtattatgcttgaaattttaattttttttttttttgcactgtaactataatacctcttaatttacctttttaaaagctgtgggtcagtcttgcactcccatcaacataccagtagaggtttgctgcaatttgccccgttaattatgcttgaagtttaagaaagctgagcagaggtgtctcatatttcccagcacatgattctgaacttgatgcttcatggaatgctgcatttatatgtaagtgacatttgaatactgtccttcctgctttatctgcatcatccacccacagagaaatgcctctgtgcgagtgcaccgacagaaaactgtcagctctgctttctaaggaaccctgagtgaggggggtattaagcttctccagtgttttttgttgtctccaatcttaaacttaaattgagatctaaattattaaacgagtttttgagcaaattaagtgacttgttttaaaaatatttaatttcgatttggaaccttaaatgtctatttgattttttaaaaaaccttaatggtagaaatgacccgtttaaacaaagcaattcttggattatataactggaaaagtgtgcagttaacaagggcggga

SEQ ID NO: 9821 - DNA, 637 bp, Homo sapiens
  misc_feature 636, 637: n = A,T,C or G
ctactgggaagtataggcagatctctccctcatataacggatgtttcttggcgcttggaatatcagataaagaccaatcaacttcataggatgtacctgcccgggcggccgaggtaccagactcttatttcctgcagcttttgagaattctaaagatacctgagtcattttaaataaatttcagctttctttaccaaactacccttaaccggattctccttgaaatgacatcacctgacacccatggcatgctgcatgcccacagctagattactttttagtgcgcccacgcacttctgcttttattaggtgaggcagaatcaagattcccttttgttggatcttgaacctgttcatgccactttgatattctaaattcatacataaaccaatgaaatatatgtgttagaaaaattgctatttctagctggacgcagtggctcatgactataatcctaccactttggcaggccgaggcaggaggattgtttgaggccaagagtttgagaccagcctgggcaacatagtgagaccctgtttctacaaaaaataataatacaaaaaattagtggctgggcacagtggctcacacctgtaatcccagcactttgagaggctgaggcgggtggatcaacnn

SEQ ID NO: 9822 - DNA, 1102 bp, Homo sapiens
ggctgcaggaattcgcggcgtccggagactaacccagaaacatccaattctcaaactgaagctcgcactctcgcctccagcatgaaagtctctgccgcccttctgtgcctgctgctcatagcagccaccttcattccccaagggctcgctcagccagatgcaatcaatgccccagtcacctgctgttataacttcaccaataggaagatctcagtgcagaggctcgcgagctatagaagaatcaccagcagcaagtgtcccaaagaagctgtgatcttcaagaccattgtggccaaggagatctgtgctgaccccaagcagaagtgggttcaggattccatggaccacctggacaagcaaacccaaactccgaagacttgaacactcactccacaacccaagaatctgcagctaacttattttcccctagctttccccagacaccctgttttattttattataatgaattttgtttgttgatgtgaaacattatgccttaagtaatgttaattcttatttaagttattgatgttttaagtttatctttcatggtactagtgttttttagatacagagacttggggaaattgcttttcctcttgaaccacagttctacccctgggatgttttgagggtctttgcaagaatcattaatacaaagaattttttttaacattccaatgcattgctaaaatattattgtggaaatgaatattttgtaactattacaccaaataaatatatttttacctgcccgggcggccgcccgggcaggtacataatacatgattgaatacatgatcgtatttaacatgttttttttttctgcagtggacaaataaacatcctcaaagtagcaactgcaaatcagttacccttagaaaagcaagaccaaacactgtagttacactattagcagtgaccaaaaagggctaatattttctaagaatagtttaaattacagacatttggtatatttaccttatgtgaaatacatcactatttaattacattaattttaacatctgttgtgtggagttgtatagttcatgcaaaagcctgtgggtatgggtttttcaaaccagcagaaaggtcaaaggt

SEQ ID NO: 9823 - DNA, 1716 bp, Homo sapiens
  misc_feature 1706, 1716: n = A,T,C or G
ttttttttttttttttacatttggaaaatatactttattcaataatataaacaatgtagatatatttgattatttaataatcattttaagtttattgcacagatgcacatgtcaataattagtgtttttcagatgggatgatatacattctgcttttatttttatctctttggtaacaattattgacagaacaatgaaacaaagataaattgttttacagttgtaatacccttgtatggtaattctcagcctcttttatcttatattctactagcacttacatctaataggtctcaataaagtagaaatgtaaaagtatgtattttcagaaaaggtcatatttcataaagattctgttactatgttagtcatttatcataagtgttaagtctaagaaaagttgtaatagaaattgctaagactttaaaataaaaactactcctttagtagttaaaaaatgttattatatggttgagtataaattttattgccctagtgacagtaaaaaacaaaaacgtttagcaaaaaaatattgccattaatagctttatctaaaattctacaacagacaaagcagaataaacgttttggcatccagaggtcaggtgatacagaaatgaagttcagcaggtgcaaaagatatatcaagggcatggtagttaaaagaaatgaaaagagacagatgtcaaatgaatattccacagtaagcagtgttatcaggaagctggaatacaaaaagacttgtgcacatgggaaataaggattagaagcaactttgcccaatgtgacagtgagtattaaaagacataggtccctggaagccagggtcagaagggatggtaggccatggacatgagggacagtcagttactgaaattttaatgttaattcggtgtctcatctaggctctggtaggttagaagatttctggccttaccatgatagttggattatatggtacttggatgctctaaaacatgttgtgactcagtactctttaaaaaaaaaaaagttttagcatgttacatattcctaataagtgaaattttatgtctgaactaaaatttacttcacttcctcgtgtaagaatgccttgcttaaactcaatatataaaaatcagaattttaaaaattaaacaattagaaatgaagttattcactttacaaatactggatttatttttctaaattttttagttatctttactttttcacacatttatgttacctggcttgccatgtgggcctttgaagttccatatcccctgacagtaagggagatctgctctgagtgttgcctaagacatctacaaacaaacctggtgttttattccagttgaaaaaatgataattctgtgaagcatctggtcttctttttactagcagctctagtgtttgagcctatcgtttggaactgtggaaaattatttctctaagtagctctttaaaatggatccctgtctacagagagacttaagctatggctctttcctcagtggccttagctctaaatatgaagttctttctggactgaaactagagaaaagtaaaggtcagactgtatctctttagaatgttgaccgtttctttaccaataccctatttaatatactgatacttgtattgaagatgcagttatacagagggaaataaaagaataactggaggattagaaaaaatattttatacataatatggaaaacatnccaccggacn

SEQ ID NO: 9824 - DNA, 3285 bp, Homo sapiens
  misc_feature 1, 3284, 3285: n = A,T,C or G
nactttagccttcccattttatggagtttgtcatgagtgtgatcgtatttgctgctcgtgagatttcgctcactaataaatttgattcatttaattatgtgttttctcttcctagattttaatttgatttgaaaatgagtaagtgcagaaagacaccagttcagcagctagcaagtcccgcgtcattcagcccagatattcttgctgacatttttgaactctttgccaagaacttttcttatggcaagccacttaataatgagtggcagttaccagatcccagtgagattttcacctgtgaccacactgaatttaatgcatttcttgatttgaagaactccctaaatgaagtaaaaaacctactgagtgataagaaactggatgagtggcatgagcacactgctttcactaataaagcagggaaaatcatttctcatgttagaaaatctgtgaatgctgaactttgtactcaagcatggtgtaagttccatgagattttgtgcagctttccacttattccacaggaagcttttcagaatggaaaactgaattctctacacctttgtgaagctccaggagcttttatagctagtctcaaccactacttaaaatcccatcggtttccttgtcattggagttgggtagcgaatactctgaatccataccatgaagcaaatgacgacctcatgatgattatggatgaccggcttattgcaaataccttgcactggtggtactttggtccagataacactggtgatatcatgaccctgaaattcttgactggacttcagaatttcataagcagcatggctactgttcacttggtcactgcagatgggagttttgattgccaaggaaacccaggtgaacaagaagctttagtttcttctttgcattactgtgaagttgtcactgctctgaccactcttggaaacggtggctcttttgttctaaagatgtttactatgtttgaacattgttccataaacttgatgtacctgctaaactgttgttttgaccaagtccatgttttcaaacctgctactagcaaggcaggaaactccgaagtctatgtggtttgcctccactataaggggagagaggccatccatcctctgttatctaagatgaccttgaattttgggactgaaatgaaaaggaaagccctttttccccatcatgtgattcctgattcttttcttaagagacatgaagaatgttgtgtgttctttcataaatatcagctagagactatttctgaaaacattcgtctatttgagtgcatgggaaaggcggaacaagaaaagctgaataatttaagggattgtgctatacaatattttatgcaaaaatttcaactgaaacatctttccagaaataattggctagtaaaaaaatctagtattggttgtagtacaaatacaaaatggtttgggcagaggaacaaatattttaaaacttataatgaaaggaagatgctagaagccctttcatggaaagataaagtagccaaaggatactttaatagttgggctgaagaacatggtgtatatcatcctgggcagagttctattttagaaggaacagcttccaatcttgagtgtcacttatggcatattttggagggaaagaaactgccaaaggtaaaatgttctcctttttgcaatggtgaaattttaaaaactcttaatgaagcaattgaaaagtcattaggaggagcttttaatttggattccaagtttaggccaaaacagcagtattcttgttcttgtcatgttttttctgaagaactgatattttccgagttgtgtagccttactgagtgccttcaggatgagcaggttgtagtacccagcaatcaaataaagtgcctgctggtgggcttttcgactctccgtaatatcaaaatgcatataccgttggaagttcgactcctagaatcagctgaactcacaacttttagctgttcattgcttcatgatggagatccaacttaccagcgtttatttttggactgccttctacattcattgcgggagcttcatacaggagatgttatgattttgcctgtactttcttgcttcacaagatttatggctggtttgatctttgtactccacagttgttttagattcatcacttttgtttgtcccacatcctctgatcccctgaggacctgcgcagtcctgctatgtgttggttatcaggaccttccaaatccagttttccgatatttgcagagtgtgaatgaattgttgagcactttgctcaactctgactcaccccagcaggttttacagtttgtgccaatggaggtactccttaagggggccctgcttgattttttgtgggatttgaatgctgccattgctaaaaggcatttgcatttcattattcaaagagagagagaagaaattatcaacagccttcagttacaaaactgaacatatgctttctgagattcaactttatgatttcttataatttgcccagtatttgcatcctgttgctctattaatttaaaaaccttttattttggggaaaggccaacatttgcatcattcaaagtctcattaattctggaaaaccatccattctgatctctagggtatatacacccacaggcatagagctcttccacgtggtggaatctatgcaatgatagatattcacactctaaatatgaggtgtgtgtatgtgtatgggtggccacagccatgcttacctatgccatttagttggtcttacttaatctgcttaagatttgcatctgtgtacctttgttcagattagttttttttttccagccgatttcctcttagtggctaatgctgttagtgaattttccaactaatttcctctcattggttaatgttgttaatgaattgagagaggtaattgaggaaaggaaatgagtaaatcactgttcagcaacactgatttccgttaacacatcagttatgaatttcagggaattcatctcgccagattcttgataacatgccattcattgcccttaggtgattgaccctattttcttacatggctcaaataaaactagtatgctgttgtatgaatcttttactgaccacaccatccaactataaaaatataacgggacagctttaaaccaaagatcatgtttagaacaatgaaaaattatttgttgtatctaatacacgcctgtattgtgaaaagcttcatttaggcatgtgtttaatttaatccaggaaatcggatggaagatttaaatttggacagggggtctgtgggacctgacnn

SEQ ID NO: 9825 - DNA, 2633 bp, Homo sapiens
  misc_feature 1, 2, 3, 2633: n = A,T,C or G
nnnagagcgagaggagcggctacgtgccgatgcgcgggtgtcctctacgtctagagcccccccaagccggggacacaacacagcccattaaatacgccggagcggccaaaacgctaatagacacgtgttagccaagaccgctaaaccaggaccgctgcccaggtgggccgggcagctgccagctacaggaggagagcgcaacatactgtcagctcagtcagcacacgctgagaggccggaaggcactcgccgtcaacatggcacagtgccagcaatggggcatggcaccgtacatggcagtggataggagtagcatcaggtccagcgggcctgcctgggacggcccaggcctggcatacccccatcctctacactcatacccacacaagacctgggtggctaaggggcagcagggattgcaacacgtttggggaaaatcaagttatggagccagctcccaggaaggagaagccgtggaacattgccagagagaatactgaggatcagaggcatctaccaactccacagtcagggcttgaagagtaaggggctggtggtccttgaagccacagtcttggggcgagtcccatggagctaggaaggggaagaaggaatccagggtgcaggctgaggaactactgtccacatctgcaggaagggaggcaaggatgaaggtggcaggaaagttggagatagcaaatggatgacagctggggaatccagataaagtgtctccacctgaaggctgagctgctcatcctgcctcttccatggcacctagagctagtcgggccccttgcgtagcaactgcaaatagtcccttaatgtcttctccacgttgggcacagcatatgcctgagccgcatagatgccagtgcaggtgcccacagcaaagcccaatactgctgatgccctcagtttggccaccacatagccagccaggaatcccttgaggaacgggtaggacaacagggagccatcctggccccaggaggtggaggttgcagtgagccaaggtcacaccactgcatgccagcctgggcgatagggcgagactccgtctcaaaaaaaggggaaaaaggtataatttatgccttttctgggcaatgctgggtctttgctatagctgcccagtaccctaagtcagactgaagatgtacagtatggtttccgttaattgtgtaagccgacaaactacaggtcccaggatagcttgagacttgtagttgctcacaaagatgggtccggtgctgcggtgcttcctgggagatgtagtttcctgtgtattgaaacctggactgctcgctggccggcagcgcaccgttttgaaggtcctagcccacctgggctggctcacgcgcacgactagccgctcccatacagcacgcccggactctgtcgtcgcttaaggccactcctattctacggctgacccctggtggtcacgtggatctgttcgccacgcaagtctgggtccttcggcgattgaccggggtccttgctgttcgggagcctctcctaagctgcctgttcgcgcgagagtttggaggggcgggtttggggtcggtgtctgattggggctcgcaccgcagcacgctggagtcccgcttaggtaccagttagcgtcaggggagctgggtcaggcggtcgccgggacaccccgtgtgtggcaggcggcgaagcgctctggagaatcccggacagccctgctccctgcagccaggtgtagtttcgggagccactggggccaaagtgagagtccagcggtcttccagcgcttgggccacggcggcggccctgggagcagaggtggagcgaccccattacgctaaagatgaaaggctggggttggctggccctgcttctgggggccctgctgggaaccgcctgggctcggaggagccaggatctccactgtggagcatgcagggctctggtggatgaactagaatgggaaattgcccaggtggaccccaagaagaccattcagatgggatctttccggatcaatccagatggcagccagtcagtggtggaggtgccttatgcccgctcagaggcccacctcacagagctgctggaggagatatgtgaccggatgaaggagtatggggaacagattgatccttccacccatcgcaagaactacgtacgtgtagtgggccggaatggagaatccagtgaactggacctacaaggcatccgaatcgactcagatattagcggcaccctcaagtttgcgtgtgagagcattgtggaggaatacgaggatgaactcattgaattcttttcccgagaggctgacaatgttaaagacaaactttgcagtaagcgaacagatctttgtgaccatgccctgcacatatcgcatgatgagctatgaaccactggagcagcccacactggcttgatggatcacccccaggaggggaaaatggtggcaatgccttttatatattatgtttttactgaaattaactgaaaaaatatgaaaccaaaaaaaaaaaaatcaagagcatcgtgctagcccaggtttaaaaaaacacatcgggtcttttgtgtgggaaaagagtacatagacatggtaatatgttttgaacgtttgatacagggaaagcggcgataaagaatan

SEQ ID NO: 9826 - DNA, 4591 bp, Homo sapiens
aaaatagtttaacggccgccccttttttttttttttttttaatttttttttttccttttttttttttttttttttttttttttttttttcccagcttttcaaaagtttattttaagtttggagactagacaaggtcatactggttttacatcctacgtgatataagtatatatacaaagaaaaaaacaacattggaatattacacagcttgaaggtttgcaaaggttatttgtgtcttagttatttctgcacttaatgacacatcagacgcattgagtatatttcataagttgttgactagcaaagatacaatcattagtaacccaagtcttcaaaattcacaccaaactttatgaagtcattcagaaagagaaagtcaatcctaaaattaaaattggcaactatgataaataccttcaaaaggatgtagatataatggagatgtttaaaagtttagtttcattaattgtaaaattagcatgttatatttactcaatatagtgaagactaggtgattcttacatgtattctacttatggtactgtactggttttagtgtgaatttacatagaataaatttacttcactttcatgtcatcgacatgaatgacacaaaagctacttcataatactactttacaatagttttcaacatttccatatggtgcgacccctttgctctcatcaattttgggtgtcatgagaacaataggtatcccgttggacatgatgtattgcgaagagcatataaagcagagggaaaatgaaaaagcaagagaaactcatttcaatgctttttctaaaaggtaacaaatataattttaatcaacttccttggaaaatatttttaaaacaggtatcaatagaaaaaattacaaaacatcatatgaagctataaataattttgaaaaactatatcatcataaagcgtaagtaataatcttaaaaatacactcttaagaaggtatgtaatttgcaaaggaaaatggctagatatctgatgggacagtaaaccttgaaagaaactggctaaagagtaagtgtgtgtatatttctgaacctaagtaattatttgtcacgactttaaaatttagccagttacaaatattttaaaatcctaactttaaagttatctaaaaaaggcaatatggaggaaatagtaattttgtttttgaaagatgttgaaaactgatcaccatttcagaggcttcaaattcataatttcataataagaacaagaagtagaaagcatatgggcaaggaacaaatatgtggccagccagtccccttagacgaactaattttgttcttattaaaaatgccaatacaattgactttctctttaaattcttcactatgattgaagaccactccatatatacatcattaagaaatgctgttaacacatggacagacaagacagtaacagtctagtggcttttgttatgcagcacaaatattaaaactccaataattctgtctaagccttataaaataaatacttgtaaagcttataaattagatgttgaagacttttatggaggcagtgtgagctttaatttgagagacatgtcaatgaaacctccagtatcaataacaaattgttatgataattgcttattttttcaggacctttgaagcaaaataaatagaaatcagttttcatcttgaaaatggtttactactttgtcattagtaaacactttgcttctcacaaataactccacctgtgccttcctgggaaactaccaccagtttcaaatctcaataagatgttagtttcacaggaaatgtggagctgaacaaagaaatgatgagtatgcttggccaaactatgcagcactatattaatatttctttgctaaattttttataaaataaacaaataagccgattttttaaagtaaatataaggatatgtaattaccatctaaatgaagatttaaatttaaagagacatatatattttttgttcttttgtgcaaactgagagtatgggattctttatgaagcaattatttggaaattaaatagttatggcttccttcaaaaataaaactgcagatttaattaacgaatattaaatacagatcaatctactgataggcagtcatgttctacatatatgagtaaacatgacacttcttttagtcaactaataggaaattcaattagaaaaaaattgaattattcaggtaatatacaatattaagaatgtagaatagaactaaaagaaaaagaagtcacataatctcttattagaaataatgaaagtaaaatgagaattataatatcagtactgcatgttacatattcttctttaaaattttgtaataaacattgacagtgtttggtaggcacagggaaacaggataacgtagagtcattacagaagaaaaaaacttattgctaacattgcagtattccttttatcagaattaggtgagtattgattgtaaaagctctatcaactcttgctcttatttgatgactttgagacttttttactcttgctataaaaagaaggctactttctttccctaatatatttctaccaatgcgaataattcaggaaacaatgagagaaaagtaattcacacttaatgtgttgttacttaagagatttgacggataaaataaaatcaaattaaatcattgaaaaggcaggcttagacccccttaaaaacaccgttagttgcctaccataatttgagcactttttcatgaaaaaaaaaaaaaaaccattcagtttcctacagattttgcacagttcattccatggagatacttttagggaaatagggaagagggttgtgaaatgtagcctcccctcattcctcctctgtgcagcccagcagctctgaccgcaatgtgatcctcccgtaccaggaccaaggaaggattcttatgtgtcgtgcatagatgggagggtcgatgacattttttctgtgagtgtcattgtcaaaatttccctggaaaaccttatcttttctttgcttttcatcctggtatacagtccagtgttctccatcattgctgtaagccagtttgtaggagccaacaaactgtacatgaccaaaatctttagctccttgtgtaatgatgccagtcactttggttggaacaagaagatccacctgtaaccattgtgactggtcattgtggccagaggtccaggcattcactttgccttgcttgtccagccgagctttccttggttcccaagtgaacatgtccatgttgagcgttctgaagatgctggaggcagtgatctgatagtcttgtatatgtcctgatttcatacccagaggctcagaacaacccgacagttcacagccaagaagttccattcgcaaagtgcaatgtcttcgacaaacttggggatagagtcttacatactgagcttttatggggggtgtgaaagagttagcatatggagtgttgttatcaatgtttccacgaaacaccatgtcttcattggtgcctttcactttgtacattgcccaagtctttccatcattactgtaggcaattttgtaggattttatatactctgggcttccaatcctcttggctccttgggtaatcacaccagtaactctcattttcctttgcaaatttatctgaatccacggccatctgtcattttctgcagctgtccacgcatttataagccccttcttattaagacgtgcatagtagggataccatttttggagtccaaaaagagctcggtgagtagaggaagctgtgatttgctggtttgatataattccaccttcaattcccagtgggcctgagcatttgtattgacaatttcttcccataaattcgcctgggcactcacaggaatagttagcaacaagatctgtacatattccaccatttttgcaaggctcaacttcgcattcatttatgttgtgctgacagtgaatcccattaaatcctcggggacatttacaaacatagcctatgaatgtatcccctcggtatgcttcacttatttcacaggttcctccattatggcatggattaggagtgcagggacctgctgaagttggttcttcttcatctgatgcaacctccacaacactagaacagttggggtctgtgaagccatctggacactcacaggaaaaggaaccatcagccaatcctggcaaacagatacctccattttcacatggattgggatcacaaatatcacctttgccgaactgggggacaccgaggctgagcccgaccaagagccagacggctaccgagcgcttcatgatcccgtctcccggacgtgaccccggctggtcaggggtcgtcgcggagggcagtgtagccgaggtggcagcgcagggcagcagcagactccgcccctactaaagaattcaagaagacgttctctttcctcagcgctttgttaaacaaattcttggagagggcgagagtggtgactaaagagaggagcctttcctccccttttgcctgcgctccggcgcgcggaggtgggtgagctccggggagccgccggcgggctcagccccccgctgcgggtgggtcccggcagaggcgcggcgggcggggcgcgggctcccgc

SEQ ID NO: 9827 - DNA, 993 bp, Homo sapiens
ggagtcgacccacgcgtccgaaccttcttctctcctgtcaacagtggccagccccccaactatgagatgctcaaggaggagcacgaggtggctgtgctgggggcgccccacaaccctgctcccccgacgtccaccgtgatccacatccgcagcgagacctccgtgcccgaccatgtcgtctggtccctgttcaacaccctcttcatgaacccctgctgcctgggcttcatagcattcgcctactccgtgaagtctagggacaggaagatggttggcgacgtgaccggggcccaggcctatgcctccaccgccaagtgcctgaacatctgggccctgattctgggcatcctcatgaccattctgctcatcgtcatcccagtgctgatcttccaggcctatggatagatcaggaggcatcactgaggccaggagctctgcccatgacctgtatcccacgtactccaacttccattcctcgccctgcccccggagccgagtcctgtatcagccctttatcctcacacgcttttctacaatggcattcaataaagtgcacgtgtttctggtgaaaaaaaaaaaaaaaaaaaaaaaaaaaaacctgcccgggcggccgcccgggcaggtacaagtatacataaaaatggcataaatggcataattgaaccaattactggattcaactatattaagactatttccttaaatcctacttcagactaaattattttacctacattcttttccatattttggaacttctgagtcattattttccaccttgcacattaaaataatttaaaattacatgtatcccttctcaataagtttaatcagctaaccctaagctagaggtcaaaatctacttcctctaatatcaaaacgaaaatttaaaaggtttccaaatattaattcaatattaattgaatattcaatgaattcatttaatgttagattaattcattgaatattaattcgatgaatgactaattaata

SEQ ID NO: 9828 - DNA, 490 bp, Homo sapiens
  misc_feature 486, 487, 488, 489, 490: n = A,T,C or G
accgtttcctcagcggcggactgctgcagtaagaatgtcttttccacctcatttgaatcgccctcccatgggaatcccagcactcccaccagggatcccacccccgcagtttccaggatttcctccacctgtacctcggccgcccgggcaggtacatttaatcagtaaatcagtttcacatcatgtattgtgatgtttcaatgtgagacacaaaaacaatggcttgaaacttgtgtatcatatgtgattttgaaatgaacaccttgaatagcactaatttttatttgtgggatttttctataacaaaacaagtagctctaggaaaagaggttttattttgtaaacgatcatttgtgacctcagacactctctggctaatattttaataagctcacagcagataattctgagatcatgggtgaggggtggtgcatgttgagatttaaattggcataaagctgcatactttttggctagctgattgannnnn

SEQ ID NO: 9829 - DNA, 2185 bp, Homo sapiens
  misc_feature 1, 2180, 2181, 2182, 2183, 2184, 2185: n = A,T,C or G
ncgtccgggatgggctctccagacagctgcgtgcctcagagaagccagcctcgctaacccctcaagcccaggggatgagaccctcctgcatcgcggcgctattttggctggagccacagctccctccaccgcggggcggcgctaaaatgtcctcccccttaagggagcaggcagctcctcccagccacccaccccaccaatgcccatcctcccgcccccctccaccaaccccttctgtccacactgccccctgagttcacggaattcccccagcatcccctagcttgcgtttcctgccagtcgggagggatgaatgcagataaagggagtgcagaaggcacgaggaaaccaaagtgctctgtatcctccagtctccgcgcctccacccagctcaggaacccgcgaaccctctcttgaccactatgagcctcccgtccagccgcgcggcccgtgtcccgggtccttcgggctccttgtgcgcgctgctcgcgctgctgctcctgctgacgccgccggggcccctcgccagcgctggtcctgtctctgctgtgctgacagagctgcgttgcacttgtttacgcgttacgctgagagtaaaccccaaaacgattggtaaactgcaggtgttccccgcaggcccgcagtgctccaaggtggaagtggtagcctccctgaagaacgggaagcaagtttgtctggacccggaagccccttttctaaagaaagtcatccagaaaattttggacagtggaaacaagaaaaactgagtaacaaaaaagaccatgcatcataaaattgcccagtcttcagcggagcagttttctggagatccctggacccagtaagaataagaaggaagggttggtttttttccattttctacatggattccctactttgaagagtgtgggggaaagcctacgcttctccctgaagtttacagctcagctaatgaagtactaatatagtatttccactatttactgttattttacctgataagttattgaaccctttggcaattgaccatattgtgagcaaagaatcactggttattagtctttcaatgaatattgaattgaagataactattgtatttctatcatacattccttaaagtcttaccgaaaaggctgtggatttcgtatggaaataatgttttattagtgtgctgttgagggaggtatcctgttgttcttactcactcttctcataaaataggaaatattttagttctgtttcttggggaatatgttactctttaccctaggatgctatttaagttgtactgtattagaacactgggtgtgtcataccgttatctgtgcagaatatatttccttattcagaatttctaaaaatttaagttctgtaagggctaatatattctcttcctatggttttagacgtttgatgtcttcttagtatggcataatgtcatgatttactcattaaactttgattttgtatgctattttttcactataggatgactataattctggtcactaaatatacactttagatagatgaagaagcccaaaaacagataaattcctgattgctaatttacatagaaatgtattctcttggttttttaaataaaagcaaaattaacaatgatctgtgctctgaaagttttgaaaatatatttgaacaatttgaatataaattcatcatttagtcctcaaaatatatacagcattgctaagattttcagatatctattgtggatcttttaaaggttttgaccattttgttatgaggaattatacatgtatcacattcactatattaaaattgcacttttattttttcctgtgtgtcatgttggtttttggtacttgtattgtcatttggagaaacaataaaagatttctaaaccactgaaaaaaaacaaacacccccccccaaccccacacccccaactcacacccgcacactaccccccaccccaccacagacacgcacgcacacgaaaccagccacgcacagccgcccctagccaatacccctctccagacacaccccgccccaccacacgcacacatacccgccccgaccccactagtacctcaccaccacccaccccccccacgaacacccaccacgcaacccctaccgcccccctcacgaacccgaccgcacccgacacacacccaccccacactcgccactannnnnn

SEQ ID NO: 9830 - DNA, 1167 bp, Homo sapiens
  misc_feature 1: n = A,T,C or G
natgagtgcttggggtatatgaagtggcctctgtgtatatattaagtgaatgaatgagcacatgagagggggaggaataggggagagaggcaggaagtcgacaggaagatgtacctaaagaactcttgtgaatcgcaagttgtaagcaggttgagagttcagaggagggaacattatcctggccacttaggacactgggaggaggaatcgtgcccgcagggcagaggctggctcggtggggcagtgccagctgagatctcctggcctttttgtgtctgtgttggtcgccccgttaggatttctgtcttcctccgtttgactcactgtcaacaagagaccctgttgcacctgattcaactgttgcatgttcttgaagttaacaaattcttttgtgccatttctcccaggtactggtgtttgattttggtagtgaagtccacgtatggcatgggaaagaagtcacattagcacaacgaaaaatagcatttcagctggcaaagcacttatggaatggaacctttgactatgaagaactgtgacatcaatcccctggatcctggagaatgcaatccgcttatccccaggtactcctgccgccgcccggggacagctcttcaagcgagctgattcccttcgatccctctgttctcaccacagtcctctactctcgctctttatagggttcagttttcataaacgattatatgcagtggactgtgaatattcacaaaaggaacagttctttaacttttatctaactattgcagaaatatggatgtcgtagtcttctggaagaggtttgttatagttgatttcttgaagtgagcaagaaatgctgcaagttcctccctgcggcattacaagtgctgctgtggcagatgaacagcaattgtttaaacaaattacatgcggatctgaaaggcttccccgggtctggaattcagccattgatctgaaagtgcaaaagcaacatgcctccctctaatttcataccttcccagcatcgccctcgaatttcaggatttatttggcagcagatgatgtttatgtctttatatcttttgggaagggaagagggggaggagatggtgttaaaataatgattgcaattgtaatattccctgcatgtacctcggccgccaccgcggggagctccaattcgcccta

SEQ ID NO: 9831 - DNA, 2693 bp, Homo sapiens
ggggaatctgcagggcaggtaggtggggccgccgaggctgacgtccggggagccgagccgcctccttgccttctccgcgggccgctcttttagcctgcgcggccgtcctccgagcaggccgccccagctttggagttcctcctcactgcacccctgtttctgctcactgagaccagcttgtgggaaggagcgccccccgcctcactcaccaaccccttggctggcagcacaacagactctggggcggcctcgggttcctggggtgatagtccagcttctggtctaccagaggaagaagaaaggcgtgtcccccaaaggctgtccttgcagtagctggaagccagaatctcactctgttgcccaggctgaagttcatggcgcgatctcggctcgctgcaacctccacctcccgggttcaagtgattctcctgcctcagcctcccgagcagctgggattataggcacgctccaccgcgcctggctaatttttgtatttttgtagagacggggtttcactacgttggccaggctggtctcaaactcctgacctcaagtaatctgcccacttcagcctcccaaagtgttgggattacaggtgtgagcaccgtacctggccatatttaggaatattttcaaaattagcttcacaatatatacatttgtaaggtttacaaataaccaagtaggtagaggagtggccaaccagattcaagtaaactgtccagtcttcactgttgctacttctaaatgatgaatgacgggtaatttcattaggctatcattgcgccttatacaatatctaattgctcctgatggattaaatctatacctgtcccactatcccccaatcccctccaaaccacttttctataggattaacgctgaaccgataacataaccaggatgccacatggatattcactaggtattaacattaataaatctattctataagtagtgttttaatattatgttcaaagctagttatttgagtcctgaaaaagaatacaagattaagtaagtggcttgcattaaaaaatggaagcctatcttaatatctggtgttataaatacagattcttacataaaacagttattctcaatgaaagaaaattcaaagtgcttccatcttgctccttttattatatggtgaagcatccttagtgtgaaattaatggttagatatataaatgcatggcataacatgagaaaatctaggagaaaatatcctcattttaatctaagactatggaattatcaattccaattagacttaatcagcaacttacctttttcaaaaaaagcaaatgcacaaataggcttgataatttaactcttcttaactattaaggctctaggatgtccttaacttttttaaaagatcattttaaaaccaaagcactaatttctatacacagtaaaaacagtacaaatatctgaatttcagatctggcttttgctagatagatcctaaaaatgaagaaaacattttccctttccagatactttaataatttaaaatataaataattgtattaagtcccactgaataaagaatgtgaaagtttttgtattaaaaaaaaaaaacttaagagtttgaagcttgatagtcatttcattttatggtgggacagagactggattttgcttgctttccataattacttcactgtctccctccatttcaaaattgacattcacaaatgagctggatatcactgtctctggttgatctgtctgaacaatggaatcagtctgcaatttattctgttgatattgtttttctgcttcttcagacatcctgttttcttcttcttcttcttcttcctccttcttcatccgataatattcatcaatggtatattggtactttggggtgctgatacccaaaacagatgcaatcttctctccaaggaagtcacacactgagagagttgatgtagcagcccgaagcatgtaaaaccataagtaggggccccaggtaagttttgtcggatcaacagtaggcaaaacatctttcttctccaggccatcaacttcgtcttcatctgtgctatattcttccattgtttcaccactaacaaagtggatgactctccttgggactttcttcttttttcctatgactcccagttctacattttcaaagcctctttcgttactcatctgccctgcagattccccgaatgccgcggcggccgcagctcccgaggctgcgacggcttctcctcgttccacaccgcccactggctcctggtccatcgtcgtcgccaccacagggctgctggcgccgcccagcgcccgcctcgcgcatcagcggactgtaccagggtgccggtggtcccgggcctgggggcttcggggctcagggtcccaagggagggtctgggtcaggccccaccattgaggaggtagattaggggcctttccaagattgctgtttttgttttggagcttcaagactttgcatttcctagtatttctgtttgtcagttctcaatttcctgtgtttgcaatgttgaaattttttggtgaagtactgaacttgctttttttccggtttctacatgcagagatgaatttatactgccatcttacgactatttcttctttttaatacacttaactcaggccattttttaagttggttacttcaaagtaaataaactttaaaattcaaaaaaaaaaaaaaa

SEQ ID NO: 9832 - DNA, 2963 bp, Homo sapiens
  misc_feature 1, 2, 3, 4, 5, 6, 2961, 2962, 2963: n = A,T,C or G
nnnnnnaatgcccaaaacataatttatttattagagatggggtcttgctatgttgcccaggctggattcaaaatcctgagcccaagcaatccctcctgcctcagcctctcaagtagatgggacaataggcgcacaccaccatacctggctgtaagccacatactttaaatggacctaatttccaagcctggctgcctgatagaatgtgctttggtcagctagaattgataccatgttagagggtcagctgcacacaaaaatggtgttgctgagagaaatggcacattatacctggtactccttagaggtgctctatctactgtatcaatatagccattaaaagctcaatctgccagctgtttttgaaagacccaataatactgttatgactatataagataaccttgatgtatgtcactttatgatacgtgttacttaacatgactcccggggggccctggcttagagctgattccaaaggcacacagcttaggtcaaattataggacacataatatttactattttatttactgcctaaaatgtttctcaacaactaacaagtacaggaaacatttataggtagtaatgtaagtaccttatgagctcaatgacaaaacagtgaattacagacagttggaagatggggaccatgtcttagattccttttgaacactcctcagtgtccagtgtggtgatatgcacataaccagtatattttagtaagtatttacccaagtaagacttctttaggcattccattttgggattcttgtagaaagaagccaattttgtagaactcctaggctttaaacattcgagaatgaaaggctcttgccattactgatcataattcaaaaagctggtgttaagtgtgacaagtggtgactgttccatatatgccaacaggcatacagcagaatccagacagagtatatagtagcgaaaaagatgggagaatatgaagaacaaagtctattttaacattaattatggctataataacccttatgaggaaatactggtgagcaggataaagtgatattgaaaagaaaaaaaggaaaactcctcaaaacacaataaagcatattctaacaggtttttggaaaaagttgcaagccttttaattcattgacctcttttgactgattggaatttttaccattctgtacactctgaattataactaaacaactacatgttactgacaaatttgtgattctttgagtctaaacaacacagaaactagaagatccctttcctagatttatatacttgattttcttataaaaataacttcagttattatgtcaatatttatctgaaaaaggcagccctctgacagtaaactagtaactggaataactacagtatcattataagctacagtaaaacaacctgtaaagtaatttttcctatttgaataataaatagactggacaggagtgaaaaaccaaaactatgaaagaaaaacccaatgtaaataaaggatacaggtcaaaacaaagttcagaaggcaaatatgtaaatattagatgcctcaaaaatcaactatcagtgggaaaatttctatgaaagcaatttcagaaaatacatgaacacatatatctttaaaatatagaactctaaatacttgataacatatttaggatactctacaatgcccagttaattgctataatttttttccctcaggttttcctggatgatacagcaaactacagaatttgtgcacttactgttgctcaaatttgtgtacttactgtgtgcacatatactgctgcactgtttctcggctgtgaaaaattaaaagcattttttcaacctttgagaaggaaagaaaacaatgaagaatctcctcataataatacagcataacagggtttgtttactgtgccacatcatgggtgtttttaaaacgaaatataaatatatggttagggatagcatttttaggagaacaagtgaccaaaaactaagttacctcttttcaggtcagccaaaaaacgtgaagggaaagtggactttatacaacttagacatttatgtagatagcacagcagactcatgttcaagccagccacctgaaacattataagtccgtcgagggggacagcaatctatggtccatggactgaatccagcctacttttgtatggctctgagctaagaatcgttttaatattttttaaaggttgttaaaagcaaataacaaagaatacatgatgactctattcttgttctcatgtgtgaaccatatattatagcctgcaaagtctaaaatatttataaaccggccctttacagaaaaagtttgcagacccttcttttacaccagtgctgtagataattctggcagtacaactgcaagtctaagataatgttcattcattcccatcataaatgtaacattctaaataggtgtcttctgatgtcatctgtcagaatttcttttaaactttttcttcatcttcaacattatcaaagttcatccttattcctcttgccttgatttcggagagtttccaatttttcacttattaaggcagcgattgcttttgcatctctggtatttatctgctcttcttgaaaatttctctttgctctttcgtagaaataaaacttaacagttggataggccctgatcccagctttctggcatgtctgagcataagcctgacagtctacttttccagctttcacttttcctttaatcatcctagccaagagctcaaattctggagcaaaattctggcaaggtccacaccaaggagcatagaaatcaatcacccaatgatttttcccttgtagaactttttcactgaaagtctgaggtgttagatctggggatacttggggtaaaaatcctcagaccccagattctcagggaataagcatccctattccaaccattgtaactgggatactgataagctttatttgattttgggggaaaaaatcnnn

SEQ ID NO: 9833 - DNA, 1457 bp, Homo sapiens
  misc_feature 1452, 1453, 1454, 1455, 1456, 1457: n = A,T,C or G
cgtccgcccacgcgtccgggcgagcgccgacatgcgccggggccgggccgggccgggccgggccgggggcgcgcgctctgcgagctggatgtccaggctgcgggcgctgctgggcctcgggctgctggttgcgggctcgcgcctgccgcggatcaaaagccagaccatcgcctgtcgctcgggacccacctggtggggaccgcagcggctgaactcgggtggccgctgggactcagaggtcatggcgagcacggtggtgaagtacctgagccaggaggaggcccaggccgtggaccaggagctatttaacgaataccagttcagcgtggaccaacttatggaactggccgggctgagctgtgctacagccatcgccaaggcatatccccccacgtccatgtccaggagcccccctactgtcctggtcatctgtggcccggggaataatggaggagatggtctggtctgtgctcgacacctcaaactctttggctacgagccaaccatctattaccccaaaaggcctaacaagcccctcttcactgcattggtgacccagtgtcagaaaatggacatccctttccttggggaaatgcccgcagagcccatgacgattgatgaactgtatgagctggtggtggatgccatctttggcttcagcttcaagggcgatgttcgggaaccgttccacagcatcctgagtgtcctgaagggactcactgtgcccattgccagcatcgacattccctcaggatgggacgtggagaagggaaatgctggagggatccagccagacttgctcatctccctcacagcccccaaaaaatctgcaacccagtttaccggtcgctaccattacctggggggtcgttttgtgccacctgctctggaaaagaagtaccagctgaacctgccaccctaccctgacactgagtgtgtctatcgtctgcagtgagggaaggtgggtgggtattctccccaataaagacttagagcccctctcttccagaactgtggattcctgggagctcctctggcaataaaagtcagtgaatggtggaagtcagagagcaaccctggggattgggtgccatctctctaggggtaacacaaagggcaagaggttgctatggtatttggaaacaatgaaaatggactgttagatgcaaaaaaaaaaaaaaaaaaaaaaaaaaaaaatttttgggccccttgggccctgcaaaaagtttttaagaaccatttgctttggggccccgggggccccatgtgggttactggtgaccctggcgctcatacgcgtgttccctagggaagaacccgggccagagcattagttgctgggtttctcgcctattaaacacgccccgggggaccggggtgtttttgcacaatccccgagcgcgtccggaggccatagggggtctacacgcggggtcccaggaactcatctannnnnn

SEQ ID NO: 9834 - DNA, 1928 bp, Homo sapiens
  misc_feature 1903, 1904, 1905, 1906, 1907, 1908, 1909, 1910, 1911, 1912,1913, 1914, 1915, 1916, 1917, 1918, 1919, 1920, 1921, 1922,1923, 1924, 1925, 1926, 1927, 1928: n = A,T,C or G
cgctgcgcgcagcaacgcgccctccctctccaggaatccgcggagggagcgcaggctcgaagagctcctggacgcagaggccctgcccttgccagacggcgcagacatgtcagaacaaagtaaggatctgagcgaccctaactttgcagccgaggcccccaactccgaggtgcacagcagccctggggtttcggagggggttcctccgtccgcgaccctggcagagccgcagagccctcctctaggcccgacggccgctccgcaggccgcgccgcctccccaggccccgaacgacgagggcgacccgaaggccctgcagcaggctgcggaggagggccgcgcccaccaggccccgagcgcggcccagccgggcccggcaccgccagccccggcgcagctggtgcagaaggcgcacgagctcatgtggtacgtgctggtcaaggaccagaagaagatgatcatctggtttccagacatggtgaaagatgtcatcggcagctacaagaagtggtgcaggagcatcctccggcgcaccagcctcatcctcgcccgggtgttcgggctgcacctgaggctaaccagcctgcacaccatggagtttgcgctggtcaaagcgctggagcccgaggagctggacagggtggcgctgagcaaccgcatgcccatgacaggcctcctgctcatgatcctgagcctcatctacgtgaagggccgcggcgccagagagagcgccgtctggaacgtgctgcgcatcctggggctgcggccctggaagaagcactccaccttcggggacgtgcggaagctcatcactgaggagttcgtccaaatgaattacctgaagtaccagcgcgtcccatacgtggagccgcccgaatacgagttcttttggggctcccgggccagccgcgaaatcaccaagatgcaaatcatggagttcctggccagggtctttaagaaagacccccaggcctggccctcccgatacagagaagctctggaggaggccagagctctgcgggaggctaatcccactgcccactaccctcgcagcagtgtctctgaggactagcaaagtctggaggcagatgaatggtttctgaccctcaccagggctgtggaagggtgggggtgggtcattatagtattcaggatttacagtgcagtattcacgtgtaacttttaagttttcagtacagtgcttttatacctttaatgcaatgttgtattcatttgggtactattgtgtagtatttaggatgtatgcatgtttgtttatatgtaagcttggttggtgctttcgcttttgtgctacctttcttggatttttgtaccagagatgtgctaaactgatgaaatacattgagaaagtttccatcttattcttttatatgggactgatgatgtgtgttggggtagactgctcctgcagagtttggaagaagtcaccagcaaagccggcctaaccaagaaaagtcaaggcccttcatgaccttgctgggcacagaaaacaccctcgtggagtacactaatttgaactggactggtctcagtgtgagcacttggcacactttactaaacacatatacaaccccaccgtgagtcaactttaaagtaaacattaaagattcttgtgatacaatcaattttggaaaagtgtactttatcattttaacaaagcagtatggttgggaatgagacaattctctattttacagtgtatacagatacaactatttcccctaatagggtgggaaaaatcgctactcatgattactcctaaatttgtgaagtttatagttctattgtctttaaatgtaactcatgtttatttcaaaaacattcacaaatatagaaaagtatacaaaacaaaacagtaagattgtctgtaatcacatcatannnnnnnnnnnnnnnnnnnnnnnnnn

SEQ ID NO: 9835 - DNA, 940 bp, Homo sapiens
tagggagtcgacccacgcgtccggatttttttaaccttctttttgcaaatgtcttcagggaactgagctaatacttttttttttttcttgatgttttcttgaaaagcctttctgttgcaactatgaatgaaaacaaaacaccacaaaacagacttcactaacacagaaaaacagaaactgagtgtgagagttgtgaaatacaaggaaatgcagtaaagccagggaatttacaataacatttccgtttccatcattgaataagtcttattcagtcatcggtgaggttaatgcactaatcatggattttttgaacatgttattgcagtgattctcaaattaactgtattggtgtaagatttttgtcattaagtgtttaagtgttattctgaattttctaccttagttatcattaatgtagttcctcattgaacatgtgataatctaatacctgtgaaaactgactaatcagctgccaataatatctaatatttttcatcatgcacgaattaataatcatcatactctagaatcttgtctgtcactcacctacatgaataagcaaatattgtcttcaaaagaatgcacaagaaccacaattaagatgtcatattattttgaaagtccaaatatctaacaagagggtggtgtgtattcacgcagttactcgcttccatttttatgacctttcaactataggtaataactcttagagaaattaatttaatattagaatttctattatgaatcatgtgaaagcatgacattcgttcacaatagcactattttaaataaattataagctttaaggtcacttatactaccaataacttgttaaatcaggatttggcttcatacactgaattttcagtattttatctcaagtagatatagacactaaccttgatagtgatacgttagagggttcctattcttccattgt

SEQ ID NO: 9836 - DNA, 838 bp, Homo sapiens
  misc_feature 836, 837, 838: n = A,T,C or G
tctccttcagggcatcacccaccttgcggaagtctgccagctgcagccagcatgtcttcaggctacatgagccggacaccccatggcacttgcaggccacatcagccaggttgtacagaaatttgtatatatgatggttcttagaacttgttttaatttttgtggtccttctgtttattataataggcgtccaccaatgattatccatatgtgttcttaatttttaactgctggaagtgttaaaacacacacacacacacacacacattttttttttgagaactccaaagtcctgaaaattttggtggacaatgatttttaaaaaactaactttgtataacctaatatttgtattctctcatctatatttttttattcactataatcatgatactcttctaatagacttaaaagttaatcattgacaacgaaaaataaaatgttttttttaaagaaaaaaaaagttttttttttttttttttgaacaggagcctctgagggcaatgagccatcaactaaagaactcaaagagcacccagaggctcctgttcaaagaagacagaaaaagacaaggctacctcttgaattggagacttcctccacccaaaagaagtcatctagttcatctttattacgaaatgaaaatggtattgatgcggagccagctgaggaggcagttattcaaaaaccttggaggaagacaaagcccagccagcagaattacagtatgccaatgagctaggagtagaagatgaagacataatcactgatgagcaaactactgtggcagcagtctgtattcactgcacccactggcattagccagcctgtggcgnnn

SEQ ID NO: 9837 - DNA, 589 bp, Homo sapiens
  misc_feature 1, 2, 3: n = A,T,C or G
nnnggtccgactcggtccactataacggccgccatgtgctggaattcacgcagcgtgatgaatggctttcaaaaccgtaagcccacgaaggggaaagtgttccaagaacctctgttttatgatgcccccacatctgtggtattgcagagagaaaggctacgtgactcctgtgaagaatcaggtgcttgtggttcttgttgggcttttactgctactggcgctcttgaaggacagatgttccggaaaactgggaggcttatctcacctgatgagcagaatctggtagactgctctgggcctcaaggcaatgaaggctgcaatggtggcctaatggattatgctttccagtatgttcaggataatggaggcctggactctgaggaatcttatccatatgaggcaacagaagaatcctgtaagtacctcggccgaggtactggtctgtggcctgggggtggggacccctgttttaagcagtttaagaattattctttttcagaatatctacctctactgggataagatcacgtttctttactgtgagcacacagtaggtgctcaataaatgcttgttgcaagaatgaatgac

SEQ ID NO: 9838 - DNA, 715 bp, Homo sapiens
  misc_feature 1, 715: n = A,T,C or G
naactcccccgcggtggcggccgaggttcattattttccttgtctgccaggattggtggcgcaagaagaggtagcctaatatattccataagtttacttagatctttccgtctctgttccaaatcatgacggacccaagtaagaagtgcattcaatattgtctcctcattaggaatgttcatgtcatcactagccaagagctttgcaatttcgctggctggtaataatacaaattcctggtttctgattacttccatgaaatgctccatagtataattgtgagccactttatgcaaatctgtacctgcccgggcggccgaggtactgtattagaacactgggtgtgtcataccgttatctgtgcagaatatatttccttattcagaatttctaaaaatttaagttctgtaagggctaatatattctcttcctatggttttagatgtttgatgtcttcttagtatggcataatgtcatgatttactcattaaactttgattttgtatgctattttttcactataggatgactataatcctggtcactaaatatacactttagatagatgaagaagcccaaaaacagataaattcctgattgctaatttacatagaaatgtattctcttggttttttaaataaaagcaaaattaacaatgatctgtgctctgaaagttttgaaaatatatttgaacaatttgaatataaattcatcn

SEQ ID NO: 9839 - DNA, 2148 bp, Homo sapiens
  misc_feature 1, 2, 3, 4, 5, 6, 7, 8, 9, 10, 11, 12, 13, 14, 15, 16, 17,18, 19, 20, 21, 22, 23, 24, 25, 26, 27, 28, 29, 30, 2146,2147, 2148: n = A,T,C or G
nnnnnnnnnnnnnnnnnnnnnnnnnnnnnngaaggactaacaagacgagcgctctggatcttactaaaggaataagcgtgcggccgcagggccatgctagccttgcgcgtggcgcgcggctcgtggggggccctgcgcggcgccgcttgggctccgggaacgcggccgagtaagcgacgcgcctgctgggccctgctgccgcccgtgccctgctgcttgggctgcctggccgaacgctggaggctgcgtccggccgctcttggcttgcggctgcccgggatcggccagcggaaccactgttcgggcgcggggaaggcggctcccaggccagcggccggagcgggcgccgctgccgaagccccgggcggccagtggggcccggcgagcacccccagcctgtatgaaaacccatggacaatcccgaatatgttgtcaatgacgagaattggcttggccccagttctgggctatttgattattgaagaagattttaatattgcactaggagtttttgctttagctggactaacagatttgttggatggatttattgctcgaaactgggccaatcaaagatcagctttgggaagtgctcttgatccacttgctgataaaatacttatcagtatcttatatgttagcttgacctatgcagatcttattccagttccacttacttacatgatcatttcgagagatgtaatgttgattgctgctgttttttatgtcagataccgaactcttccaacaccacgaacacttgccaagtatttcaatccttgctatgccactgctaggttaaaaccaacattcatcagcaaggtgaatacagcagtccagttaatcttggtggcagcttctttggcagctccagttttcaactatgctgacagcatttatcttcagatactatggtgttttacagctttcaccacagctgcatcagcttatagttactatcattatggccggaagactgttcaggtgataaaagactgatgaaagtcatccctcactgttagtaaggaagcagtatacatcaatgggaacagggcccatggaaatgtacaggagtttccctattttggtgttcagcttgaaaaaggacttgtcagaatcaactgtgtcatcaaaatttaagtaatgtgcattgaaaataaggttgatcatgggaatatgcagaatttccaatgtatttttaaatacaaataaaattgtaatttagaatttttaatcttaggtttcttgattaatttataagagatcaattattgtcagtcttttttgtatgttttttaaaaacatagtccagagcatgggcagaattgacacctctcttttaagtgaaatttggattgctcacaaagcactaggaaatgtcatggggttcaaatatatatcctacacaactgggcaatacatttttgtttgatttttaggtctgtgtatacattaacagttcatgtaattaatacctgatcatttgggataatgaaagtgaagttagttgtagatgaagtaaagttataaaagagattaaaaatgcggtaactttttaagataataatcatacagaaggtatgaagttcattttcggtagtcttccaacctctcaggtgcctaataatttatgtttgaggataacaggtaacaaagatagtcgagataggagaacgtgtctattagtctttgcatctaaaaggcagtgagttacgttcctgccttccactgtgtttctgacatagcaatgtttgtttgatattggaacctggattcatattttatgtaaataatatcaagctgtatatttttcaaaggttttttaaactttggagactctttcttttgttaagcagttaaaggaataaaagagctggaaaaaaaaaaaaaaaaaaggggggccaaaccgggcgcaaacactcttaaaaaaaaaaaaaaaaaaacccttgtgggccgcctgggcccagtcaactttagactcgagcaggtttatgcatgcggccgaaattcgagctcatttggccaattcgccctatagggagtcgtataacattaactggccgtcgtttacaacgtcgggactggaggcgtaatacaaagagccccgaccgatcgcctttccaacagtgcccaccttgatgcaaannn

SEQ ID NO: 9840 - DNA, 8648 bp, Homo sapiens
  misc_feature 1, 2, 3, 4, 8645, 8646, 8647, 8648: n = A,T,C or G
nnnncgggcgtcgtcctggcgtcctctccggattgcgccgcaccctcgcttcctgccagggaggggctgccgggctttggcggctcccgagcatcgagaacggggccagagcagcttcctgcctgccccccgcgaccatagagcgcgggcccagggcgccgcccgcgggtgggggacgttcccaggacggaagtggccgagagagtgtcgaagggagggcgaggccggagcccgagggcgacccgagaagcggcggggcggcgggccggcgggcggggcgcagagccaggcagcgcaggtatagccaggctggagaaaagaagctgccaccatggttgcactttcactgaagatcagcattgggaatgtggtgaagacgatgcagtttgagccgtctaccatggtgtacgacgcctgccgcatcattcgtgagcggatcccagaggccccagctggtcctcccagcgactttgggctctttctgtcagatgatgaccccaaaaagggtatatggctggaggctgggaaagctttggactactacatgctccgaaatggggacactatggagtacaggaagaaacagagacccctgaagatccgtatgctggatggaactgtgaagacgatcatggtggatgactctaagactgtcactgacatgctcatgaccatctgtgcccgcattggcatcaccaatcatgatgaatattcattggttcgagagctgatggaagagaaaaaggaggaaataacagggaccttaagaaaggacaagacattgctgcgagatgaaaagaagatggagaaactaaagcagaaattgcacacagatgatgagttgaactggctggaccatggtcggacactgagggagcagggtgtagaggagcacgagacgctgctgctgcggaggaagttcttttactcagaccagaatgtggattcccgggaccctgtacagctgaacctcctgtatgtgcaggcacgagatgacatcctgaatggctcccaccctgtctcctttgacaaggcctgtgagtttgctggcttccaatgccagatccagtttgggccccacaatgagcagaagcacaaggctggcttccttgacctgaaggacttcctgcccaaggagtatgtgaagcagaagggagagcgtaagatcttccaggcacacaagaattgtgggcagatgagtgagattgaggccaaggtccgctacgtgaagctagcccgttctctcaagacttacggtgtctccttcttcctggtgaaggaaaaaatgaaagggaagaacaagctagtgcccaggcttctgggcatcaccaaggagtgtgtgatgcgagtggatgagaagaccaaggaagtgatccaggagtggaacctcaccaacatcaaacgctgggctgcgtctcccaaaagcttcaccctggattttggagattaccaagatggctattactcagtacagacaactgaaggggagcagattgcacagctcattgccggctacatcgatatcatcctgaagaagaaaaaaagcaaggatcactttgggctggaaggagatgaggagtctactatgctggaggactcagtgtcccccaaaaagtcaacagtcctgcagcagcaatacaaccgggtggggaaagtggagcatggctctgtggccctgcctgccatcatgcgctctggagcctctggtcctgagaatttccaggtgggcagcatgccccctgcccagcagcagattaccagcggccagatgcaccgaggacacatgcctcctctgacttcagcccagcaggcactcactggaaccattaactccagcatgcaggccgtgcaggctgcccaggccaccctggatgactttgacactctgccgcctcttggccaggatgctgcctctaaggcctggcgtaaaaacaagatggatgaatcaaagcatgagatccactctcaggtagatgccatcacagctggtactgcgtctgtggtgaacctgacagcaggggaccctgctgagacagactataccgcagtgggctgtgcagtcaccacaatctcctccaacctgacggagatgtcccgtggggtgaagctgctggctgccttgctggaggacgaaggcggcagtggtcggcccctgttgcaggcagcaaagggccttgcgggagcagtgtcagaactgctgcgcagtgcccaaccagccagtgctgagccccgtcagaacctgctgcaagcagctgggaacgtgggccaggccagtggggagctgttgcaacaaattggggaaagtgatactgacccccacttccaggatgcgctaatgcagctcgccaaagctgtggcaagtgctgcagctgccctggtcctcaaggccaagagtgtggcccagcggacagaggactcgggacttcagacccaagttattgctgcagcaacacagtgtgccctatccacttcccaactagtggcctgtactaaggtggtggcacctacaatcagctcacctgtctgccaagagcaactggtggaggctggacgactggtagccaaagccgtggagggctgtgtgtctgcctcccaggcagctacagaggatgggcaactgttgcgaggggtaggagcagcagccacagctgtcacccaggccctaaatgagctgctgcagcatgtgaaagcccatgccacaggggctgggcctgctggccgttatgaccaggctactgacaccatcctaaccgtcactgagaacatctttagctccatgggtgatgctggggagatggtgcgacaggcccgcatcctggcccaagccacatctgacctggtcaatgccatcaaggctgatgctgagggggaaagtgatctggagaactcccgcaagctcttaagtgctgccaagatcctagctgatgccacagccaagatggtagaggctgccaagggagcagctgcccaccctgacagtgaggagcagcagcagcggctgcgggaggcagctgaggggctgcgcatggccaccaatgcagctgcgcagaatgccatcaagaaaaagctggtgcagcgcctggagcatgcagccaagcaggctgcagcctcagccacacagaccatcgctgcagctcagcacgcagcctctacccccaaagcctctgccggcccccagcccctgctggtgcagagctgcaaggcagtggcagagcagattccactgctggtgcagggcgtccgaggaagccaagcccagcctgacagccccagcgctcagcttgccctcattgctgccagccagagcttcctgcagccaggtgggaagatggtggcagctgcaaaggcctcagtgccaacgattcaggaccaggcttcagccatgcagctgagtcagtgtgccaagaacctgggcaccgcgctggctgaactccggacggctgcccagaaggctcaggaagcatgtggacctttggagatggattctgcactgagtgtggtacagaatctagagaaagatctacaggaagtgaaggcagcagctcgagatggcaagcttaaacccttacctggggagacaatggagaagtgtacccaggacctgggcaacagcaccaaagccgtgagctcagccatcgcccagctactgggagaggttgcccagggcaatgagaattatgcaggtattgcagctcgggatgtggcaggtgggctgcggtcactggcccaggccgctaggggagtcgctgcactgacgtcagatcctgcagtgcaggccattgtacttgatacggccagtgatgtgctggacaaggccagcagcctcattgaggaggcgaaaaaggcagctggccatccaggggaccctgagagccagcagcggcttgcccaggtggctaaagcagtgacccaggctctgaaccgctgtgtcagctgcctacctggccagcgcgatgtggataatgccctgagggcagttggagatgccagcaagcgactcctgagtgactcgcttcctcctagcactgggacatttcaagaagctcagagccggttgaatgaagctgctgctgggctgaatcaggcagccacagaactggtgcaggcctctcggggaacccctcaggacctggctcgagcctcaggccgatttggacaggacttcagcaccttcctggaagctggtgtggagatggcaggccaggctccgagccaggaggaccgagcccaagttgtgtccaacttgaagggcatctccatgtcttcaagcaaacttcttctggctgccaaggccctgtccacggaccctgctgcccctaacctcaagagtcagctggctgcagctgccagggcagtaactgacagcatcaatcagctcatcactatgtgcacccagcaggcacccggccagaaggagtgtgataacgccctgcgggaattggagacggtccgggaactcctggagaacccagtccagcccatcaatgacatgtcctactttggttgcctggacagtgtaatggagaactcaaaggtgctgggcgaggccatgactggcatctcccaaaatgccaagaacggaaacctgccagagtttggagatgccatttccacagcctcaaaggcactttgtggcttcaccgaggcagctgcacaggctgcatatctggttggtgtctctgaccccaatagccaagctggacagcaagggctagtggagcccacacagtttgcccgtgcaaaccaggcaattcagatggcctgccagagtttgggagagcctggctgtacccaggcccaggtgctctctgcagccaccattgtggctaaacacacctctgcactgtgtaacagctgtcgcctggcttctgcccgtaccaccaatcctactgccaagcgccagtttgtacagtcagccaaggaggtggccaacagcacagctaatcttgtcaagaccatcaaggcgctagatggggccttcacagaggagaaccgtgcccagtgccgagcagcaacagcccctctgctggaggctgtggacaatctgagtgcctttgcgtccaaccctgagttctccagcattcctgcccagatcagccctgagggtcgggctgccatggagcccattgtgatctctgccaagacaatgttagagagtgccgggggactcatccagacagcccgggccctcgcagtcaatccccgggaccccccgagctggtcggtgctggccggccactcccgtactgtctcagactccatcaagaagctaattacaagcatgagggacaaggctccagggcagctggagtgtgaaacggccattgcagctctgaacagttgtctacgggacctagaccaggcttccctcgctgcagtcagccagcagcttgctccccgtgagggaatctctcaagaggccttgcacactcagatgctcactgcagtccaagagatctcccatctcattgagccgctggccaatgctgcccgggctgaagcctcccagctgggacacaaggtgtcccagatggcgcagtactttgagccgctcaccctggctgcagtgggtgctgcctccaagaccctgagccacccgcagcagatggcactcctggaccagactaaaacattggcagagtctgccctgcagttgctatacactgccaaggaggctggtggtaacccaaagcaagcagctcacacccaggaagccctggaggaggctgtgcagatgatgaccgaggccgtagaggacctgacaacaaccctcaacgaggcagccagtgctgctggggtcgtgggtggcatggtggactccatcacccaggccatcaaccagctagatgaaggaccaatgggtgaaccagaaggttccttcgtggattaccaaacaactatggtgcggacagccaaggccattgcagtgaccgttcaggagatggttaccaagtcaaacaccagcccagaggagctgggccctcttgctaaccagctgaccagtgactatggccgtctggcctcggaggccaagcctgcagcggtggctgctgaaaatgaagagataggttcccatatcaaacaccgggtacaggagctgggccatggctgtgccgctctggtcaccaaggcaggcgccctgcagtgcagccccagtgatgcctacaccaagaaggagctcatagagtgtgcccggagagtctctgagaaggtctcccacgtcctggctgcgctccaggctgggaatcgtggcacccaggcctgcatcacagcagccagcgctgtgtctggtatcattgctgacctcgacaccaccatcatgttcgccactgctggcacgctcaatcgtgagggtactgaaactttcgctgaccaccgggagggcatcctgaagactgcgaaggtgctggtggaggacaccaaggtcctggtgcaaaacgcagctgggagccaggagaagttggcgcaggctgcccagtcctccgtggcgaccatcacccgcctcgctgatgtggtcaagctgggtgcagccagcctgggagctgaggaccctgagacccaggtggtactaatcaacgcagtgaaagatgtagccaaagccctgggagacctcatcagtgcaacgaaggctgcagctggcaaagttggagatgaccctgctgtgtggcagctaaagaactctgccaaggtgatggtgaccaatgtgacatcattgcttaagacagtaaaagccgtggaagatgaggccaccaaaggcactcgggccctggaggcaaccacagaacacatacggcaggagctggcggttttctgttccccagagccacctgccaagacctctaccccagaagacttcatccgaatgaccaagggtatcaccatggcaaccgccaaggccgttgctgctggcaattcctgtcgccaggaagatgtcattgccacagccaatctgagccgccgtgctattgcagatatgcttcgggcttgcaaggaagcagcttaccacccagaagtggcccctgatgtgcggcttcgagccctgcactatggccgggagtgtgccaatggctacctggaactgctggaccatgtactgctgaccctgcagaagccaagcccagaactgaagcagcagttgacaggacattcaaagcgtgtggctggttccgtcactgagctcatccaggctgctgaagccatgaagggaacagaatgggtagacccagaggaccccacagtcattgctgagaatgagctcctgggagctgcagccgccattgaggctgcagccaaaaagctagagcagctgaagccccgggccaaacccaaggaggcagatgagtccttgaactttgaggagcagatactagaagctgccaagtccattgcagcagccaccagtgcactggtaaaggctgcgtcggctgcccagagagaactagtggcccaagggaaggtgggtgccattccagccaatgcactggacgatgggcagtggtcccagggcctcatttctgctgcccggatggtggctgcggccaccaacaatctgtgtgaggcagccaatgcagctgtacaaggccatgccagccaggagaagctcatctcatcagccaagcaggtagctgcctccacagcccagctccttgtggcctgcaaggtcaaggctgaccaggactcggaggcaatgaaacgacttcaggctgctggcaacgcagtgaagcgagcctcagataatctggtgaaagcagcacagaaggctgcagcctttgaagagcaggagaatgagacagtggtggtgaaagagaagatggttggcggcattgcccagatcatcgcagcacaggaagaaatgcttcggaaggaacgagagctggaagaggcgcggaagaaactggcccagatccggcagcagcagtacaagtttctgccttcagagcttcgagatgagcactaaagaagcctcttctatttaatgcagacccggcccagagactgtgcgtgccactaccaaagccttctgggctgtcggggcccaacctgcccaaccccagcactccccaaagtgcctgccaaaccccagggcctggccccgcccagtcccgcagtacatcccctgtcccctccccaaccccaagtgccttcatgccctagggccccccaagtgcctgcccctccccagagtattaacgctccaagagtattattaacgctgctgtacctcgatctgaatctgccggggccccagcccactccaccctgccagcagcttccagccagtccccacagcctcatcagctctcttcaccgttttttgatactatcttcccccacccccagctacccataggggctgcagagttataagccccaaacaggtcatgctccaataaaaatgattctacctacaaaaaaaaaaaaaaaaaaagcaacagggggggcagcgacgcaaaaaaggaactccctcgagaggcggcccaacacaaaaaaccgtagtacccaagctatctttggaaacacaccgggggccccataaaagagaggcacatcatactacagaacaggcgacgggccagcagaaaaacaagggccggacagcgaacacaggaaaaggtggaaaacgaagggaaagggactcacacgannnn

SEQ ID NO: 9841 - DNA, 1176 bp, Homo sapiens
  misc_feature 1, 2, 1175, 1176: n = A,T,C or G
nnaagcgcctcgcgctgattctcacgggcccggctgccggcccccgctctgccctgcataataaaatggctaatcaggtgaatggtaatgcggtacagttaataagaagaggaagaaccaatggatacttccagtgtaactcacacagaacactacaagacactgatagaggcaggcctcccacagaaggtggcagaaagacttgatgaaatatttcagacaggattggtagcttatgtcgatcttgatgaaagagcaattgatgctctcagggaatttaatgaagaaggagctctgtcgtgtactacagcagttcaaggaaagtgacttatcacatgttcagaacagagaagtgcatttgttatgtggagttatgaagacctacaggcagagagagaaacaggggagcaaggtgcaagagtccacaaagggacctgatgaagcgaagatcaaggcctggcttgagagaactggttatactctggatgtaaccacaggacagaggaagtatggtggtcctccaccagacagtgtgtactctggcgtgcaacctggaattggaacggaggtatttgtaggcaaaataccaagggatttatatgaggatgagttggtgcccctttttgagaaggccggacccatttgggatctacgtcttatgatggatccactgtccggtcagaatagagggtatgcatttatcaccttctgtggaaaggaagctgcacaggaagccgtgaaactgtgtgacagctatgaaattcgccctggtaaacaccttggagtgtgcatttctgtggcaaacaacagactttttgttggatccattccgaagaataagactaaagaaaacattttggaagaattcagtaaagtcacagagggtttggtggacgttattctctatcatcaacccgatgacgaacaagaacgaatcgggggttctcgcttccttggaaatagaggagtcccatgtcgggccaagccgacgccggggtttgttgccaactcacagtgggcgcattgtcacgggggtggggtggccgccgggagaacacagccaacaatgggccgagaatgttgtgtggagaaacagcacaccgcgaaacataacgaacagcttctgttgaaacacaccagcaaagaaatatttgtttttcagcacacacgagtann

SEQ ID NO: 9842 - DNA, 492 bp, Homo sapiens
tcgacccacgcgtccggtttggtaagtaggaaagtttcggttgaggagtaagagctgccgcgggagcagtaacccgcgcgggggaggccgacgtcggtcggagagggggtacgagagctgctggtggtgttgtcgtggccggagcggcccgcgcctgggctgccgacacttcgcggcagtcagagcaccataacatggtgtgggaagtgaagacaaatcagatgcctaatgcagtacagaaactcctgttggtgatggacaagagagcctcaggaatgaatgactcattggagttgctgcagtgtaatgagaatttgccatcttcacctggatataactcctgtgatgaacacatggagcttgatgaccttcctgaacttcaggcagttcaaagtgatcctacccaatctggcatgtgaagggtcacaccagggaagctggagagggttccccttgagaaagctgcagagaatctatgttcctcaggtacct

SEQ ID NO: 9843 - DNA, 1400 bp, Homo sapiens
  misc_feature 1, 1181, 1398, 1399, 1400: n = A,T,C or G
nacccacgcgtccgcccacgcttccgccgcgaaaactgcgggctccgagctgggtgcagcaaccggaggcggcggcgcgtctggaggaggctgcagcagcggaagaccccagtccagatccaggactgagatcccagaaccatgaacctggccatcagcatcgctctcctgctaacagtcttgcaggtctcccgagggcagaaggtgaccagcctaacggcctgcctagtggaccagagccttcgtctggactgccgccatgagaataccagcagttcacccatccagtacgagttcagcctgacccgtgagacaaagaagcacgtgctctttggcactgtgggggtgcctgagcacacataccgctcccgaaccaacttcaccagcaaatacaacatgaaggtcctctacttatccgccttcactagcaaggacgagggcacctacacgtgtgcactccaccactctggccattccccacccatctcctcccagaacgtcacagtgctcagagacaaactggtcaagtgtgagggcatcagcctgctggctcagaacacctcgtggctgctgctgctcctgctctccctctccctcctccaggccacggatttcatgtccctgtgactggtggggcccatggaggagacaggaagcctcaagttccagtgcagagatcctacttctctgagtcagctgaccccctccccgcaatccctcaaaccttgaggagaagtggggaccccacccctcatcaggagttccagtgctgcatgcgattatctacccacgtccacgcggccacctcaccctctccgcacacctctggctgtctttttgtactttttgttccagagctgcttctgtctggtttatttaggttttatccttccttttctttgagagttcgtgaagagggaagccaggattggggacctgatggagagtgagagcatgtgaggggtagtgggatggtggggtacagccactggaggggtcatccttgcccatcgggaccagaaacctgggagagacttgatgagagtgggggcgtgcgcggctaccacaagggaacccctccggagacgcagagaacggcagggcccactgactagtgatcctggcactcatgcgcccccaatatcgtgggggtggattgtgctagtgacactaccatgccnaagaccactgcacgcacccccaccatcaccacctacaccacgaccacacaccaccctaccaccatgccaaccgacacaaccacaacccaccgcaaacaccaccaccacgcccacagaacctccaccgaacaacacacaccaccatcacccacgacaccacactacaccaaccaccagcaccaaactaccactccaccaccacaacccagcacacacnnn

SEQ ID NO: 9844 - DNA, 1612 bp, Homo sapiens
  misc_feature 1, 2, 1566, 1589, 1595, 1603, 1605, 1606, 1607, 1608, 1609,1610, 1611, 1612: n = A,T,C or G
nnagagtggttatggtgattgatggcctcggtgtcacccactgtattgctcttgttctctcttttattcgtcgcgttgtacaccagttggattttcctacacccgctgttggccctttgtcgtgtgtgacccgtagtgcgtggggcagttcagcgctgaccgccgcagttattcatccggtttacgcgaatcctagagcatttctgtagtattcagatttgtcggagtggtaacgcaatgattgatggtgtttcgaacgtgccatgcagggcgaatgtgggtgaccattactggtgcggcaggtctggacgttttgaggttgttgaggttgttgagatgccagactgcacaatggctcagcaataaatgaaagatacaggtctggatatagtgaattaactccagcaaaatatgtaaatccccaagaatgactagcacatgaattttctagtagactcttccctgctgataattttctcttcaacagaaataacctactttttaaagcatgaattattagttgcattgtgtgcaaatcctaatgataactgaatagatttcagaaggtttaaatatttttgttatttttagtaagaaaaaatattgggaagcatagtattaagaagtacatataaataattccctctcgattgccataaaacttcttgtttccataaaggttctccttatcatgagttgtatttaacacacaattattcagtcatcttgactgatagaatgggctatggtcaaacaaaaaaaaaagtgaaaccaatccaaatcaggcaggcacatgatgcagagttgactgttcaaagacagtttagctcaatatagatggaagtactggttagtacaaaaggagaaaaactatgtctaaggagggaagcacataatagaattctattattacaatagaattctataaatacaaaattggataaactttatcagaagcaggtgtttgtcaccattttatatgtgaaactcaggaagttcttgattttttaagagctgtattccttaatctggttacaggctataaaggagataatcatttacatgatcatattctcaaacagatggtcaccaaatggaatcaaaggactgatttgatgtagccggtagtatgataatttgtagttaaatgaaaatacagatagatccagaaaataagtaatttcccagtagccagttaataaattacagacctagaataagcaatttaacaagattagaaaagcaactctgatacaaacgtgttgataacaagtacaataagcatagaaaatttaatgaacatattaattaaaagcattttagaagaaaaatagaaaatcatagtgaaacatttcatataaaatatttagtagaattaatgttacattgctataacaaattcacatatttttaacaaaaatttcttcatatgctattttcactctctgcttctttctttttcttttggttttaattaggcctccttttcatattctttggatgaacctttttccatgccctcagacatcctgttggagtaaatggtttcattcccacaccatgtcntaaggggcatcccatgctgatgngtgacngtccatgnannnnnnnn

SEQ ID NO: 9845 - DNA, 587 bp, Homo sapiens
ccccctttttttttttttttttttttttttctggacagcagcatctgtttattgacaattccaggtcattcctaacacgccgcagcagggctctgtacctgcccgggcggccgcccgggcaggtacttcatgaagcagaccattgggaattcctgtggcacaatcggacttattcacgcaggggccaataatcaagacaaactgggatttgaggatggatcagttctgaaacagtttctttctgaaacagagaaaatgtcccctgaagacagagcaaaatgctttgaaaagaatgaggccatacaggcagcccatgatgccgtggcacaggaaggccaatgtcggatgacaagatggacgaatgccttttccggtgaaccatggcgccagttcagaggacaccctgctgaaggacgctgccaaggtctgcagagaattcaccgagcgtgagcaaggagaagtccgcttctctgccgtggctctctgcaaggcagcctaatgctctgtgggagggactttgctgatttcccctcttcccttcaacatgaaaatatataccccctcatgcagtctaaaatgcttcagta

SEQ ID NO: 9846 - DNA, 192 bp, Homo sapiens
  misc_feature 1, 2, 3, 189, 190, 191, 192: n = A,T,C or G
nnnggagctccatccgcggtggcggccgaggcgctatgccccaggacccattggagacgacatagtacaagggcgcatctcactgaaacaagatagtgatatggggcacgtattaacttaagatgaatgtagaagcaaaaagatttacaagaattagcagtaacaagattgatgctcaagagacataannnn

SEQ ID NO: 9847 - DNA, 2299 bp, Homo sapiens
acgcgtccgcccacgcgtccggtggttgtctcctgcttttattatactgtgacttgttaggaaaccctgggcctcatttggctctcccttgggagaggttgagggtgcacctttatgaacatggaaaggtttatcacagcagttaacccccacttgctcctcccctctataccaagctcttctggtttttcacctgacggggtgggtgtttgggatctattttttcttgctaatttgccaagtattgcactattaataccagcccccgaaatgaaaggaaccaaccacactggtgtgtacaatcagacaagcaaggttgtatattgaggaaatttgagcaagctgccctgaagaaaggcatagtgacaagatgagagagatgcattgtttggagatgtgtttagccagtgcccttcttccccacgagcccccccaaggctcagagcggtactggcttttaaagggaaaggccttcatttcttcgtttatccccccagcagcgctggagagcgaggtggcttcaataagcctggtggtaagtttttgagtattaccatagatagtgtttaaaaaaaaatgcagtcagtttttagaaaactataatttttttattagtttcataagtggtttaaaaatgatctatacaaaagagactaatgggtactgccggcattgtcttaggggttaataaggttaacctatggttacaaaacaaagggtaacttgaagtattgagtaactgcttctgtaatatgggggagaataaatttttaaatttggtttatttagaggaaaaattttgacttaaatttaacactgatttggcacataagcattgagagtgtatttggttaatggtttagaagcaaaccagcaaaggaaaaaagcaaaccctagcaaacctttcacaaatgttaaagagacactgctccattttagcagtgcgggtcattttgagtttaatgaatccccatcaaatggtggtatagtagatagctatgtgtgtttgtaaggtttgtagcttgcaagacgtgcactaataatattttatatgatctttcctggttggcaggacccatggatgaaggaccagatcttgatctaggcccacctgtagatccagatgaagactctgacaacagtgcaatttatgtacaaggattaaatgacagtgtgactctagatgatctggcagacttctttaagcagtgtggggttgttaagatgaacaagagaactgggcaacccatgatccacatctacctggacaaggaaacaggaaagcccaaaggcgatgccacagtgtcctatgaagacccacccactgccaaggctgccgtggaatggtttgatgggaaagattttcaagggagcaaacttaaagtctcccttgctcggaagaagcctccaatgaacagtatgcggggtggtctgccaccccgtgagggcagaggcatgccaccaccactccgtggaggtccaggaggcccaggaggtcctgggggacccatgggtcgcatgggaggccgtggaggagatagaggaggcttccctccaagaggaccccggggttcccgagggaacccctctggaggaggaaacgtccagcaccgagctggagactggcagtgtcccaatccgtatgtacttgtcttggcaaattgataccctacgagtgaagccacccttccctcaccccatccccactctagagtggattgctctgtctagaggaacagaatgatgaccctgatggctggttagggacactagtcagccattcactggacgcttcagagccttctgaagattgatttgacctgtcctgtgggtgcaatgctgcctgaggctgtgccctaaagcatgggtgtacatagatcctcttgatagtgagtgtgtacctgttcacacaccacctttccttgtttatcttccttagttcaattggtgatttctgctgtgatgtaattgtatgcaggggttgtggaaaccagaacttcgcctggagaacagagtgcaaccagtgtaaggccccaaagcctgaaggcttcctcccgccaccctttccgcccccgggtaggtgcaggtttcatgagtgtcccctcagcttcctggtgctaaacctcttttcttatttgtgggcttggtaaactgcagttgccctctgcttaacaactttgagttgtcgtgtcctcatttctaaattgtcagcccgatgccgagattgagtgaagtgtctggtttgttctgctgtgagagaaggaagcagagcagctttcacagtgtccacagggccttt

SEQ ID NO: 9848 - DNA, 2285 bp, Homo sapiens
  misc_feature 1, 2283, 2284, 2285: n = A,T,C or G
nagggagtcgacccacgcgtccgtttttttttttgatttataaacatttttaatgactgtgttaaaaaaccatcatacaaaaagaaaagaaagttgttttcaacttaaaaaaaatccttatataatgtaccactcatctgggatatgcttctgggagggggacactccctgcttgggctgcagcagaaggcagtggggagaaagtcttaaagttctgggagtcaggctagcccctcctgcaggtgtcctcattgccacttcttggtccctgtggtcaaggttcaaagtgccaaaagacccactgatcgaacctgagactgttgagatgtcctgttcccaacagagagtatctgaactccagaaacttccctctcaggcctccactcccccctcctttgtactgtgcatcctactctgacttccgtggctggggcagatcaaatgtacattctcagtgtcccctggtaacaacctctcccttgcctctgatttgcgaggcacagacaaagctgacaaggccttcttccaggaggctgctctgctttctcctctcctaccccagcttttggctcctggcttctctggaaagccacaggactccaccagcttctctctgccaacagttcagtcttcagggctggagctgcagggtctgcggaattcctgtccatactcatgtatccacttgttggccacccacttatctcccaccaggacaggacagccagcatgaagtgtgtcactgtccccttcaccactcctgtgcaggttccaccaaaacagtgctgcattcctaaccacaggcacgctgaggttggcatagatgaaggctgtggctcctccagcttccaccgagctcagatagatcataaatgttgcaactcggtttcctgacttcattctgtagagggggctgcttggtgacgtagcatggtcaaagtgaggctcatagtgtcctccgatgccatagttcaccacctgcagatactctgcatagggaggccggacatcaaggcctgtgagggcagcaatgcggtggttgagggtcaccagttttgggtcaacagtgtccttcagccaggcacttttgctgatgcggtactccacttgtaactgcttctcccctgatgccaccactgacctctgtagccatggttctgcaagttctctaattttctgagcctctgagtcactgacgaagtcatggtagagagcaatgtagggctccaggtggatgacctccttccggatgggctggagcagcaggtaggcgttggaattggtctcataggaacagtagaggctagggatctggtagagagtgggctgggaacccagggtctgacatagcccctcgtaggtgtctctggtctgcaggtggggtatattgggcctctggatgacagcctcagctaccacgtggttggggctctctgccaagagcctttcatatttcaagacattcctggccatcctcttattatctgggctgtagagaagaaactcccgagaggtgctgagggcacacgaaacatttcctgcccggaaataagcaaaggccaagtgatccaaggcatcttctagacttgcctcatcctctgtcttccactctccgtaagatcctcggaagagactgacagcctcctccagccatggaatggcatggtaataatcccccatgtcataggccaccttgccaacttggaagcagtcatcccctgtgagagaaaagagccgtttggggctgtacaggtcagtgatggcagagccagtgactctctgaaagacacctcgtgccaggcctttcacattgagcatgtacacgtcctgcagccgcatcagggcccttgctgctccctcaaggtcctcaaaggctggaaggtcttgctccaccttctcatagccatccttcagagctcggatgttctcactggcctccagactatgtaccacattcctccagtcagactgcaggcgtttgatgagagtaaatgcaagcagagggttagccacaggggttgttgaatcctcatgcaaagaaagtaccttgtcgtagaatctagtcaggtcccgcagccgcgcctcctccccgcgcaggtaccgcctcagcagccccagcagccggcgctcgggcgccagggcgcgcgccacgctggtcagcgccgagaacgtgtcgccccgagccgcagccctttctgggtctcctgtcccgagcgccagcaccgccagcagcgccgccagccgcgccccaggacccatagccagcgctagacggtggtcgannn

SEQ ID NO: 9849 - DNA, 3144 bp, Homo sapiens
  misc_feature 1, 3143, 3144: n = A,T,C or G
ncgacccacgcgtccgaaacttttcccctcccgttcccggtcccttttgtctttcttggacgcggtggcggcgccgcctgagcggcgactccctctcccctgcccggcttgctgcgcccggtgccctccgagggcaggcgcgcctggactctgcgcccggatggcggcggccctctgtgagcaccggcagcggcgcatcccctgccccgaggcctccggtgcccccccggcgcgggcataggggcgcccccaccctccgtccgcttgcaccccttgccacccgccccctcgcctgactcatccgcccgcggtggccgcccgagccctgggatggggagggagaccgcggctgcccgcggcggccgagattcccgctgacgcccccgaccctgccgccttcttcgtccgcctccagaggcgcccgacgtcccgacagctcctggagtgagaccaggactgagaacagggagaggcgacccgacccccagggcccggtgctcaggacagcacacagagccgctgaaaacgactgaagagagcaagggatttcctgggacatctggctctggagagtaaaaggccaagctatgatagcaactggtggagtgataactggcctggccgccttgaaaaggcaagactctgccagatcacagcagcatgtcaacctcagcccgtctcctgctacccaagagaagaagcccatcaggcgccggccccgggcagatgttgtggttgttcgtggcaaaatccggctttattccccatctggtttttttcttattttaggagtgctcatctccattataggaattgctatggccgttcttggatattggccccaaaaagaacattttattgatgctgaaacaacactgtcaacaaatgaaactcaggtcattcggaatgaaggcggtgtggtggttcgcttctttgagcagcatttgcattctgataagatgaaaatgcttggcccattcaccatggggattggcattttcattttcatttgtgctaatgccattcttcatgaaaaccgtgacaaagagaccaaaatcatacacatgagggatatctattccacagtcattgacattcacacgctaagaatcaaggagcaaaggcaaatgaacggcatgtacactggtttgatgggagaaacagaagtaaaacagaatgggagctcctgtgcctcgagattggcagcaaatacgatcgcctctttctcgggttttcggagcagttttcgaatggacagctccgtggaggaggatgaacttatgttaaatgaaggtaagagttctgggcatcttatgccccctttgctctctgacagctctgtgtctgtctttggcctctatccacctccttccaagacaactgatgataagaccagcggctctaagaaatgtgaaaccaagtcaattgtgtcatcgtccatcagtgcttttacattgcctgtgatcaaacttaataactgtgttattgatgagcccagtatagataacatcactgaagatgctgacaacctcaaaagtaggtcaaggaatttgtcaatggattcccttgtggttcctttgcccaacaccagtgaatccttccagcccgtcagcacagtgctaccaaggaataattccattggggagtcgttgtcgagtcagtacaagtcatctatggctctcggacctggggctggacagctcttgtctcctggggctgccagaagacagtttgggtccaatacatccttgcatttgctctcgtcacactcaaagtccttggacttagaccggggtccctccactctaactgttcaggcagaacaacggaaacatccaagttggcctaggttggatcggaacaacagcaagggatatatgaaactagagaacaaagaagacccgatggataggttgcttgtgccccaagttgccatcaaaaaggactttaccaataaggagaagcttcttatgatttcaagatctcacaataatttgagttttgaacatgatgagtttttgagtaacaacctaaagaggggaacttctgaaacaaggttttaatgttaaaagaatatatcattttacaagggtatatattttaaaacgattttcactggtgtttccttcttaaagtattggctgtaagcctttttaatcaaatggtttgtagtgtattagaattggctgcttagttctgtaatgaagatggttgtatgtttgggttacttgtgactgcagtactctatgttaccacacatgattttatttttctcttcctttgaaagcatgatctcttttattaatatgaatgcaaaatgcttgcatccaaattaaagcttattttctttacttttaagttctttgattgccctattcataaaatgaaatgtccagtatggaaaacatagggtaccaaagtgtggaccaggagtacaaattcagtcccaatactcaatacgtattatagatgactatgagtgcaaaccttaggatgtgattttctgaataattgttctttgtaggatttggttacattatttaaaatgaaaaagatctagttttagtgtgagctcagtaatgttaattggttaagttcattgtgaatcttgagttttagataagtagttatttttttcaatatcacttctgtttttagtgatattatatcaagaaacaacgtattcaagagccatggctgacagtgccagatatacttagggataaacatcaaaatgcaattatagttgctataacgttagatactcggaatcaaaatttatttgcaagctgacttgataaactaaatgaaccaataaaatttgtagaaatgctatcctgaaataattatatacatgaagacaatgttgactaatgaattaagatacattatatactagttaatgctaactagtctcagtacctgtttttagccatctgttactgtccaatagcacctcattcccacattctattttcccccggcattctttagatcctagtatttggaaaaccacgggaccgacttcttttactcatgtcccattcgggtacaaaaatggttcgaactgcggagtaccgggggggggccttataccacacatcgaaaagcgctgggagggtccagaaagataggggccaaann

SEQ ID NO: 9850 - DNA, 1976 bp, Homo sapiens
  misc_feature 1, 2, 3, 4, 5, 6, 7, 8, 9, 10, 11, 12, 13, 14, 15, 16, 17,18, 19, 20, 21, 22, 23, 24, 25, 26, 27, 28, 29, 1975, 1976: n = A,T,C or G
nnnnnnnnnnnnnnnnnnnnnnnnnnnnnagagacaaagtcttgctctgtcacccaggttgcggtgagctgagattgcgccattgtactccagcctgggcaagaagagcgaaactctgtctccaaaaaaaaaaaaaaaaaaattattaatacttttaaagactgagctgtttaagaattttttggggaacatttctagcagtgatttttttggcctttaatgatagcgtaaagacaggagccttacaacttaggcaaagcatttcacatgcagtccttcttccatctcaaaatatgtacttattttacatacagaattttacactaaccattgaaaaataaagtaggatctgctacagtttcacctgaaaatttataaaaagtgttgagattggtagaaggtagtttttaagtacatgtgcactaccctaaaagacttgtctattgtcaataaagtgttagtatttgtgaaattattattcctgttcagaaatactatttcttaaatctcctgggaatttgtggcataataaagcacattcaaagttctaatgtatttatgagctcattttcaaaatagtaagtttgtcatctttaaaatgaacatgacttgcctccttgatttctgaaatgaattaattgaagattgctatagtaatctttatttcatctttctagagttgttgacaattttattatacaacagttaccattagagaaggagggaagggcttttgggtgtgtatttataggtactaagggatttactaaatatagtagattagcactgtcacacttgttcaagtagtttcaaacatagaaaattaagtatcaggtatgtggagcaatgtagtttttttttttcttcagtttaaaaaatttttaattgtggtagaagcaatgtattcttaaggtgaaaaacctacctcggttacatgtggtttgtgttttttggattaatctggattttataattagaaataaaaatgtaagattttgaatccacttaatttcttgaaaatagtacaagtcagtgtaatagagaagcattcatatattcaacactgtaagacaaaacagcagagaccttggatttgataattgatctgatatcctggacagtattcatatgtacagtgataggtatctttctttggagttttttttttgtgcatatgtgtatagttttatgggttctgagttggtgaccagtaagttgcatgtagtgctggcacttacttaataactattcatgatattgttaataacttgttataggattgtattcccaattacagtctctaagattgtaattgatattatctgagaggtagtgtgacaactttcttttgttgttacattaagccgaaaacataatactaatagacaactaacagtttgcttatcaggcacatcaactaaggcacctccccccatgctaagtttctcctggatatatggaagttgattgtttcccagtttaaaaacttgaactaatatctcctaagaaaatctgagtccatattgtttttattttacttagctagaatctcatagcatgttaaagtcatatccttatccccactaaaaataactatgtctatgtgagaggaatatagtatgtgggaagctgtattacaatactatcacaggtgttacagaatctttaaataaatggacatggccaatctccatctagtagtgtacgactatatagtgcatgtcagtagccaaaatgcagtctagataagcgtctatctgatagtttctccaaaagtactcttgggtaagatcagccatgtttcagatctaagttaagttcctctattgtcaactctccgatgggggtgaaactggctcttggcaatctcccttccgcaagtgccgagaccttagcattgcgcgaaaatcgctagaccacgcggcgtaggccaggattcatccgcgcggaaccgtcaccacggcagagagggagnn

SEQ ID NO: 9851 - DNA, 7879 bp, Homo sapiens
  misc_feature 1, 2, 7877, 7878, 7879: n = A,T,C or G
nnctcctctggatcttaactactgagcgcaatgctgagccatggagccgggttggccttgtggatcacactgagcctgctgcagactggactggcggagccagagagatgtaacttcaccctggcggagtccaaggcctccagccattctgtgtctatccagtggagaattttgggctcaccctgtaactttagcctcatctatagcagtgacaccctgggggccgcgttgtgccctacctttcggatagacaacaccacatacggatgtaaccttcaagatttacaagcaggaaccatctataacttcaagattatttctctggatgaagagagaactgtggtcttgcaaacagatcctttacctcctgctaggtttggagtcagtaaagagaagacgacttcaaccggcttgcatgtttggtggactccttcttccggaaaagtcacctcatatgaggtgcaattatttgatgaaaataaccaaaagatacagggggttcaaattcaagaaagtacttcatggaatgaatacacttttttcaatctcactgctggtagtaaatacaatattgccatcacagctgtttctggaggaaaacgttctttttcagtttataccaatggatcaacagtgccatctccagtgaaagatattggtatttccacaaaagccaattctctcctgatttcctggtcccatggttctgggaatgtggaacgataccggctgatgctaatggataaagggatcctagttcatggcggtgttgtggacaaacatgctacttcctatgcttttcacgggctgtcccctggctacctctacaacctcactgttatgactgaggctgcagggctgcaaaactacaggtggaaactagtcaggacagcccccatggaagtctcaaatctgaaggtgacaaatgatggcagtttgacctctctaaaagtcaaatggcaaagacctcctggaaatgtggattcttacaatatcaccctgtctcacaaagggaccatcaaggaatccagagtattagcaccttggattactgaaactcactttaaagagttagtccccggtcgactttatcaagttactgtcagctgtgtctctggtgaactgtctgctcagaagatggcagtgggcagaacatttccagacaaagttgcaaacctggaggcaaacaataatggcaggatgaggtctcttgtagtgagctggtcgccccctgctggagactgggagcagtatcggatcctactcttcaatgattctgtggtgctgctcaacatcactgtgggaaaggaagaaacacagtatgtcatggatgacacggggctcgtaccgggaagacagtatgaggtggaagtcattgttgagagtggaaatttgaagaattctgagcgttgccaaggcaggacagtccccctggctgtcctccagcttcgtgtcaaacatgccaatgaaacctcactgagtatcatgtggcagacccctgtagcagaatgggagaaatacatcatttccctagctgacagagacctcttactgatccacaagtcactctccaaagatgccaaagaattcacttttactgacctggtgcctggacgaaaatacatggctacagtcaccagtattagtggagacttaaaaaattcctcttcagtaaaaggaagaacagtgcctgcccaagtgactgacttgcatgtggccaaccaaggaatgaccagtagtctgtttactaactggacccaggcacaaggagacgtagaattttaccaagtcttactgatccatgaaaatgtggtcattaaaaatgaaagcatctccagtgagaccagcagatacagcttccactctctcaagtccggcagcctgtactccgtggtggtaacaacagtgagtggagggatctcttcccgacaagtggttgtggagggaagaacagtcccttccagtgtgagtggagtaacggtgaacaattccggtcgtaatgactacctcagcgtttcctggctcgtggcgcccggagatgtggataactatgaggtaacattgtctcatgacggcaaggtggttcagtcccttgtcattgccaagtctgtcagagaatgttccttcagctccctcaccccaggccgcctctacaccgtgaccataactacaaggagtggcaagtatgaaaatcactccttcagccaagagcggacagtgcctgacaaagtccagggagtcagtgttagcaactcagccaggagtgactatttaagggtatcctgggtgcatgccactggagactttgatcactatgaagtcaccattaaaaacaaaaacaacttcattcaaactaaaagcattcccaagtcagaaaacgaatgtgtatttgttcagctagtccctggacggttgtacagtgtcactgttactacaaaaagtggacaatatgaagccaatgaacaagggaatgggagaacaattccagagcctgttaaggatctaacattgcgcaacaggagcactgaggacttgcatgtgacttggtcaggagctaatggggatgtcgaccaatatgagatccagctgctcttcaatgacatgaaagtatttcctccttttcaccttgtaaataccgcaaccgagtatcgatttacttccctaacaccaggccgccaatacaaaattcttgtcttgacgattagcggggatgtacagcagtcagccttcattgagggcttcacagttcctagtgctgtcaaaaatattcacatttctcccaatggagcaacagatagcctgacggtgaactggactcctggtgggggagacgttgattcctacacggtgtcggcattcaggcacagtcaaaaggttgactctcagactattcccaagcacgtctttgagcacacgttccacagactggaggccggggagcagtaccagatcatgattgcctcagtcagcgggtccctgaagaatcagataaatgtggttgggcggacagttccagcatctgtccaaggagtaattgcagacaatgcatacagcagttattccttaatagtaagttggcaaaaagctgctggtgtggcagaaagatatgatatcctgcttctaactgaaaatggaatccttctgcgcaacacatcagagccagccaccactaagcaacacaaatttgaagatctaacaccaggcaagaaatacaagatacagatcctaactgtcagtggaggcctctttagcaaggaagcccagactgaaggccgaacagtcccagcagctgtcaccgacctgaggatcacagagaactccaccaggcacctgtccttccgctggaccgcctcagagggggagctcagctggtacaacatctttttgtacaacccagatgggaatctccaggagagagctcaagttgacccactagtccagagcttctctttccagaacttgctacaaggcagaatgtacaagatggtgattgtaactcacagtggggagctgtctaatgagtctttcatatttggtagaacagtcccagcctctgtgagtcatctcagggggtccaatcggaacacgacagacagcctttggttcaactggagtccagcctctggggactttgacttttatgagctgattctctataatcccaatggcacaaagaaggaaaactggaaagacaaggacctgacggagtggcggtttcaaggccttgttcctggaaggaagtacgtgctgtgggtggtaactcacagtggagatctcagcaataaagtcacagcggagagcagaacagctccaagtcctcccagtcttatgtcatttgctgacattgcaaacacatccttggccatcacgtggaaagggcccccagactggacagactacaacgactttgagctgcagtggttgcccagagatgcacttactgtcttcaacccctacaacaacagaaaatcagaaggacgcattgtgtatggtcttcgtccagggagatcctatcaattcaacgtcaagactgtcagtggtgattcctggaaaacttacagcaaaccaatttttggatctgtgaggacaaagcctgacaagatacaaaacctgcattgccggcctcagaactccacggccattgcctgttcttggatccctcctgattctgactttgatggttatagtattgaatgccggaaaatggacacccaagaagttgagttttccagaaagctggagaaagaaaaatctctgctcaacatcatgatgctagtgccccataagaggtacctggtgtccatcaaagtgcagtcggccggcatgaccagcgaggtggttgaagacagcactatcacaatgatagaccgcccccctcctccacccccacacattcgtgtgaatgaaaaggatgtgctaattagcaagtcttccatcaactttactgtcaactgcagctggttcagcgacaccaatggagctgtgaaatacttcacagtggtggtgagagaggctgatggcagtgatgagctgaagccagaacagcagcaccctctcccttcctacctggagtacaggcacaatgcctccattcgggtgtatcagactaattattttgccagcaaatgtgccgaaaatcctaacagcaactccaagagttttaacattaagcttggagcagagatggagagcttaggtggaaaacgcgatcccactcagcaaaaattctgtgatggaccactgaagccacacactgcctacagaatcagcattcgagcttttacacagctctttgatgaggacctgaaggaattcacaaagccactctattcagacacatttttttctttacccatcactactgaatcagagcccttgtttggagctattgaaggtgtgagtgctggtctgtttttaattggcatgctagtggctgttgttgccttattgatctgcagacagaaagtgagccatggtcgagaaagaccctctgcccgtctgagcattcgtagggatcgaccattatctgtccacttaaacctgggccagaaaggtaaccggaaaacttcttgtccaataaaaataaatcagtttgaagggcatttcatgaagctacaggctgactccaactaccttctatccaaggaatacgaggagttaaaagacgtgggccgaaaccagtcatgtgacattgcactcttgccggagaatagagggaaaaatcgatacaacaatatattgccctatgatgccacgcgagtgaagctctccaatgtagatgatgatccttgctctgactacatcaatgccagctacatccctggcaacaacttcagaagagaatacattgtcactcagggaccgcttcctggcaccaaggatgacttctggaaaatggtgtgggaacaaaacgttcacaacatcgtcatggtgacccagtgtgttgagaagggccgagtaaagtgtgaccattactggccagcggaccaggattccctctactatggggacctcatcctgcagatgctctcagagtccgtcctgcctgagtggaccatccgggagtttaagatatgcggtgaggaacagcttgatgcacacagactcatccgccactttcactatacggtgtggccagaccatggagtcccagaaaccacccagtctctgatccagtttgtgagaactgtcagggactacatcaacagaagcccgggtgctgggcccactgtggtgcactgcagtgctggtgtgggtaggactggaacctttattgcattggaccgaatcctccagcagttagactccaaagactctgtggacatttatggagcagtgcacgacctaagacttcacagggttcacatggtccagactgagtgtcagtatgtctacctacatcagtgtgtaagagatgtcctcagagcaagaaagctacggagtgaacaagaaaaccccttgtttccaatctatgaaaatgtgaatccagagtatcacagagatccagtctattcaaggcattgagaatgtacctgaagagctcctggataaaaattattcactgtgtgatttgtttttaaaaacttgcttcatgccctacagaggtgccagctatttctgttgatactatgtataatttattaatctggagaatgtttaaaattttatataatttaaaggtaacagatattattgtacatagttgtattttgtagtttcttctgtaaatatgtatttttcataatgtttaatattaagctttatataatactatttttccacactaaagtgttcatgacttgttctacataaaactaattcaacctgtatgacaggactactggtaaaatgcatatggaggtggtggcagagacaatccttcaggccatgttttctacctgttttgatattcactggacaggaaaaagggcagggctagagagagcaaatactatggctagatttgctgcattgctgtcccatgaatctcgagagccaacagacatgtcctaacttgctattaggacaaatgtgacagtcaaaaaaaggattagagggagggagaaaaaagaattaagcagtaccaaagctgaactagatgcttgtgtctgaactagttgctctctctctcctttctccttccagggattcaagccaaagtggtcagctcagggatcatgtaacttgcagtgcaagcccaggatggtaggatgcagggttgagggttctgatagagaatgattccaaacagaagtgatgaattccttttgttaataagatgccagctatacccagactggaaacataacatgcaaagcactatctacagtgattagagatcctttcattgcattcatggtgtggagtgtgaacatccacacccatactgtaatgtatttatacacactagtttctgtctcattttcagtggtctccattcctagaaaagtcacaattatccattcctacttgatttcccattaaaagaatattatggtagcagattgtgcccctcattaaaaggcttaatgccaacattttcatagaaatgactacaaacatcatatatagtaaatttaaaaacaatagcaaaaacaaaaacagtggtcttcagtaaaattttcaaaacttcttttagtaaatcaatgaagtcaaaatgtcaagtaatcacccaaagttgcatttaataacaaaaggcactacatactgtaccaagtttatcttcaatatttgtgccttacttactttgactataacaaattccaatgagtcagaaagtatttccttcatcaaggtccagttccgacagcattcctgggaaaaatttgaaaggagtttgtacggaatcttcatagatacctgagaagatgagctggagatgtttgcctttttcacactacaaatttttctgtaataaacttgggaattagaggtcaagtttgttgatggcatagcttcctttgcataaagagtatatttcttttcaaagtatatatttttgtaacctaccataaagtccgtaagtgaatacaacgaatgtaattgacataataattgaaaatcattgactatacctaaaatagttctttataattaaataactctacacccaatctggaaatttttccaaggttatttgaagtttacaaaaatgtgaagcataatcataagcttcaaagattcacagtttcattgtgctcaatgctcttgtgaaatgacagtcttaagctctgattctgtatcaaggaactaagtgaatcttctggaaatgaaaaggaacaacatatgtgtaagtgcagtagatgtaccaccagcgagaaaatagaggtcagagatctacaacgtgtggcatccattagaaatcacctttcctacannn

SEQ ID NO: 9852 - DNA, 1332 bp, Homo sapiens
  misc_feature 1, 2, 3, 1332: n = A,T,C or G
nnnatcattacattactccaaccaatcacgcacaccctctttcatttttttcgccccagctatcacacacaaagttgtcccccgtctgataaatgctcacccttaactcctcctgaggaaagccaccgctaaggcttgctaattactccccggacatataaccgtctaactccccagccatcaaccgtattattgtccaacaccccctacgggtttcctaaatattagtaatattccgcccattcaccaaagaatatcatttttcaatacaataggaaaggcagcccccggtcttaagatcaatctgcagatgtaaacatttttaataaggatacaactaaaggacaatgaaactcaagtacattatcagaaacagtggttgacctcttttttcctttactcccttttcatctgagagagccttttagagatccggaatcatttgctgtctgcaattactataggctttggctcacaattctggggaaaatgccaattgaaggaaccctgcctatacattttattttctttttcttcgagacagacaacctcaaaataaggtccaaatattggttccttcaaatggtgtcaaaaagaatagtattatatgaggaggatagttatcacagaataagaactaaaatcccattttttttttttaggaaaaaaagaccttcgatgatgcaggtgtctgtgtataaggaactatgacctaccaaaaaaaccaccacataaggagaggccaatataatttgccagtctgacaagacagttggtattataagtggaagagacctcaaggatcacataattcagctctttgattttagagggaggaaagacgaggcccagagatgggaagtggcttgcctaagtacattagcaagttagcttcaatggttatttttatacacacacaggcacacatacatactgttgcattgacttctgttttgtacataaaatgctactggctcatacaatacatcaataagtatgcaacttttcatttgttatttcgttgctggaagtgggaaataccccatcttcccaggagtgaaatggttctactttctctccgtggtgccctgtatcattactcagctctgctgctgctctccgcagcccctaaaagtagcatggatcggggaagaaggaaggacggcaggaaggcaggcagagatcctcaactcaaatcacaattggagtgtcttgttgtgtcaaagatgttcccactggcagtgaagactttacatgaagttaagcttgggctgttgaaacttccagacctggctggaaggaggagatgggggatctaggccaacaccaggn

SEQ ID NO: 9853 - DNA, 1184 bp, Homo sapiens
  misc_feature 1: n = A,T,C or G
nacagttgcccccgggatgattgacaccgggctcatgccccccgcccggagtttagtttctcccaggtctgcccttaccgtggcccccccagattctttcgcaatgtgacacctcgggaaatattgccaaaaagagaccattgggcttggtatcaacccagcgtggtctggggctttcttttttccagccagctttaggagggctgatcgaaccccagtctttgttaatgttatattcttaagcagtctgaatttccaatcaaatgcccacacctccagatcctgaactatgaagtcttcctttttggaaagaatatcattattgaaagtgctgcaagagttgcttcgtccgtggtataaatcagcatctagccataaaccaaatcgtccccctccaccaccaagttctaaagaacttatgtctccattgataaagtatgaattttctccactccacttaaagaccttaaaatgagggctgaatgtgtagagaaaagtttcgcctgtgccataatagtggtcactgaacttgaaaggatgagttgcatatgctccaaaaatctgattatccatatctttgatgaccaataggacaggactgtctagtgatgccgatttccggtagagcgtctttaagctggtcccgtgctctaacgtgctataggccagtctccatggatacccttgcacccttgcaggaaggcgtcgggccagctgctcgatgtgcatattctccaggagcgcgctgtggggccgtaggacaggcagcacctcttcgtcctcgtcttcatagtagctgcatgtgctcttcctgcgctttgcctcttcaacagtgatgatcttcacaaaaggctcttcgtcaggtctggcacaatagaaaatctggatgtccaagggtaatctttggcctctcattgtgagcagtgagaagtgtggctctctctctaatgaggaacaagttttctctctactctgcttccacaccacagttacttgtagccacgctgagctacaactgttttctcagtatctagtttcctgcatgattgagtttctgtttccctcaggagaagtttcaacatttctacaggaacacacccaaattaggatttagagcaaacacacttcctgccaggcatcgctgtgagactgtaaaaggacactttcacctttgaaacggtggt

SEQ ID NO: 9854 - DNA, 5085 bp, Homo sapiens
  misc_feature 1, 5070, 5071, 5072, 5073, 5074, 5075, 5076, 5077, 5078,5079, 5080, 5081, 5082, 5083, 5084, 5085: n = A,T,C or G
naacctatctcctgccaacagcaagcgacccatggctttgtggacaactcatttcttgatatcaaaagaattcgtgttggggaggagctgtctgcaggacaaggtggcctccaaataaacaatggacaaagtcagattatgtcagggaccttgcctatgagccaagcacccctgcgaaagactaacactctgccatcccatacacattctcctggcaatggcctgtttaacatgggcttaggggaggtaaagaaggagccaggagagactctgtcttgcagtaagcacatggatggccaaatgacccaagagaatatttttcctaataggtacggagacgaccctggagaacaactgatggatcctgagctgcaggaactgttcaatgaactgaccaacatatctgtgcctcccatgagtgaccttgaactggagaacatgatcaatgccaccataaagcaggatgacccatttaacattgacttgggtcagcaaagccagaggagcacacctaggccctccttacccatggagaaaatagtgatcaaaagtgaatactcaccgggcttgactcagggcccctcaggctctcctcagctgaggcccccatcagctggccccgcattctccatggccaactctgccctctccacttcgtctccaatcccttcagtccctcagagccaggctcagcctcagacaggctccggagcaagccgggccttgccaagctggcaggaagtatcccatgcccagcagctcaaacagatagctgctaatcgtcagcagcatgcccggatgcagcagcaccagcagcagcaccagcctaccaactggtcagccttgccctcctctgctggaccatcaccaggtccatttgggcaggagaaaatccccagcccttcttttggtcagcagacattcagcccacagagctcccccatgcctggggtagctggcggcagcggccagtcgaaagtaatggctaactacatgtacaaggccggcccctcagcccagggtgggcacctagatgtcctcatgcagcaaaagcctcaggatctcagtcgaagttttattaacaacccgcacccagccatggagccccgtcagggcaacaccaagcctttgtttcattttaactcagatcaagcgaaccagcagatgccttctgttttgccttcccagaacaagccttctctcctacactacacccaacagcaacagcagcaagggcagcatcagcaacaacagcagcagcagcaacagcagcagcagcagcaacagcaacagcaacagcaacagcagagttcaatttcagctcaacaacagcaacagcagcagagctcaatttcagcccaacagcagcagcagcagcaacaacagcagcagcagcagcaacaacaacagcaacaacagcagcagcagcagcagcaacaaccatcttctcagcctgcccaatctctaccaagccagcctttgctaaggtcacctttgccacttcagcaaaagctcctacttcagcaaatgcagaatcagcccattgcaggaatgggataccaagtctcccaacaacagagacaggatcaacactctgtggtaggccagaacacaggccccagtccaagtcctaacccctgctcaaatccaaacactggaagtggttacatgaactcccagcaatcactgttgaatcagcaattgatgggaaagaagcagactctacagaggcagatcatggagcagaaacagcaacttcttctccagcagcagatgctggctgacgcggagaaaattgctccacaagatcagataaaccgacatttgtcaaggccacctccagattataaagaccaaagaagaaatgtgggcaatatgcaaccaactgctcagtattctggtggctcatccacaataagcttaaactctaaccaggctttggcaaacccagtttcaacacacaccattttaactcccaattccagcctcctgtctacttctcacgggacaagaatgccatcattatctacagcagttcagaatatggggatgtatggaaatctgccttgtaatcaacctaacacatacagtgtcacttcaggaatgaatcaattgacccaacagagaaacccaaagcaattgttagcaaatcaaaacaaccctatgatgccacggccacctaccttagggccaagtaataataacaatgtagccacttttggagctggatctgttggtaattcacaacaattgagaccaaatttaacccatagtatggcaagcatgccaccacagagaacatcaaacgtaatgatcacatccaacacaactgcaccaaactgggcctctcaagaaggaacaagcaaacagcaagaagccctgacgtctgcaggagtccgcttccccacaggtacacctgcagcctataccccaaatcagtcactgcaacaggcagtaggtagccagcaattttcccagagggcagtggctcctcctaaccagttaacaccagcagtgcaaatgagacccatgaaccaaatgagccagaccacagcagtgacttagcttttgacttcctcagccaacaaaatgataacatgggccctgccctaaacagtgatgctgatttcattgattctttattgaagacagagcctggtaatgatgactggatgaaagacatcaatcttgatgaaatcttggggaacaattcctaaagaagaaagggaagacaatttacaaactccaagcactaaaaggcagtatattacagaaactctgtagaggctgaactgttgatgttcaggtggactacatgaagataacatgcttaaaaatggaaagcagaaagtaactgcagtgatgaacattttggtccaaattcttgttttaaatcttacacctgaaagtaaaatattgggatcacttttccctgtctaaactccaggatacagtatccaatttatccaaacagaactgtggtgtcaatgtgtaattaattgtgtaaaatagccttcccaagtttctttttccctggaaaataaaaaaggtaatagaacttgtagtttatttaaaccccatgtcatgaggaggtactagttccaagcaacaaactccttaatttgctctaatagataggtatggtttaatctttccattgtgtcttttcatttaattttcctgaagcttgcaggatagattgaaatgttataggtttgtttggagtaaccaaacagtatgcaaattaagaaaaagccagagaacctagaaaacatccagtggattacagaatttcttccccatattcactcctcacttttacaattttcccacaatcctctacttcagtgggatgctgtgtctagtgattaaacaaaaatatagagctgtgcaatttgattttggcttccacaacgaatatctgaatccattccaaatgaaattttagatataacaaagacttgtcctaatcatactgaaatattggtgcacacctctctgcattagatttcacttttttaaaaaacccagtggacattgctataaataagatttatttggctacaaataacctgggatgttgcttattatgattgatgcctgctggtttgttcccaagctgagtgaaattgaacctcgtcctccctactcattttgatgactgaggctggtttataagaaaaggaagtttggagaagaaaaccgagattagaaaatatcatgttttggttggagataagaaccagggatggcaagtaccagtgtgtacaaatgtatttcacggagtttgaaggaacgcataatcaagagggaaaacaatttgtccttcattggacgtattatttggatttgggtgagcaacaaaatggaatgtggtctgttaggagcattctgtttgttcttttgtccctgatgtgatgaatcattgccacatgctagatggactcttcatatccaggttttgtccctcagggctgagcactgtattaaagagtttttgttgagtcatttaaccttagtgtccacatccagatcagctgtaaaatggggaagacgtgtgctgatttggaatgaatgcaaaatatcactatcattttcctaattacagaggagcaaaggttatcttcagccctttcagttctatgctcacatattcaaatatcaaatgtaatttagctgaagttatttaataatcaagtctttcaatatctgttcaaagaaaaagaacacactttgaaaattctgcaaagctgtctcccagtctttaaaatgtctggaagcactctccttctttacaataccaacatcactggcccagaatcttccctgtgctagtttgtaaatataaataaattacttgttttgtaaacttttgtaaagaatattttggtagaaatacttcaaacatattctttgggttatatttatacatatgtgaaataaatatactatcaaaaggttatattttatacaaaaagtaaattgctaccttttgtatgctaatatgcaaagttttgtataatatgatggtttatttttagctctacacttaaaccataggtggttgagtgggaacttttgaaaactatcaagaggcttgttagacaaatttatattctgaaacctcaataagaaagcattccaggtttcaatccttgttttttgtcctgctcccaaattcttttttaaacccatagttcttgtgtcttatttgattcttctgctgtgcacattgtattggtccttgttgcatgtagtctactgtgtgttttccgattttataaggcagcatttctccatacaaaaagaaaaaaaatgatgtacatataaacgcttttgttgtatggctcctccatgttactgtatatatctgccagcacttcccagttacactcctgtgagtcagcttatttttaccctaacataaatagtatgttttgtagtagttatcaaatttaagagataaagcaatcagaatgtttggattttcttctatcttaatgtgaatttcataattaatgtctatttattcagctattcattaaaatacaggattctttgggaaaacannnnnnnnnnnnnnnn

SEQ ID NO: 9855 - DNA, 1392 bp, Homo sapiens
  misc_feature 1, 2, 3, 4, 1392: n = A,T,C or G
nnnnagcgtccgggcggcggcagaggcggcggcggccgggcctaggagcgactctcggtcgtgcagcggcggcgagcgctcgcgagcggctgcgggacgcgaggtttccggagctgagctcaatgtgcagcaatggatgacgacagcctggatgagcttgtggcccggagcccagggccggatggacacccacaggtcggccctgcggacccggcaggtgactttgaagaaagcagcgtgggcagcagtggggactctggggacgacagtgacagcgagcatggagatggcacagacggagaagacgagggggcgtctgaggaggaagacctggaagacagatctggttccgaggattctgaagacgacggggagacattgctggaggtagcgggtactcaggggaaactggaagccgctggctctttcaattctgatgatgatgcagagagctgcccaatctgtctcaacgcattcagagaccaggccgtggggacgccggagaactgtgcccattacttctgcctggactgcattgtcgaatggtccaagaatgccaattcctgtccagttgatcgaactctatttaagtgcatttgtattcgagctcaatttggtggtaaaatcttaagaaagatcccagtggagaacaccaaagcgagcgaggaggaggaggacccgaccttctgtgaggtgtgcggcaggagcgaccgtgaggacaggcttttgctctgcgacggctgcgatgcggggtaccacatggaatggcttggaccccccgtctccaggaggtgccggtggacgatgtggttctgcccggaatgtgctgcgcctggtgttgtccattgccgcgtgatgcgggtcccgtgagtgaggagggaggtctccctgctcttggctgatgtggtgcccaccaccagcaggcgttcggcctcgagcaggtaggacccgggcgatagccaggagacggcagagtgagagagtgagagcaaccgtgaaccggaagcggatctccactggccaggagggtccagcgagacaccaggtcgcctcgggtcttcccatgctggatgaagccatcgaggctgtggcgacttggcctgagcactgccgtgtatcagcgccccctgacgccgcgcactcccgcccgacggaagaggaagacaagaagacggaacgcacagtgccgggcacagaaggaaaaccccgtccggagcaatccgcaaagagtacgagctcagggacaaagatctaagaagcgccgaacatcgcactgcagaagaccaagagcgggacgaccgagtgaagcacacccactcgctcctcgaatcggcgcgcaccctgcggcctgcgacagggcctggtccacagcaaggtgcatcccggcaggcn

SEQ ID NO: 9856 - DNA, 1759 bp, Homo sapiens
gcgtccggtgtcagatgaatatgagcagctgtggccacaaagcggaaactcatccacttttgcctttttccgccccacagccgcttcctgcctggattccacagcttcgcgccgtgtactgtcgccccatccctgcgcgcccagcctgccaagcagcgtgccccggttgcaggcgtcatgcagcgggcgcgacccacgctctgggccgctgcgctgactctgctggtgctgctccgcgggccgccggtggcgcgggctggcgcgagctcggcgggcttgggtcccgtggtgcgctgcgagccgtgcgacgcgcgtgcactggcccagtgcgcgcctccgcccgccgtgtgcgcggagctggtgcgcgagccgggctgcggctgctgcctgacgtgcgcactgagcgagggccagccgtgcggcatctacaccgagcgctgtggctccggccttcgctgccagccgtcgcccgacgaggcgcgaccgctgcaggcgctgctggacggccgcgggctctgcgtcaacgctagtgccgtcagccgcctgcgcgcctacctgctgccagcgccgccagctccaggtgagccgcccgcgccaggaaatgctagtgagtcggaggaagaccgcagcgcccggcagtgtggagagcccgtccgtctccagcacgcaccgggtgtctgatcccaaggttccaccccctccattcaaagataatcatcatcaagaaagggcatgctaaagacagccagcgctacaaagttgactacgagtctcagagcacagatacccagaacttctcctccgagtccaagcgggagacagaatatggtccctgccgtagagaaatggaagacacactgaatcacctgaagttcctcaatgtgctgagtcccaggggtgtacacattcccaactgtgacaagaagggattttataagaaaaagcagtgtcgcccttccaaaggcaggaagcggggcttctgctggtgtgtggataagtatgggcagcctctcccaggctacaccaccaaggggaaggaggacgtgcactgctacagcatgcagagcaagtagacgcctgccgcaaggttaatgtggagctcaaatatgccttattttgcacaaaagactgccaaggacatgaccagcagctggctacagcctcgatttatatttctgtttgtggtgaactgattttttttaaaccaaagtttagaaagaagtttttgaaatgcctatggtttctttgaatggtaaacttgagcatcttttcactttccagtagtcagcaaagagcagtttgaattttcttgtcgcttcctatcaaaatattcagagactcgagcacagcacccagacttcatgcgcccgtggaatgctcaccacatgttggtcgaagcggccgcccgggcaggtacagtaggatagttatatggaaaaactagagagtttccattaggggcatgattttcatcaaacagtttatggtattttgcatgaaaggaactgcagtgtcagctgcaaacaaaataaaagccatctgtaaggccataaaattgaactataataactaaattcacattttaaaaaaaggtaaagtgaaataagttctattagtttcttggcacaagaaatgcaattgcatatggcacacgcatttcaagaaatgaagtaaaatctgaaaatatccctagaataattgtttgctaatttttatttctgtacctcggccgccaccgcggggagctccaattcgccct

SEQ ID NO: 9857 - DNA, 2350 bp, Homo sapiens
  misc_feature 1, 2, 2348, 2349, 2350: n = A,T,C or G
nncctttctggaaattttttcggctgcccccgtttttttttctcttctggccttttgcgcctatctcatgggaaggtctaccctttcccattccttgtagcggctttaggtaactagaaattgaagttagtattacccccaagagggccaattacccccggcagaacctgtcaagaattagagtctatggaactgaaagtgaatggcaaataaatgctagatgtaatttaatcaagggattctttcaaagtacagtgcatcaacctggatagtaactatagtttgacagtctcacaagaagtgaaaaattaatatgtcaagaaaattgtgaaaataacagttagcaaatttactgctcaaatccaattctgtattcaaaaaatattaagagctgatcaatgatttattttcatacctcattacagtaagaaaaagccctctgaaatttatatttgaaagcaaactgggacaaaaatctgctttatctatgaacttcccactagaaaatacaagcataccattattagagaacataagacatcaaagccttatgttttaaaaccatactgaaatcatttaccaataacaaagatcttaatctaaaagatagtgaatacatcatcatcatgaaatctgttttatgtgctctatgaagtacttggagaattgcttttttatttttcttttgctttattaggtcacacaaaacagaatgaattagcagaaaaatgtatgttataaaacagcatttactacttcaatttaattttttttactaacaattgtggacctttttgatgacacttatgtatgtttttaataaattatgtacttattagtacttaatgagcccttcctgcctcaatataaaattactaaacttggagaattacagattttattgtaggccctgatgttagtcactttggagaagctaaaaatttggccaaaatgaatgatccaatgatcctttaagttatctttatatttaatatagtgtgatcctggactacactgatttaaaacatgctttttgaaaaatgtcttagtaatagggcagtaatcttcagtgtgtttcaaacactacttgcaccaaaatcacgtaggttgttgggtattggttctcaaactaggataagaaagacacctgcagagtttgcttaaacacaactgctagcccctgcccctgcccctgcccctagagtatctgatttagtagatctgatctgagatgaggccccgagagaggctgcatttccaacaagttcccaggtgacgttaatgctgtttgttgggaccaaacttttgacagtcactgcccaaggtatctggtaagaatgcatactcttgggccccatgcttaaatttgaatttctgagattggggtcttcagatctgcatttaacaacatcctgggcaagtgtgagaaccacagtttaagaatcactgtgacaatttggctgggttaatttgactattactggccaatgcatcagacgtcatatatcatatacataaaaatggaaataatgctacatgaatagccccaagcctgatacggttccaatgaacacacagggttttgaatataaatcctacctctgttacttactagctttgtgacagtgacaaagttactttgtctctgagcctcagtttccttatctataataggggtataacacccaaattttgaggattaacactattatacacagattatctaagcacagtacctagcatacagttggcattggataaatactagctattacttatttccttcagtatctggtcaaagcaaatttttcattcacttaaatgcagtacttacactccaaggtaacagaataataatacaatcttctatttattgctccctatcaatgttctaaaaaccttacatttatttaatcctcataaaaatcctgtgaggtaggtagtattatcatccctaattaaaagatgaggaaattgagacacagagagattaaaattgctcaaggttacaaaaacagtaagtgttagagcaagaatttaaacccaagcaagtctgactctagagcccaggattcatcacaatattcatttcctatgagcaaatctcaaggtttttggatatctatagtaaaccatttatacttctagtcaagtaacacatatgaaaattcatgtccacaccatggtgaagagttgttcaaagaataaaatgaatgccttgaaattttggcagatgatactaccatgataataggtaaaaactggtgcatgtttttactacgtggacagagtagtccatggttaaccaatgaaatgaacatcctctcaaatataccattcaaagaggnnn

SEQ ID NO: 9858 - DNA, 1735 bp, Homo sapiens
  misc_feature 1, 2, 1735: n = A,T,C or G
nntatagggagtcgacccacgcgtccggtttgatcagtaactggatctgtgtttaataggttatatttcacctttaggcacataatgattgttttcacagtcacttggccatgggttagtgattctttctaaaagcatttctcatagacagtatcacttcaggttctagctgtaaacaagggatcaaagcggtggtctcattggcttgtaccctctgggagatccttgtttttggtaggtgggtggggagaatcagaagtagatttaaggatatgtgctttctttaggtgttctactacagtgtgaaaacgaaattttttaaaggggcattttattcccataaagactttaagttgaataatcttttgggtacaaaataagaatttgaaaataggaatttgggttatgcctgatcagaaaagaccctgatggcagaaataaaactcccatcaaataccacaaggcaaatggcggtgaatgtgttccagtttttcctgactgcttccctcttccaaagaatggcctatcttttcttctactcagctcctagtaggattcctgcacagagagcagggaatgtcacgtttatagagctacagacatttcagatgttatcaacacggacaatactagattctgctgaagacgtacatcatgttctagtgctgaggaaagcaattgaattaggggcagagactcctagattatctggtggtgccactgatgatgctgcctgtggcatttatacatttttgacttcttgattcattacaaattttaaattatgtcatctgggcaaagataggaggctgtgctattggaacatgtgtctttgtgaaattaatgtaaccgatgtcttaaacctaaatataaatatgtggacatacttttaaaaattagttacatttgtcctagcttttcataataaaacgtgaaacctgggtattagtatatatgactgtattcatagagaaacctgtgtgtttagcaagatctgctggctgccctttgtgtaggtgtctgaaaacataggcctttcaggataataagaggggacacaatttaggttttttttttaagatagaggcagcacctttgcaattgtaaatattatgtactgccatggccagtaaaaatgaaagtggatagatacggaaatacacacaaagtgaattttgctaaaacaaatcaatggcacttaagacatttctattctaaaaggcttattcttaaggcttttctattctaaaaatttgcaatgttttaattgaatattagattttgtaaatgtggtttatttgtcacgtggatgaaatatcaggaaataactcactgctcagtggaaactctcatggctgctgttttttgttgtgttgtttcaggattggaggttttaaagcaggaaacagcagttgttgaaaacgtccccattttgggactttatcagattccagctgagggtggaggccggattgtactgtatggggactccaattgcttggatgacagtcaccgacagaagggtaggaaaaacgcagatggactttgtgacttcggcactcagatcctttcttccctttgtctctggaaaggcgcccgtgagatgctggcagatcagccgacatctgttcacttgagccaggctcagctggagatgttgcagtcactttgattgcttggaatattttgataggtgtctgagtgtgcacacatttaataagcaaaacaaagctan

SEQ ID NO: 9859 - DNA, 1587 bp, Homo sapiens
  misc_feature 1580, 1581, 1582, 1583, 1584, 1585, 1586, 1587: n = A,T,C or G
tatagggagtcaccacgcgtcctggtatcttacatcttggaccttggtcagttgtgctattcattattaaacactaaaactttggcggttcttgcataacattgtcagattttttagtgtatttctgtgaagtcattttttttcttgtcattccttttgtagtagttgctgtttggataaaagttgatgtgtgattttttattaaacaaatagtaaacccttcaattatagttagtcttggtgaagtaagatgtttgtagactttagagttctttaattcttggcacaacgtgactgttgagctaacaccaaatagtgtgttggcaatacttttcaaatggctgaaaacacctaaaaattgttcattcagaaatatctgtcactgctctgttgccaaaactcagaatagaacttagacgtatgtctgagtccctgagatcacatgctaaagtcgatgaaaagtaaccactgccactgtcttgtgtcagaacttttacagtacagaaaataacagaatagccttctgtaatgaggcgtttgttagagttttgcatgagattctaatacttcagtaggaccctacctacgtggttcatctacaatggttaccataaaaaatctggcaggattttaaaactcaatcagtctttcctttgagctagtgacttgaaaagaaagagagaaggaaaagagaccatattaagtccatgccagttgcttggctagaatatgatcaacgacttgtagtagactcaagtttttaaaaaacactattttacttaaactgtttcttatctaaattcttgcagagtgtcaatgttatcattgattatagaagacagggataatacctttatctctggccctcaaaaatgcagtgccaggagtgctaaacctagaggccaatactgatgacctggaaggtgatccatatgattgtcaccacaaagtgcttttacacaaaaacttgaaaatttgaaaaacatgatttttttaagtttctcatctcaccagtcttggtgtttatattgcaaatctatcaaagtaagaaataatttgtgctgtatacaaattacatggggaacataaaggagtgagatccttctgtgataaaatgaattcaccactctggttacccaactacagaacctcctttgatcaggccagtaggttgtgatgcaggctggagcccccgaatgccccacacacactgcagcattgaccagaccatccgaaacctgcgtccctggtgatgttctcaagcctcggaagtggcaaatggaaatgatatggccggttgcggttgtaggagagttgtgacttaggcaggagtcgacctcctcaagtaatggaacgatttcaaaggcaggctgccctgaccaaaaatatctgccatgaataaaggtgcctgaaatcctgctaaaaaaaaaacattatttcctaatctgtaaattatttctacatactactaaacagaaaaaaactcgggggccggaccaatgcctctatggcggtccaaatatgtcggcttaaacacggctggtaacctggggcccactaaacttgaaaaacccttcccnnnnnnnn

SEQ ID NO: 9860 - DNA, 1170 bp, Homo sapiens
cgtacgcgacgcgtgggcggctgaggcagccatctttctcttgccgcgtgctggtgttggaggaccctccctgcttcagatttaccaacagcatgaatcaagaaaagttagccaaacttcaggctcaggtccggatagggggcaagggtacagctcgcagaaagaagaaggtggtacatagaacagccacagctgatgacaaaaagcttcagagttctctaaaaaaactggctgtgaataatatagctggtattgaagagtcttggacagtaaagcaccaaaaccagaagacattgatgaggaagatgatgatgttccagatcttgtagaaaattttgatgaggcatcaaagaatgaagctaactaaaagtttggtttttggaagctggcatggactagatttaacaaatcagctatgtggttccaaagttttacagacatggagaacatcacctgttactagttcagtaatataaatattttgtatattaataatgctgtttgttcagcatttttcggtcatttgattttgcattttgcacttcctcccaggatatttttttggtcaaaatatgaagtattggtgcagtttgagggtgttttggtttttgattcctggtttttttgttttttgtttggggtatttttggtgtatgtatgtttatgtatgtgtgtgggtatgtgtgtatacagtggagagcaaattggaaaacagttctatttatcctcctccctccccagtagaaataaaaaaaatctttacatccgttactattcttttccccgcgtaagaacacagcacttatggcaaagtgagtattttggaattccacatctggagagcatttaccataagggttgaatctcacatgagctgataactatcaaattagcatacaaatatcccgagattcacacaccctgacgcatctaggcacaggcactcaaaggaagaaagggaaaaaaatattacgaggaaatgagagcattagataaaatcaacaatatataacaccaaagaaaagatttaataataaaacaagagcaaaaagacagataacaacaaataggagaacaaagaagtgaacatgagaagatatatccattaacaagtcgtaggagattcattacaaataaagaaaacaactataagatgatacacaagaagaa

SEQ ID NO: 9861 - DNA, 3681 bp, Homo sapiens
gttgtcccaagcctcattactcggtgcaaagtaagtgaaggatccctttccctcgatctcctccctcagttttgaggcgtcagaatagcgctgcgttgtggtggctcccacgatgcccagagtgccataaacatggtcaatgggcaaaactgctgggcagcctttcattccttccattctcatataaccagggcaacattcatataacacagtcgttttctgtccacagatggactttttataccagttcttacaagtgctgaagtatttctttttgggcaccaaaatctgttgaagggcacagacatttgggccttggtcccgacccatgttttctctactattgctgcttattgttaaccctataaacgccaacaatcattatgacaagatcttggctcatagtcgtatcaggggtcgggaccaaggcccaaatgtctgtgcccttcaacagattttgggcaccaaaaagaaatacttcagcacttgtaaaaactgagggaggagatcgagggaaagggatccttcacttactttgcaccgagtaatgaggcttgggacaacttggattctgatatccgtagaggtttggagagcaacgtgaatgttgaattactgaatgctttacatagtcacatgattaataagagaatgttgaccaaggacttaaaaaatggcatgattattccttcaatgtataacaatttggggcttttcattaaccattatcctaatggggttgtcactgttaattgtgctcgaatcatccatgggaaccagattgcaacaaatggtgttgtccatgtcattgaccgtgtgcttacacaaattggtacctcaattcaagacttcattgaagcagaagatgacctttcatcttttagagcagctgccatcacatcggacatattggaggcccttggaagagacggtcacttcacactctttgctcccaccaatgaggcttttgagaaacttccacgaggtgtcctagaaaggatcatgggagacaaagtggcttccgaagctcttatgaagtaccacatcttaaatactctccagtgttctgagtctattatgggaggagcagtctttgagacgctggaaggaaatacaattgagataggatgtgacggtgacagtataacagtaaatggaatcaaaatggtgaacaaaaaggatattgtgacaaataatggtgtgatccatttgattgatcaggtcctaattcctgattctgccaaacaagttattgagctggctggaaaacagcaaaccaccttcacggatcttgtggcccaattaggcttggcatctgctctgaggccagatggagaatacactttgctggcacctgtgaataatgcattttctgatgatactctcagcatggatcagcgcctccttaaattaattctgcagaatcacatattgaaagtaaaagttggccttaatgagctttacaacgggcaaatactggaaaccatcggaggcaaacagctcagagtcttcgtatatcgtacagctgtctgcattgaaaattcatgcatggagaaagggagtaagcaagggagaaacggtgcgattcacatattccgcgagatcatcaagccagcagagaaatccctccatgaaaagttaaaacaagataagcgctttagcaccttcctcagcctacttgaagctgcagacttgaaagagctcctgacacaacctggagactggacattatttgtgccaaccaatgatgcttttaagggaatgactagtgaagaaaaagaaattctgatacgggacaaaaatgctcttcaaaacatcattctttatcacctgacaccaggagttttcattggaaaaggatttgaacctggtgttactaacattttaaagaccacacaaggaagcaaaatctttctgaaagaagtaaatgatacacttctggtgaatgaattgaaatcaaaagaatctgacatcatgacaacaaatggtgtaattcatgttgtagataaactcctctatccagcagacacacctgttggaaatgatcaactgctggaaatacttaataaattaatcaaatacatccaaattaagtttgttcgtggtagcaccttcaaagaaatccccgtgactgtctatacaactaaaattataaccaaagttgtggaaccaaaaattaaagtgattgaaggcagtcttcagcctattatcaaaactgaaggacccacactaacaaaagtcaaaattgaaggtgaacctgaattcagactgattaaagaaggtgaaacaataactgaagtgatccatggagagccaattattaaaaaatacaccaaaatcattgatggagtgcctgtggaaataactgaaaaagagacacgagaagaacgaatcattacaggtcctgaaataaaatacactaggatttctactggaggtggagaaacagaagaaactctgaagaaattgttacaagaagaggtcaccaaggtcaccaaattcattgaaggtggtgatggtcatttatttgaagatgaagaaattaaaagactgcttcagggagacacacccgtgaggaagttgcaagccaacaaaaaagttcaaggatctagaagacgattaagggaaggtcgttctcagtgaaaatccaaaaaccagaaaaaaatgtttatacaaccctaagtcaataacctgaccttagaaaattgtgagagccaagttgacttcaggaactgaaacatcagcacaaagaagcaatcatcaaataattctgaacacaaatttaatatttttttttctgaatgagaaacatgagggaaattgtggagttagcctcctgtggtaaaggaattgaagaaaatataacaccttacaccctttttcatcttgacattaaaagttctggctaactttggaatccattagagaaaaatccttgtcaccagattcattacaattcaaatcgaagagttgtgaactgttatcccattgaaaagaccgagccttgtatgtatgttatggatacataaaatgcacgcaagccattatctctccatgggaagctaagttataaaaataggtgcttggtgtacaaaactttttatatcaaaaggctttgcacatttctatatgagtgggtttactggtaaattatgttattttttacaactaattttgtactctcagaatgtttgtcatatgcttcttgcaatgcatattttttaatctcaaacgtttcaataaaaccatttttcagatataaagagaattacttcaaattgagtaattcagaaaaactcaagatttaagttaaaaagtggtttggacttgggaacaggactttatacctcttttactgtaacaagactgccaagcacggccccgcagagaaggcgggatgcccttttggcacagcagacgaatctttttgtgcttcttggccatccatttgtcccagttgttgagcatgtccagccacttggactccctctgcctcagcacctccaggggtacttccttcaagcgcgccctcggcgccctgcgagcccacgatgaagccgaacttgtcgatgcggcgctcggcgaagccgttggcctccgagtcagacccgagagagctgagttcgtcggtggttgcggcgtcggggccctgggccaggctctcccgggttcccgaccgga

SEQ ID NO: 9862 - DNA, 2938 bp, Homo sapiens
  misc_feature 2938: n = A,T,C or G
cgcgtccggaaccattgtcttctaagccctgttgtaatctttagtttactatcatactctatagatatatttctttagattcactttaaactgttttagtaactagattcttggagtcacattatctgtgtttcacgagttaaataattggagaaaccacccaagaattatgtaatgtcattttatttatgcatatgttttaattgtcccgttcttcctgcagatgaagatgaagatgaagatgatgaagaagattttgaggatgatgatgagtgggaagactgatctatatattatatatatatatatttttaaggtgaaatactaaacactactttctgtctgtggattctgtaaaattatcatgtaaatgttctaccaatttgctgtatatttttgttgccttttttgcttttttttaatctgtgcaatacctcatttaatctgtaaaggtttgtcgtaatcctctacaaagctactccctgttattgtgtgcaagtttacaccaggatgctcacttgatttgtgaatatttttcattccatcaacaagggagtttaaatactatatgtgagactgacaaaaaccttaatgtaatttacttataatgccagaaggaaaacactattttcataccctactttttctgtacctaaattttcttaaaaaaaaatctagtatagcactacattcttttttaagtgatgcagaccttagtttctttagcccctttattttgaatacaatgctacatatgaatgttgaagctgatacattgcacagttctgtagacatcactacaccgatgtagtttctcaaattttagcaatatgctctacataaaatcactacagagatactagtggggaagacgattaacacacctcttacagtaatactgcctgttattggtatagcagtggtatttgcagactgggatcataaggagcccttaaatacttgttattgactggggttatttttatgctgtagcaaatgtgacaggctctttttagcaaaatttttgaaaatttttttggtattactctgaaacaaaatttaagttggagtttcagggatttagggagtagttttcattctacatgaactgaggtaatattatggtaactccaatatttggttaaaaaaactatacaaatcagaatagtactaaaatactgtagaattttagcatttttattttgcactttgtgtggattgaggtgttcagaaataccaaccataaaaatgtaatctagttggcaaaggtgtgcgctaaaacacggaaccgaacatgcattgatttggataacttttgagggtttttgtcaaatagcatgtgaagagttacatttttcttaaaagattggtggtcccaatgtcagagttcttggaacagataactgaatgatagatttttttttttttaaagataaaactttacaacctgcacatttgttatgcatactaaatggtgtgttaaaattagggtttctttgcctctctacactacactaatctgcctaaaggtggttgtttcatatttataatgctaattatcatacctacctactttaaattttaggtagaaaattatctgatttaaatacaaacatatttttctcacattgagtaatatgcataatgtagttccaaatgtatttcattactatagtcacaatatccaactaaaaattacgctatctagaattgtaccaaccaaaatctcgtattggcagatcttgacaggctggacctgcaagatgtggcttgaattttaaccatttattacataatctctagtgatcatgcatctagttatcataagaaataatttaaaaggttttgttgctgaaagcagtaagtggtgcagtaaaatacttaagttattcaaagaatgttatctttcttgcaagagtaatttaagcacatgggaaagattctagactttttgtttcttgcaacaacagtgccctctgctgctagaaacctttttctacttactatcatttttattgtggcttgagctcagtcaatctggtgcagatgaggctggacaactactaaccaataaaatcaggagtttgtacaaaagttaaatggaacattataattattttaagtaatgttaattgaaaaatttttttctttttgacaatataaaaaacattttaaatttcctagaaatgtcttcagggtaatgccaatttaagatctctcttaacttgtggccaagaaattctagattttccagctgactttggtataatatatatttatcaggaacttctctcagcagagagtacccattcttcgagttcaaagcacaattttaaacatgtaaaatggatatataatttgccaaaggtaattaatttattctttttttcttaaagaagaaaaagacattggttgttgttacaaaaagtctaaattactgttggttgaaacacagcagctgtggagttcagtccaggcatgaagactaaatctgctttaccaagtaaggtgtaaggttgcatgtttcagtcctctaccatcctgcactgtgagcagcactatacctgtgcgttgtctgaaagccttccgtatattctccagctaaatggtcgtctggtagcctttgcatttaacaaactagcatgaggctttttatatctaaatgctacgtgatagacaatttcagctagccacatattgtatgtatgagattcataaagactttcaatcatttcattttcagacaactgaaattttgtttagtatgtgaattctttttttgaaatgtatagtgaataggatgttgcactggtggcaattcatcatggagcataataaaattaatttgacccaaatagaaaaaaaaaaaaaaaaaaaaaaaaaggaaaaaaaaaaaaaaaaaaaaaaaggaaaaaaaaaaaaaaaaaaaaaaaggggn

SEQ ID NO: 9863 - DNA, 1531 bp, Homo sapiens
  misc_feature 1, 2, 3, 4, 1531: n = A,T,C or G
nnnnaccatgataatatgatgcttctaatccaaaagaggaaaggcattgggagtcagctcctaagggctggagaggcagagggagacagaggagctggtactgcagagcggtcgtctgattggctggacggtcgtagctgggctataaaagagacccctacaggcttagcaggaacacgctcagaggattctgacaatatctttaccggagaagaggcaaagtacgctcaaagccgaagccacagctcctcctgccgcatttctttcctgcttgcgaattccaagctgttaaataagatgtgcaaagggcttgcaggtctgccggcttcttgcttgaggagtgcaaaagatatgaaacatcggctaggtttcctgctgcaaaaatctgattcctgtgaacacaattcttcccacaacaagaaggacaaagtggttatttgccagagagtgagccaagaggaagtcaagaaatgggctgaatcactggaaaacctgattagtcatgaatgtgggctggcagctttcaaagctttcttgaagtctgaatatagtgaggagaatattgacttctggatcagctgtgaagagtacaagaaaatcaaatcaccatctaaactaagtcccaaggccaaaaagatctataatgaattcatctcagtccaggcaaccaaagaggtgaacctggattcttgcaccagggaagagacaagccggaacatgctagagcctacaataacctgctttgatgaggcccagaagaagattttcaacctgatggagaaggattcctaccgccgcttcctcaagtctcgattctatcttgatttggtcaacccgtccagctgtggggcagaaaagcagaaaggagccaagagttcagcagactgtgcttccctggtccctcagtgtgcctaattctcacctgaaggcagagggatgaaatgccaagactctatgctctggaaaacctgaggccaaatattgatctgtattaagctccagtgctttatccacattgtagcctaatattcatgctgcctgccatgtgtgagtcacttctacgcataaactagatatagcttttggtgtttgagtgttcatcagggtgggaccccattccagtccaattttcctaagtttctttgagggttccatgggagcaaatatctaaataatggcctggtaggtctggattttcaaagattgttggcagtttcctcctcccaacagttttacctcgggatggttggttagtgcatgtcacatgacatccacatgcacatgtattctgttggccagcacgttctccagactctagatgtttagatgaggttgagctatgatatgtgcttgtgtgtatgtctatgtgtatatattatatatacattagacacacatatacattatttctgtatatagatgtctgtgtatacatatgtatgtgtgagtgtatgtatacacacacacacacacacacacacttttgcaaaagtgatgggaaagaccctaggtgctcataactagagtatgn

SEQ ID NO: 9864 - DNA, 1449 bp, Homo sapiens
ccggtggtaagcacccggagcaatggctacaaaagccgctcgcaagagtgcgccctctacaggaggggtgaagaaacctcatcagttacaggcctggtactgtggcgctccgtgaaattagacgttatcagaagtccactgaacttctgattcgcaaacttcccttccagcgtctggtgcgagaaattgctcaggactttaaaacagatctgcgcttccagagcgcagctatcggtgctttgcaggaggcaagtgaggcctatctggttggcctttttgaagacaccaacctgtgtgctatccatgccaaacgtgtaacaattatgccaaaagacatccagctagcacgccgcatacgtggagaacgtgcttaagaatccactatgatgggaaacatttcattctcaagcacgctctccaacgccagcgccgcctctcgctcgccgagctccagccgaaggagaaggggggtaagtaaggaggtctctgtaccatggctcgtacaaagcagactgcccgcaaatcgaccggtggtaaagcacccaggaagcaactggctacgccgctcgcaagagtgcgccctctactggaggggtgaagaaacctcatcgttacaggcctggtactgtggcgctccgtgaaattagacgttatcagaagtccactgaacttctgattcgcaaacttcccttccagcgtctggtgcgagaaactggctcaggaactttacaaacaagatctgcagcttccaagagcgccagctatcgggtgcttgtgcagcgaggccacagtgaggccctatctggcttgcgccttattctgaaggacactaaacctgtgtgctatccatgcccaaaacgtgtaccatatatgccaaaaagacatcagctagccacgccgcatacgtggagcaacgtgccttaagaatccacttatgatgggaaccattccattctcacaaaaaaataaaacaaaattatcacatagtacccaggtacatgggacgctatctgcacggttacaccactgatggtccccatgggcgcccaacgcgaccatagtattatgcatgccaagtggcaaatacgcgcacaccaaacaggtttggcacgatttcactcatacaatgtgtcggttcgactttgacacttacatctgcggcagaccgaagccctacatcgcactacacacgctgcacggccaacacggttgcacggcgcccccatgcatacaagccatataaaacaacccagcaccaaatcctgtggaaggcgcccctgtgataattataacacacggacaatgtatgtgagcgcaccaagtgcggggcgcaactccagaagagaaacacctcaaccaatcgacgacggagtcacaaccaaccacagaaacacgacgccgcacggagacagactacaaccaacaaacaagcggcgcacacgcgcgcga

SEQ ID NO: 9865 - DNA, 897 bp, Homo sapiens
  misc_feature 1, 2, 894, 895, 896, 897: n = A,T,C or G
nncgactcgtcccagtaagaggtagagggtacaggacagagaccaactgacatactttacagtgatgcccaggctaggccagtctaaaggaaacaccaacacaggaagggatgtgtgcaggattcacaagggtttttttacccctgggagaaactaagtggtgtggtttcgctgaatagattttgctaagtacttaagcactgcagatgctccagtaatatgcccataagttcctttccaatttcaattactgggaaaatatacatatggacaatagatggatgccacaataaaaggctggcagcctaaccctcacatgaatttttccctacctctatttagggtgacagtggagggcctctggtttgctttgagaaggacaaatacattttacaaggagtcacttcttggggtcttggctgtgcacgccccaataagcctggtgtctatgttcgtgtttcaaggtttgttacttggattgagggagtgatgagaaataattaattggacgggagacagagtgacgcactgactcacctagaggctggaacgtgggtagggatttagcatgctggaaataactggcagtaatcaaacgaagacactgtccccagctaccagctacgccaaacctcggcattttttgtgttattttctgactgctggattctgtagtaaggtgacatagctatgacatttgttaaaaataaactctgtacttaactttgaaaaaaaaaaaaaaaaaaaaaaaaaaaaaaaaaaaaaaaaaaaaaaaaataaagaggggaaaaagaaaaaaaaaaaaaaaaacctgggggggggcccgggtcccaatttgcccttttggggggcggtttaacatttaatgggccggcgttttacaacgtcgggacnnnn

SEQ ID NO: 9866 - DNA, 1385 bp, Homo sapiens
  misc_feature 1, 1384, 1385: n = A,T,C or G
nagtcgacccacgcgtccgctactatttggttaattttgacgatttttttttttaattaggaagctaaaaatactactttattccttatatgaacattcatccccctcctggcacctctaaacacacccaaataactcacaagtactgatttaacactctgtattactgaacttctttgaactattttgaactttgaatctcttctctgaataactgccgaaactcaaagataataattagttgatgaaggttatcaattaataaaataacacagaccagtcttaccaaactctaaatacattttaaaaaataggaactggcaatgataaaaagaatgttgagtactgacaggagattggcttttacactaaaaaagacagaaaatggactaaataggaacataatttcagagtttatgagtcagtttacaatatgccatattagcgatctcatgatgattcagaccacagtctgggttaaagatgtcttgacctctgaggctagcataacatatatgagaatacaacttgcctatttccagaaaatctgtatatttttatagaataactttatttacaatttctatcatccaattactcactaggcattatttgtagtacctcggccgcccgggcaggtactcatggaaagtattaaagatctttaaaaaaatcgaatgctgtcatgtcaaagtgaggcatgaaaagtattattaatgtggctccatcgatttgggggttccaatctgaggagggctttttatttaatgttttaatgaatcaaaatatcttcttagaatgtctctgaaaatggcatctcattaccttactgggaactgtctattgagcactcttctccatcattaagttaatgctaaggatctttaagtgtcatcttaatttgatacttgtcataagataattaggcaaattaaaatcagtggttcaccctgttcctagaagtttttctaagtgaaatcaatttttcaatcttaatgctgttctcttgtacattatcgtaagcgcaaaggagatagtaactatggttttctttgatgatctaaagcgacattttacaatgtcgtgatttttaatatacttcatagtaattttattgcaattaagcacctgttttctaatattatctcaagatttcgcctcatatattaaagacatgtgtcagtgcagagcatgacgagagctcgcatccatcacatatgtatgcagcgctcatgtcgtggcaggaaatcagtgggcccagtctcccatcgtccttccatatgcatcgatctgtttccatcgcgtgcttcatcatccagcgctctattttcacagttaggcatcagaatcttgttttcaatgcatcaaaattcgctgtgagacnn

SEQ ID NO: 9867 - DNA, 2388 bp, Homo sapiens
  misc_feature 2387, 2388: n = A,T,C or G
actttatgataggtgggatgctgctgacctgtgtggtcatgttcctcgtggtgcaggtacctttgatgtgcctaatagtttcagatgtcttagttttttataaccatagttgattaggccaagaggcattcatttcttatttaagctggcaaaattagcaggaattagagaagtttaaaaagataaatggttttatgataatgttaaccatcttttgttagtaaatatgcgttctattattttaatcattgatgccttacaaaagaaaacatcttttctaataccctgaatatgtgctgttcttagaatcatctatggattcttttaaaggttgtttgtgaaattagttttccctttttagaatctcaggagtagtggggtaaagacatttcctgctgtcagtggataagacagagcttgttaactgttttggcagtagttaaaatcaaattgtacacttctcagcctgggttcatgcttcatcattaatacacctcacagtgcctaaggaacatttacttactggtcagaaggtattttggaagagtttcatattaaggaggaacaaataataattttaagttcttaaaaattacctaaaacaccccaaatataaaaagaagccttcacacctattctgtctttaggatgtcttaaattattagcagtactcctttttttaaaaacactgtaaaagtaaccacaaatatgtgaggacttactattttaaatggaatggaatgagctccatagattagttttgaatataaagtatataaaagtgcatcagtggtttatataggctttaaaaacatgttatcttacagtcctttaaagcagccatagagtttgtatcatttttcaagccaatttcagtcagggatttgaattgtttgattatggatgataaatgtgtcatatcttattaatatgtctcatgtctcgttccttcttaatatgatttagctggaattcattttcttttcgtttcatgtttaatttcataaaacgtttaacaattggcatatatacttggcattcctgtccaccaaggattgtaatccaagcctgggaaaatcttaaatttctttttacttaaatctggaaatttgtctccattctgccacctttttttttttttttttttatagtggaggggaggaaaggggggtgataccttgcagtaagtaagtcgaaatagcatgcctgaaaatttgaaacagaccattctaacacccaaggcttgtttataaaatacttgagaattacattaatgtggaatcaacagatgcagaagaatataacataacttttaaaagctttcataaataccagcagcaattgtaagcaaatctacaaaggttcttgaacctttctattatatacaaaactgaaaagtcattaaggagttcaactaatcaggaattaaatggtcatttatttcatgcagtatgatttaaggtatttcttgagattctggtcaaatgtcataatcagcaaacgggattaaaaaaaaaactccaaaatcactaaataattatctaaataatggtattggagaacttgtttcctgctatttggaagagattgttgcttcattgctagtttgtatttctaacttctacagttatagactccactgtgctttgtgtctgaatttctcagtatagacattttgtttactgtatgcttgcatatttattttcaactttgcctgtctttaaaattgcttgaggaaaaatggttgtaattaatttctgctacagaaaagccacctggtacgttttgtctcatcaggattgttttaaattctaaactataagtttgttcagaggggcttttgcaatgatagcagaaaactgtacaaatgtacagttagttatagaggttcttgttgaaatgaacttaccatctgatgatatgtatgtacagctgtgtacttgagtcttttttagtttacttagaaagactagcagtttgacctgttaaacaggactagttcaagtcaagaaactaaggttgttgtatacacctggaggcatctgttattcagcttatcctttgagtgggtatttggcacaatgaggataaacttatgtgacccacttgaatggctgatctaataatgttgacattatgcattctgtacttagtgaaatgtcagatgaaaataactgatgaataatttttttgtattaaagggatgggaaaagaacacatgaatttgttaataaagcactatgatctgcaaacgatggaatgtttcataaagatctaaagaaataaaggaaactttaaaacagatacaaaaaaaaaactcagtggccgtccgtttacaacgtcgtgactgggaaacccttgcgttacccaacttaatcgccttgcann

SEQ ID NO: 9868 - DNA, 1009 bp, Homo sapiens
  misc_feature 1, 2, 3, 1003, 1007, 1008, 1009: n = A,T,C or G
nnnccattcagggacaaggaggcccataatttcaatattggggtgttaacaaacctttccataaggtttgtgtatgttggatattgtggtgttttagatcactgagtgtacagaagagagaaattcaaacaaaatattgctgttcttcagttttgtttgtggaatttgaaattactcaaatttaaaataaattactggactgtggaaataacatagaattgaagttttaattaaataccactcaaacgaaaagaacagtagtttttgtagttttatattggatactgaggcattagggaggcatgaaaggaagaggaatgaggattgagacatgtgaagacattgtgcattatatcaatgtgcattcctgtagttcattaacaaggtacatgcaatagtctaaagaaccagagtcactactatagtggcttaacatttaatctgtctccaatattttaaccaagtgacaccgaggtttttatcgaagcatttcacttaaatgaacaaatcatggctgttatattaacttgaaataaaatatatttaaacatgtagttaacatgctctttctcatcatgaattataaaggtgcccaaattatgggtatcttgatttttttcaaaaattggttgtgtgaatccagctcttgcttatggctgagaatgttcctaaagttcatttcactatcccttaatcctcaatagctacacatacccccttgcctagttagtcttgcactgctttacaactctcttaggcaaattacctaacataagctccacagaagagttttttaaaacttaaaatccctgtcccaccaggtgtggtggctcatgcctgtaatcccagcactttgggaggctgaggcaggcggattgcttgaggccaggagtttgagacaagcctgaccaacatggtgactccatctctactaaaaataaaaaatcagccaggtgtgatggtggatgcctataagatcctagctgctactcaggaggcaggnggcnnn

SEQ ID NO: 9869 - DNA, 1779 bp, Homo sapiens
acaaaaataggaatgggttttttacctgtttaaagtcactttgtgtttataacaaaattacttttagctgaggaacaaaggtgacaaagatttctgttggtggctgagagtcaaagcaggccaatccacaccattacctgaaatatttttcaggctaatttataactttatggatttcctcgatacaagtttattagtttattctccatatacaagtttattctcccagaatagcagcaaataaaacttgaattggatgtacctcggccgaggtactacgtgccagctctagttttcagccttgggaggttttattctgacttcctctgattttggcatgtggagacactcctataaggagagttcaagcctgtgggagtagaaaaatctcattcccagagtcagaggagaagagacatgtaccccacctctgaagatgctgggggaggcagctgggatgggagccagccccatgcctgtctgtgaccccacagtgggtgagagcccgtcacagtcctgggtgtggctgctctggaagaattaggaggcagccataataagagtcttcagagagatgatgggaggggccagtgaggacaggaacagagagtagatgtcctataataaaggggcttctgggaggtgcctgggcacagatgtctgttcagcaggtgtgtgggcctagaggagagagcagagcccagaaatgtcttttgcaggcccacgttctgacttgaagctttcgtgggcatgttgccattgggttttgcccttgcaaaggcttcctaggtctccagtggcccctcaggacccagggtcccagctgctgcttggggatgtgcactgctggccgccggccttgcagtctctctaccctggggaggaacacagtgcgcttctcaaagacactggggcattaacagcaatcaatggtgcacgagaggttagagaaactagcgggaagctacgcgagtcacgagcggcgtacactatttggttacctcaaaggagtaaatggaaactggcattcctcatataacccccctttttgctatataatcacacttggtaacggcaattcccccacctgttaacactctaaaaacttttgtgggtctggctaggatcgttaaccaaacaacacgaaacaaccaaatatcagtctagcaacaaacacacaatctttccgacacccgacgtagcagacccgccgaagacaccatacttcatgacaaacaccaagcgcacgaggagcccaccccagagccccacgaccacgcacacacgtgcacacgctgggtccaaagagagcggggccaccaaaaagaacaccacgggccacaatagaccatacacgggccggagactaccccccagaaaaaaaaaaacgcccccggataaaacagcgagcgaacatgaacaaaaaagcgacgaggagcgtaccgcgagaacaccgagggcacaatacaacacgggaagacccggggacgcgctaatacaaatacccccgccgcgagggggaccgcgaggaacaccgcagccaaacacgagaacgcaacgacaacaccccacagtagcgacgagcgaggagcgagggagagaaggcagaggagggagagggagacaggggggaggccagggtcgagggagagcagacggaagcgcgagcacgcgcaggggacgcggagagggtgagcagcaggcggagagcggcgtgaaggaccgatagcatacgaggtcgcagcaagaaaaggatcagtatgcgaagagaggagcgtg

SEQ ID NO: 9870 - DNA, 1694 bp, Homo sapiens
  misc_feature 1, 1693, 1694: n = A,T,C or G
ngctagcggagccagagcattgtgtcgatcggctgtggaacaagaaggacatggatcagatggggagtatcttagttagagcgtccagggttgctcgagagaatgagctggaggtgtgagaggaacagtccgctacaggaagaatgtagagaggcttttgtcagtggcaagaaaatactacaaaatcggattcaggtgagctgacccggaaagaatgggctcaggtatccagtacggagatgctgccttgagacagctgaggtcaccgcggcgcgcacaggccccgaacgctcaggagtgtggttgttaggagagcacacaggtgttcatacagtggcatttgggacacaatcgttggaacctgaagaatctgaagttttttttaccaccatctttttctactctgtatggaagtagatctttatggggaaaagagaatttggggtgttctgcaagccagtcaaagtggcacagcaaatcatataaatcgaattaaatggacaacaccgttagatgtgtatgtaaaaattttctgtttcatatttttcctttcactttcggtttaaaacatgctatatgtactgtatgtcctgtagcccagtgcggctccacagcatggaatctgatgtatgatatgatagaatgtggcactaaatgcagtttcagattttattttttttaatcatatgaactaaaattgtcaattgtgaggtgtgcttttctcatcatgttggttatattgcacaattggttatatttatgacctgatattcaaagactctggcattgatagccagtgtgttttcttatttaactccgtttactacattctacatggtgtttacgtgatccacacttgaaatactagatcagtagacattcactaatataccaaaataaaatgaaaaattgagtttttccgtgaactttatactgtccagctctgttgattttaaagcttcttcatccaggtcagttcaggaagtatatctggagtacctgctctgtttttggctgtgagactagcactaaggattctggtacctttacccaaacctactgggctactaatacttctctcagcagttgatcaaatacaatagaccatgtaagctggggccgctcatccacttccagtttgctggtctccctgctagaaaacacattgtactgtgctttttctggaattcagtataatggcatcactgcctgtttttcacatcttttgtttcctgttcattttaaggaaacctactaaatccagttaatattaaatggacaccactcattaagaaatttctttatggcttctgctgaatacttaaatgccttactacagttatccagttgacatgtttttaattcatataaggtatattgggtatattgaagtatatattgtattacaaagacttgttcttgtattttaaaatgtcagtgcaaaaaatatatggtggaacctttctttaaagttgaaatggcgtattatttaaatctgaaaggctaaaaaggttcttcacttatatatgtcttccacggtgacttcaggttgaagactagtaaattactttagtagaaaaggccaacggttgggggggattaatagcagaggcgaggactaaaccggaaggggggcaaaatcgctgttcgtagattgggcgggaggcggaatttaaaagttgggattgcggann

SEQ ID NO: 9871 - DNA, 457 bp, Homo sapiens
  misc_feature 1, 2, 3, 4, 455, 456, 457: n = A,T,C or G
nnnngctgctcctatttttttttctgtttatgtgtttttatggatctaagttaaatcttttggcaatatataaaaatgtaaatagtaaactttatttattaagaatgtcatcttttttaatttatatttacacaattgttcatctaatttattttttctatacagttttaaatactcagacatattttgctgttcatgatatttttatcctgttctcatggatttgttttcccatactgttttctctgatctcaattacaggttggatctcacaaataataatgtcagagacagaaatattttgccactgttgattactatactttaaagttctatattatgaaaatatataatagcttgtacctgcccgggcggccgcccgggcaggtacggggagtgggggtgaagcgtgttctctacataggcaacacagccgcctaagtcacaaagtcagnnn

SEQ ID NO: 9872 - DNA, 3411 bp, Homo sapiens
  misc_feature 1, 2, 3: n = A,T,C or G
nnnccgcgaggggcttcgtcgccgctgcagctccgggggctcccagggagcgtgcgcggaacctccaggcccagcaggaccccggctgcggcgaggaggaaggagccagcctagcagcttctgcgcctgtggccgcgggtgtcctggaggcctctcggtgtgacgagtgggggacccgaaggctcgtgcgccacctccaggcctggacgctgccctccgtcttctgcccccaataggtgcgccggaccttcaggccctggggtgaattcagctgctcctacatcagcttccggaaccaccaaaaattcaaattgggattttccggagtaaacaagagcctagagccctttgctcaatgctggatttaatacgtatatatttttaagcgagttggttttttcccctttgatttttgatcttcgcgacagttcctcccacgcatattatcgttgttgccgtcgttttctctccccgcgtggctccttgacctgcgagggagagagaggacaccgaagccgggagctcgcagggaccatgtatcagagcttggccatggccgccaaccacgggccgccccccggtgcctacgaggcgggcggccccggcgccttcatgcacggcgcgggcgccgcgtcctcgccagtctacgtgcccacaccgcgggtgccctcctccgtgctgggcctgtcctacctccagggcggaggcgcgggctctgcgtccggaggcgcctcgggcggcagctccggtggggccgcgtctggtgcggggcccgggacccagcagggcagcccgggatggagccaggcgggagccgacggagccgcttacaccccgccgccggtgtcgccgcgcttctccttcccggggaccaccgggtccctggcggccgccgccgccgctgccgcggcccgggaagctgcggcctacagcagtggcggcggagcggcgggtgcgggcctggcgggccgcgagcagtacgggcgcgccggcttcgcgggctcctactccagcccctacccggcttacatggccgacgtgggcgcgtcctgggccgcagccgccgccgcctccgccggccccttcgacagcccggtcctgcacagcctgcccggccgggccaacccggccgcccgacaccccaatctcgatatgtttgacgacttctcagaaggcagagagtgtgtcaactgtggggctatgtccaccccgctctggaggcgagatgggacgggtcactatctgtgcaacgcctgcggcctctaccacaagatgaacggcatcaaccggccgctcatcaagcctcagcgccggctgtccgcctcccgccgagtgggcctctcctgtgccaactgccagaccaccaccaccacgctgtggcgccgcaatgcggagggcgagcctgtgtgcaatgcctgcggcctctacatgaagctccacggggtccccaggcctcttgcaatgcggaaagaggggatccaaaccagaaaacggaagcccaagaacctgaataaatctaagacaccagcagctccttcaggcagtgagagccttcctcccgccagcggtgcttccagcaactccagcaacgccaccaccagcagcagcgaggagatgcgtcccatcaagacggagcctggcctgtcatctcactacgggcacagcagctccgtgtcccagacgttctcagtcagtgcgatgtctggccatgggccctccatccaccctgtcctctcggccctgaagctctccccacaaggctatgcgtctcccgtcagccagtctccacagaccagctccaagcaggactcttggaacagcctggtcttggccgacagtcacggggacataatcactgcgtaatcttccctcttccctcctcaaattcctgcacggacctgggacttggaggatagcaaagaaggaggccctgggctcccaggggccggcctcctctgcctggtaatgactccagaacaacaactgggaagaaacttgaagtcgacaatctggttaggggaagcgggtgttggattttctcagatgcctttacacgctgatgggactggagggagcccacccttcagcacgagcacactgcatctctcctgtgagttggagacttctttcccaagatgtccttgtcccctgcgttccccactgtggcctagaccgtgggttttgcattgtgtttctagcaccgaggatctgagaaccagcggagggccgggccctgggacccctgctccagcccgaatgacggcatctgtttgccatgtacctggatgcgacgggcccctggggacaggcccttgccccatccatccgcttgaggcatggcaccgccctgcatccctaataccaaatctgactccaaaactgtggggtgtgacacacaagtgactgaacacttcctggggagctagaggggcacttaacccaccacagcgcagcctcatcaaaatgcagctggcaacttctcccccaggtgccttccccctgctgccggcctttgctccttcacttccaacatctctcaaaataaaaatccctcttcccgctctgagcgattcagctctgcccgcagcttgtacatgtctctcccctggcaaaacaagagctgggtagtttagccaaacggcaccccctcgagttcactgcagacccttcgttcaccgtgtcacacatagaggggttctgagtaagaacaaaacgttctgctgctcaagccagtctggcaagcactcagcccagcctcgaggtccttctggggagagtgtaagtggacagagtcctggtcagggggcaggagtgtcccaagggctggcccacctgctgtctgtctgctcctcctagcccttggtcagatggcagccagagtccctcaggacctgcagcctcgccccggcagaagtcttttgtccaggaggcaaaaagccagagattctgcaacacgaattcgaagcaaacaaacacaacacaacagaattcctggaaagaagacgactgctaagacacggcaggggggcctggagggagcctccgactctgagctgctccgggatctgccgcgttctcctctgcacattgctgtttctgcccctgatgctggagctcatggagactccttcctctttctcagcagagctgtagctgactgtggcattactacgcctccccacacgcccagacccctcactccaaaatcctactggctgtagcagagaatacctttgaaccaagattctgttttaatcatcatttacattgttttcttccaaaggccccctcgtataccctccctaacccacaaacctgttaacattgtcttaaggtgaaatggctggaaaatcagtatttaactaataaatttatctgtattcgtcaaaaaaaaaaaaaaaaaaaaaaaag

SEQ ID NO: 9873 - DNA, 5775 bp, Homo sapiens
agcttttcaaaagtttattttaagtttggagactaaacaaggtcatactggttttacatcctacgggatataagtatatataaaaaaaaaaaaacaccattggaatattacacagcttgaaggtttgcaaaggttatttgggtcttagttatttctgcacttaatgacacatcaaacgcattgagtatatttcataagttgttgactagcaaagatacaatcattagtaacccaagtcttcaaaattcacaccaaactttatgaagtcattcagaaagagaaagtcaatcctaaaattaaaattggcaactatgataaataccttcaaaaggatgtagatataatggagatgtttaaaagtttagtttcattaattgtaaaattagcatgttatatttactcaatatagtgaagactaggtgattcttacatgtattctacttatggtactgtactggttttagtgtgaatttacatagaataaatttacttcactttcatgtcatcgacatgaatgacacaaaagctacttcataatactactttacaatagttttcaacatttccatatggtgcgacccctttgctctcatcaattttgggtgtcatgagaacaataggtatcccgttggacatgatgtattgcgaagagcatataaagcagagggaaaatgaaaaagcaagagaaactcatttcaatgctttttctaaaaggtaacaaatataattttaatcaacttccttggaaaatatttttaaaacaggtatcaatagaaaaaattacaaaacatcatatgaagctataaataattttgaaaaactatatcatcataaagcgtaagtaataatcttaaaaatacactcttaagaaggtatgtaatttgcaaaggaaaatggctagatatctgatgggacagtaaaccttgaaagaaactggctaaagagtaagtgtgtgtatatttctgaacctaagtaattatttgtcacgactttaaaatttagccagttacaaatattttaaaatcctaactttaaagttatctaaaaaaggcaatatggaggaaatagtaattttgtttttgaaagatgttgaaaactgatcaccatttcagaggcttcaaattcataatttcataataagaacaagaagtagaaagcatatgggcaaggaacaaatatgtggccagccagtccccttagacgaactaattttgttcttattaaaaatgccaatacaattgactttctctttaaattcttcactatgattgaagaccactccatatatacatcattaagaaatgctgttaacacatggacagacaagacagtaacagtctagtggcttttgttatgcagcacaaatattaaaggaaaaaaatagcagtgttgcgtaggatcttaacatttcatacacataccatcctttcttttccaatacacttaatttaaaactccaataattctgtctaagccttataaaataaatacttgtaaagcttataaattagatgttgaagacttttatggaggcagtgtgagctttaatttgagagacatgtcaatgaaacctccagtatcaataacaaattgttatgataattgcttattttttcaggacctttgaagcaaaataaatagaaatcagttttcatcttgaaaatggtttactactttgtcattagtaaacactttgcttctcacaaataactccacctgtgccttcctgggaaactaccaccagtttcaaatctcaataagatgttagtttcacaggaaatgtggagctgaacaaagaaatgatgagtatgcttggccgaactatgcagcactatattaatatttctttgctaaatttttataaaataaacaaataagccgattttttaaagtaaatataaggatatgtaattaccatctaaatgaagatttaaatttaaagagacatatatattttttgttcttttgtgcaaactgagagtatgggattctttatgaagcaattatttggaaattaaatagttatggcttccttcaaaaataaaactgcagatttaattaacgaatattaaatacagatcaatctactgataggcagtcatgttctacatatatgagtaaacatgacacttcttttagtcaactaataggaaattcaattagaaaaaaattgaattattcaggtaatatacaatattaagaatgtagaatagaactaaaagaaaaagaagtcacataatctcttattagaaataatgaaagtaaaatgagaattataatatcagtactgcatgttacatattcttctttaaaattttgtaataaacattgacagtgtttggtgggcacagggaaacaggataacgtagagtcattacagaagaaaaaaacttattgctaacattgcagtattccttttatcagaattaggtgagtattgattgtaaaagctctatcaactcttgctcttatttgatgactttgagacttttttactcttgctataaaaagaaggctactttctttccctaatatatttctaccaatgcgaataattcaggaaacaatgagagaaaagtaattcacacttaatgtgttgttacttaagagatttgacggataaaataaaatcaaattaaatcattgaaaaggcaggcttagacccccttaaaaacaccgttagttgcctaccataatttgagcactttttcatgaaaaaaaaaaaaccattcagtttcctacagattttgcacagttcattccatggagatacttttagggaaatagggaagagggttgtgaaatgtagcctcccctcattcctcctctgtgcagcccagcagctctgaccgcaatgtgatcctcccgtaccaggaccaaggaaggattcttatgtgtcgtgcatagatgggagggtcgatgacattttttctgtgagtgtcattgtcaaaatttccctggaaaacctaataaagaagagcagaaaaatgtcagtcacctcgtgccgaattcggcacgagcggacgtgctagatcttcacgaggctgggggcgaagatttcgccatggatgaggatggggacgagagcattcacaaactgaaagaaaaagcgaagaaacggaagggtcgcggctttggctccgaagaggggtcccgagcgcggatgcgtgaggattatgacagcgtggagcaggatggcgatgaacccggaccacaacgctctgttgaaggctggattctctttgtaactggagtccatgaggaagccaccgaagaagacatacacgacaaattcgcagaatatggggaaattaaaaacattcatctcaacctcgacaggcgaacaggatatctgaaggggtatactctagttgaatatgaaacatacaaggaagcccaggctgctatggagggactcaatggccaggatttgatgggacagcccatcagcgttgactggtgttttgttcggggtccaccaaaaggcaagaggagaggtggccgaagacgcagcagaagtccagaccggagacgtcgctgacaggtcctctgttgtccaggtgttctcttcaagattccatttgaccatgcagccttggacaaataggactggggtggaacttgctgtgtttatatttaatctcttaccgtatatgcgtagtatttgagttgcgaataaatgttccatttttgttttctacatttaatgttactttcctgtcctaaaattgaaagttctaaagcatagcaaggctgtatggatcattgtgaagatacttctagggactgaactctatgtatttcttttttttcttttttttgagatagagtcttgctgtgttacccagggtggattgcagctgatcatagctcactgcagcttcaaactcttgggctcaagccatccttctgcctcactgtccctagtagttgggattacaggcacatgccaccatgcccagctaaatttttaatatttttgtagagatggggtcttgctgtgttacctgggctagttatgtgagtttctatattagacatagtctcaagtttcaagtaggggtttaaagtagagacactggtcagtatttcttttttggggggaactaggagagcaggagtagaagtgagatgttaagatcttatggcactaaagacttactattctgttcctacatactctgttaggatcagatagatgttatagaaatgccttttgtttctcctgcccttcttgatgtcacagttttttgtacttccagctgtctaaaggcatgaatctcctcttggagcattctcccagacccttctttagaagagtctatactaagttcttggtgccctcttcggcagccaagggtgaaggccccatagaggagaggatccaaaggagcattgaggaggcccaagaggaaaaggatgtggctcaggctgggagggacttcagttagcatggtgggggagaaccagtaccacatacccagtaggtaataaggtgtccagcagaggatgaaggtcagcaagataagcagggccagtctcagggcccggagacgaacacggggacaattgtcaaaggagcgggggagggcaaattcaccagcaggggctaggaatttagaaaatatactgtaattcagacactcagcttctgatctgagtatagggtgaattgatggaggggcatagctagtgagacagagctcgcctcctacaaggaggagaatgttgcaaaccgttttccccttcccaacctgggactatatgatttcttacccccagggattatgatagaaatatgaagccaccaagtctagacttgatggtgttcaagaataaataatactgattgcctccctagtccttgtccagctaactcagctgtttataattgaagggattcaacaaaattatctctagcatcaggtgctagacatggttagaatctcaccatggtttagtgactggtagatagctattaggtaggtagataaataaatgatgctagaggcaacaggtctagggttaaggattaaggcctgggaattggagtctcaccatggctccccttccttgtctggggcctggacacactgaggacaatgcggctatagcagatggccatggcagtcagtggcagcagaaagaggcagcagaaggtgaagaggttataggtggtctcttgccattgagccttgaagctgcctttggtgacacactgagtgaaagggactgggccagctcagtggaccgtgtggaacaggaacagctggagtggagttgaggactattagaactggttcccctcaccacccaacctacccacctatgtcatactgtctcctcccaattcatccttaattccaagtgaagcagcacagtgctgagaaacagtttcatccatggtgccatgttaaagaagttggaaatatatcttgaaaatcctatcttccttttaggcttgaatatgatgctgaacagtaagtttgttaaatcttggaacttaaaacaatcctgctttctcaagtactattctaacattgcgctttataagggatgatatttctaccacctcactcatatttttagctgaaatgattttcctggtatgtctgttattttgtggaaaaagaaatattgtgtaaaatgggtgctgccaaaattccaggccattttgcagggactctgaagtgacctttagtagtaatagtcttatgtgcagtaactataatggtaaagaatgttaaataataaaatttaacattttccaaatgc

SEQ ID NO: 9874 - DNA, 2941 bp, Homo sapiens
gcgtccgtccgggagcggcgcgggcgggagcggcgcgggcgggagcggccccgcccggaacctgggagcggcggcgccggcgcgggggaggggaggccggatgtgagtggagcggccatttcctgtttctctgcagttttcctcagctttgggtggtggccgctgccgggcatcggcttccagtccgcggagggcgaggcggcgtggacagcggccccggcacccagcgccccgccgcccgcaagccgcgcgcccgtccgccgcgccccgagcccgccgcttcctatctcagcgccctgccgccgccgccgcggcccagcgagcggccctgatgcaggccatcaagtgtgtggtggtgggagacggagctgtaggtaaaacttgcctactgatcagttacacaaccaatgcatttcctggagaatatatccctactgtctttgacaattattctgccaatgttatggtagatggaaaaccggtgaatctgggcttatgggatacagctggacaagaagattatgacagattacgccccctatcctatccgcaaacagatgtgttcttaatttgcttttcccttgtgagtcctgcatcatttgaaaatgtccgtgcaaagtggtatcctgaggtgcggcaccactgtcccaacactcccatcatcctagtgggaactaaacttgatcttagggatgataaagacacgatcgagaaactgaaggagaagaagctgactcccatcacctatccgcagggtctagccatggctaaggagattggtgctgtaaaatacctggagtgctcggcgctcacacagcgaggcctcaagacagtgtttgacgaagcgatccgagcagtcctctgcccgcctcccgtgaagaagaggaagagaaaatgcctgctgttgtaaatgtctcagcccctcgttcttggtcctgtcccttggaacctttgtacgctttggctcaaaaaaaaacaaaaaaaaaaaaacaaaaaaaaaaaacaacggtggagccttcgcactcaatgccaactttttgttacagattaatttttccataaaaccattttttgaaccaatcagtaattttaaggttttgtttgttctaaatgtaagagttcagactcacattctattaaaatttagccctaaaatgacaagccttcttaaagccttatttttcaaaagcgccccccccattcttgttcagattaagagttgccaaaataccttctgaactacactgcattgttgtgccgagaacaccgagcactgaactttgcaaagaccttcgtctttgagaagacggtagcttctgcagttaggaggtgcagacacttgctctcctatgtagttctcagatgcgtaaagcagaacagcctcccgaatgaagcgttgccattgaactcaccagtgagttagcagcacgtgttcccgacataacattgtactgtaatggagtgagcgtagcagctcagctctttggatcagtctttgtgatttcatagcgagttttctgaccagcttttgcggagattttgaacagaactgctatttcctctaatgaagaattctgtttagctgtgggtgtgccgggtggggtgtgtgtgatcaaaggacaaagacagtattttgacaaaatacgaagtggagatttacactacattgtacaaggaatgaaagtgtcacgggtaaaaactctaaaaggttaatttctgtcaaatgcagtagatgatgaaagaaaggttggtattatcaggaaatgttttcttaagcttttcctttctcttacacctgccatgcctccccaaattgggcatttaattcatctttaaactggttgttctgttagtcgctaacttagtaagtgcttttcttatagaaccccttctgactgagcaatatgcctccttgtattataaaatctttctgataatgcattagaaggtttttttgtcgattagtaaaagtgctttccatgttactttattcagagctaataagtgctttccttagttttctagtaactaggtgtaaaaatcatgtgttgcagctttatagtttttaaaatattttagataattcttaaactatgaaccttcttaacatcactgtcttgccagattaccgacactgtcacttgaccaatactgaccctctttacctcgcccacgcggacacacgcctcctgtagtcgctttgcctattgatgttcctttgggtctgtgaggttctgtaaactgtgctagtgctgacgatgttctgtacaacttaactcactggcgagaatacagcgtgggacccttcagccactacaacagaattttttaaattgacagttgcagaattgtggagtgtttttacattgatcttttgctaatgcaattagcattatgttttgcatgtatgacttaataaatccttgaatcataaaaaaaaaaaaaaaaaaaaaaaaaaaaaaaaaaaaaaaaaaaaaaaaaaaaaaaaaaaaaaaagaaaaaaaaaaaaaaaagaaaaaaaaaaaaaacaaaaagaaaaaagaaaaaaagaaaaaaagaaaaaagaaaagaacgaaaacagagagggggggcggtaaactaataaaccacgaggagggcacgaaactcacgacagcacctagaacgaaaacgatcaccatatcaaggcagagacaaaacacagaagacagacacgggcagaacaaaacacaacaaagacggctcgggaaacaaaacacacaactggagacgaaagtcaggaaagaagaaacacactcaataagtggaggggaaacacgaagaagacagaacccctacaaaagaacagaaacgtacaacgagcacaaaaaaacaacagtgtgaagtgaaagggaagaccacaagaagaaacagggcgcgaagcgaaaacagcaagacggacaagaaggaaaccaaaaagaga

SEQ ID NO: 9875 - DNA, 1146 bp, Homo sapiens
acatttctaaataaatatctttgatctataacccttgaaaatattacagtttatggtgacatgatagagacaagtcaaacagtattataagtgaaaatgaaacatcaatttaaaatgaacaagtgtaaaaacacgcggaactgaaattatagaaaatcaaaacactaaatacacagtaattaaatatctagcactggaatcaccaaatgcatgcgcagtaacacactttcaactgatataaaaagccctttaagattcacataatctaaataaataagcagaaacacaaagggaggtacctgcccgggcggccgaggtacgccaacacagtgctgtctggcggcaccaccatgtactgtattagaacactgggtgtgtcataccgttatctgtgcagaatatatttccttattcagaatttctaaaaatttaagttctgtaagggctaatatattctcttcctatggttttagatgtttgatgtcttcttagtatggcataatgtcatgatttactcattaaactttgattttgtatgctattttttcactataggatgactataattctggtcactaaatatacactttagatagatgaagaagcccaaaaacagataaattcctgattgctaatttacatagaaatgtattctcttggttttttaaataaaagcaaaattaacaatgatctgtgctctgaaagttttgaaaatatatttgaacaatttgaatataaattcatcatttagtcctcaaaatatatacagcattgctaagattttcagatatctattgtggatcttttaaaggttttgaccattttgttatgaggaattatacatgtatcacattcactatattaaaattgcacttttattttttcctgtgtgtcatgttggtttttggtacctgcccgggcggccgcccgggcaggttgaaagtcgatgaaggacgcgattacctgcgataagcttcgtggagttggaaataaactatgatacggagatttccgaatggggtaacctaactgagcaaacctcagttgcattttgatgaatccatagtcaaattagcgagacacgttgcgaattgaaacatcttagtagcaacaggaaaaaaaaaaaaaaaaaaaaaaaaagcttgt

SEQ ID NO: 9876 - DNA, 3360 bp, Homo sapiens
  misc_feature 3356, 3357, 3358, 3359, 3360: n = A,T,C or G
gacccacgtgcgcgtggcgcccccgcgcgggccggcccccgcgtccgggctgggcacggggccgcggggagcagctcgggactgaaccgagaggtgccgaaggaaccggcgggccgcttgatcccgctgcagacgtaggagatgcctgggacaaggaggccaccttctcagggcaaaagaaaaagaaggtgacaggcgttgagaccaccgaagggaacccatggctaggatcagtttttcctacctctgcccagcctcctggtacttcactgtgcccacagtgagtccatttctccgtcagcgggtggcattcctgggactcttcttcatatcctgtctccttttacttatgttaatcatagactttcgacattggagtgcttcattaccacgagataggcaatacgaaaggtatttggctcgagtaggggagcttgaagctactgacactgaagacccaaatctgaattatggacttgttgttgactgtggcagcagtggttcccggatttttgtttatttctggccaagacataatgggaacccccatgacttgctggacatcaaacagatgagagaccgcaacagccaaccagtggttaaaaaaatcaagccaggaatctctgcaatggcagacactccagaacatgccagtgattaccttcgtcctctgctgagctttgctgctgctcatgtgcctgtgaagaagcacaaggagacccctctttacatcctctgcacagcaggcatgaggcttctccctgagaggaagcagttggctatcttggctgacctagtgaaagatttacccctggagtttgacttcctcttttcacagtctcaagcagaagtgatctctgggaagcaggaaggggtttatgcatggattggaatcaactttgttttgggaagattcgaccacgaggatgaatcagatgctgaggctacccaggaattggcagcaggacggagaaggacagtagggatactggatatgggaggagcctctctccaaattgcttatgaagttcctacctcaacctctgtccttcctgcaaagcaggaagaagctgccaagatcctgctggctgagttcaacctgggctgtgatgtgcaacacactgaacacgtgtacagggtttatgtcacaacttttctgggtttcggaggcaactttgcccggcagcgctacgaagaccttgttctgaatgaaactcttaacaaaaacagattgcttggtcagaagacaggtctgagtcccgacaatccatttctggatccctgcctgccagtgggactcacagatgtggtggagaggaacagccaagtcttacatgtccgaggaagaggagactgggtgtcttgtggggcaatgctgagccccctgctggctcgctccaacaccagccaggcctcactcaatggcatatatcaatcgcctattgacttcaacaacagcgagttctacggcttctctgagtttttttattgtacagaggatgtgttgcgcattggtggccgctaccatgggccaacatttgccaaggctgctcaggattactgtggcatggcttggtcggtactaactcagagattcaagaatggcctcttttcatcacatgcagatgagcatcgactcaaatatcagtgttttaaatcggcttggatgtaccaagtcttacatgaaggattccactttccctatgactacccaaacctgcggacagcccagctggtgtatgaccgagaggttcagtggacgctgggagccattctatataaaacacgattcttaccactcagggatcttcggcaggaaggtgtccgacaagcccatggtagctggttccgtctctcctttgtatacaaccactatctcttctttgcctgtatcctggtggtgctactggccatcttcctataccttctgcggctacgccgaattcaccaccgacaaacacgagcctcagctccattggacttgctgtggcttgaagaggtggtgcccatgatgggagtacaggtggggccgtgaggctggaccaggactagagaagcttgagcacccccgagttgctgctcattgaattcctccactttcttatatagcctcagatgctgtgatgtctgaccttgtggatatttgcccttggaatttctactttactttctaccgtaattccttctccgtacccaggtcttctctgagagaagctataatttaatctgtgaggaactaaatgacaggagattggtgctaatacgggggaccaagctttgtccaagtgaagcaggcttcgactccttctgagaggtctggtgtgttcctagaatctcaccttttcttcccttgctaaagcatgaagtttggcatttggcacactggaagcctggttgaaatgaaatttgtagcatctgatacaaagccagagacattctagcaagtgcagcagccccttctttctctgtaacagagatatcatttatgtggagatccacaacctttaacagggatccaagatctttgcagttcaatcgaccacataggaatttccaggcaccaaaatgatataacttccttgcttccttgacaaagaagccatcatgggtgtgatccaagatccctgtcgtagtgttgatgatgttagtacatgattttaaaggttagaaccccttctaaatgaatggtctgtggaagattttagtatcttatctgatgcctggtatgatgaggatagaaaatttttccatttttatgtgcctcacaggctgtttgggcattaattttgctttttgagccttaagtgtgttagtaggatggagaaactgtgatggggactgggaacctggatttgtctgattttaggtcactgttccctgggcctgtttttgtgagcccttacacaggaagatataaagagagttctttcatttcactgctaaaatcagtatgtagtatggggaatgtatttgggttgtttttaaagaaaaggggaacagaatcaggagagtgggcaaaggcaataaaatcaaagttcttattaattatttctgagaaatagaagtttctcaatttatgactcttggaatgtctgaaagggagcaaatttggaatagatcaatctgttaataagccatctggcaactttcagaacctctattaagagactgctgagtcacaaacagcacttccattaatgaagcgagaggaaaagccataataattacatcttcacccactacccttccagagctttgcttctcctccacatttagccattaaattgcatgaggatttctctccaaaaaaaaaaaaataaaaaagggcggccgctaacaaagtctagagaaaaaannnnn

SEQ ID NO: 9877 - DNA, 1012 bp, Homo sapiens
  misc_feature 1, 2, 1004, 1005, 1006, 1007, 1008, 1009, 1010, 1011, 1012: n = A,T,C or G
nnaagagcagcgaagggccggggttaatcggccgaggatgaaatagaatgagtcagctctgctcatggaacagtagtatctcttgaggccagagcacgtcgtgtatttggtttttttatttccagacttctttcggggaggttttataaaatgacagtggtgttcccagcatatgtgatatgtggttagacttctgatagtatcagcttccaggggctaatctggcttatgttgggaggatatgcttacgaatcagcagcagctttctaaaggagagatttgacttttctctgcactgcacagcctggaggattggcttttgatggggatttgcctccgaagctctttgtacatttcttgtttaggagggttttcctatctacctttctactgaagtagtttctggaactttcctggtggatcagagttacgtaatgcagtctgagccttcagactgctagttagaattgttttaggtgttcagaaagggcaaaataggctgatgtggcctgtcagagtgatgtgttctcaaaaaagttcacttgcacatctgtgggctgcttttgtcctcagacccttagtggacagactccacaaaccctctgatgagacgattgatgtggccagggtccagttagcatcagtagaaggatgtcactaggaaaggcccaggtatctggtaagtgactgtgaggtgtcacagtacctgtgacaggagagtgtcctgatgtgcttgggagaaaggccgtatgggggccaggcatggacagagacagtgtgttggccacagaaattcctgtcatccaccacagtgctgctcctgtgtggctctagggcgagtggcccgaaactggccaatgttggccagcagatttgggatgccaattgctgcgttcttcctcgggaggctcattaccctctggttgcttggttcgacccgcaagggggggactccctcggggggctgctcacaacgcgccgccaaggggcccaacaggccatannnnnnnnn

SEQ ID NO: 9878 - DNA, 413 bp, Homo sapiens
  misc_feature 1: n = A,T,C or G
nataaattcatcatttagtcctcaaaatatatacagcattgctaagattttcagatatctattgtggatcttttaaaggttttgaccattttgttatgaggaattatacatgtatcacattcactatattaaaattgcacttttattttttcctgtgtgtcatgttggtttttggtacctgcccgggcggccgcccgggcaggtacatttttcaagctgtttttctttatgtttttgaaggaccatttttaattagctctttgatacaaagtaactcagaacgtcaaaacctatacccactaaagggaaggctgccgggaaggcaaatggaacaggaatggagcctgtctcaggaaggccagctgcaggtcctccagaaaatcaaagaagggaagaaactctgagtttgaggt

SEQ ID NO: 9879 - DNA, 847 bp, Homo sapiens
  misc_feature 1, 2, 3: n = A,T,C or G
nnnatatgttcggggcccttcccctctagttaaacaggtgttcaaggagctggagtttctgggttggtatacacagggggggcacctgacccctcggacatccacgtccataagcaggtatgcatgctcacacctgtgcatgctggggcagagaatggagaatgaggggaaggagaaaggtagggggcactgacttcctgtgcattgtccctctcttccaggtgtgtgagatcatcgagagccccctctttctgaagttgaaccctatgaccaagcacacagatcttcctgtcagcgtttttgagtctgtcattgatataatcaatggagaggtaataccctacccttcaaccctcagatcctgctcttggcctctttcctgcttttgattctccctttgtgggttaccttgccctgtaggccacaatgctgtttgctgagctgacctacactctggccacagaggaagcggaacgcattggtgtagaccacgtagcccgaatgacagcaacaggcagtggagagaactccactgtggctgaacacctgatagcacagcacagcgccatcaagatgctgcacagccgcgtcaagctcatcttggagtacctgcccgggcggccgaggtttttgagaccgttgatttttaatattttcttaaaaaaatacaaaggaaattaactctgtaggtcaatacaactcagggaaagagggaaaaatggaatttcagagcaaaggttgtttaggttatcacattcccacactcctaatacccacaaaacaagaatttcactccatgacacagaggaacattgaatggtagctcagaaatgttgatagctgaggt

SEQ ID NO: 9880 - DNA, 3545 bp, Homo sapiens
  misc_feature 1, 3522, 3523, 3524, 3525, 3526, 3527, 3528, 3529, 3530,3531, 3532, 3533, 3534, 3535, 3536, 3537, 3538, 3539, 3540,3541, 3542, 3543, 3544, 3545: n = A,T,C or G
natcgaccgccctctgtatagttcttgtcagtgcggcacccccgaccgccgggagctcgaacccgagccggggccgcccgggtggcgcggtggcggcggctgcggctgcagcagctgcgacggctgcgggggctgctccgggtactgcgggggcggccgggagccggcagccggcggcggggccggatggctctgtgcgggcaggcggcgggcgctgcgtcgctgcccagcgagctgatcgtgcacatcttctcttttctgccggcgcccgaccggctgcgggcctcggcctcctgctcgcactggcgtgagtgcctcttctatccggccctgtggccccagctccgcatctgcctccgcgtctcgcccgcggagcagcctcggctggaattcctcatgcgcaagtgcggctggttcgtgcgagagctgcgtgttgaattcgccgccgagaactatctgagcggcggtggcccaggggacggaggtggcgcggacaccgggactggaggggaggaagtcgaggccctgcagctctcagctcgttggctggaagtgctgcgcacctacttggagctggtgctttgcgtgctggtcagcatccggaacaacaggaaccttcagaagtttagtctttttggagacataagtgttctacaacagcaaggaagtttgtcaaatacatacctcagcaaggtggaccctgatggcaaaaaaattaaacaaattcagcaactgtttgaagaaatcctgagtaatagtaggcaactgaaatggctgtcctgtgggtttatgctggaaatagtaaccccaacatcactgtcatctctctctaatgctgttgccaacaccatggagcacctcagtttactggacaataatattcctggtaacagcactcttattactgcagttgaactggggcgatttgtgaatctgcactcacttgccttggatttttgtgactttacagctgagatggcaagagtcttaactgatagcaaccatgtgcctttgcaacgactgtctcttctggttcacaatgtttctgtaatgcacaagtctctggacaacatgccaaatgatgagcattggaaagccctgtcacgaaagagcaccagctttcgggtctatataatggcttttgatatcaagagtgaagatatgttaaagattctgaaacccagtataccactagagaggattcattttgatagctatatcacttgtgtttcaggggctattgttgatcttatatccaggcaatatgacaagttcctcactcattttattttaatgaatgatgtgattgacacatctggttttccagatcttagtgacaaccgaaatgaagatccgttggttttattagcatggaggtgcacaaagctctctcttctggcaattcatggttacacggtgtgggcacacaacctcattgccattgctcgtcttcggggctctgatctgaaagtgcttgaagtcaccgaagaaagcattgattttgaccaaggtgaactggccgaccaggatgtagatccagtgcataaccttattgagcaggtatccctgggcctgggtcaaccttggcatgcagtcatggacatcgaatcactcagtgtcttcactgaaccaaatcgtcatttttacagagagatgcaaagcttcagtgaagacatttagcttttttttaatgtagaattcctgtggttacatatgcaagtagggtcctattatgtttttttttcagtagtgtgaattaatccttttgtgctgtgtttaatcagtattagctttatagaattatatatgtatattctacttcttgatcaaagaacgtagtcgggtattggtttagaagttcaaagtgacaatgtatagggctttcacggttaatggacttgttaccaaaccttaaggatatacagccgaagattgtctgaggttgctggctaactttatttttcactgagttactctgcctttttgacgtttttattctttgtgtgtcagagttcagagctcaggagccaaaatatttttatacatatatagatatatatccatagcctggtagatttatatgcaatgcactgcatccatgcattctgatagcatttcattaattttgatttcaaatggaagataaataatatcccaaatgaattatctgtaacagaaaagccaagactttaactttcattacatatctaatagttgatatcaccagttaccattttgaattttgtatagtactaggttagaacattgcttaatccttttaaaaaaaatgcatttacgtaaacacgaatactgaaattgttggattttttaactatatctgacataattttattcatcaattacattacacattcatttagcccagatttcaaatagtgggggaagaaagaaactgtatttcagagtaaaatctcctaaaggaaataaaaacacagagttgtaaatacacatgcttgcaaaaacattagtcgtgaaatccctagcaacaagtcactggatttttctctgtcagcacgcgtgtcagctgccaaagaatagacttaatgaagaagtgcccacatgctggcaggggccggcccactctggccagccagatactgctagattgtaatatttaaggtcgaatttcgacctgtggtacacagctgtgctgtggctcagtcagcaacctcagaactcaaaatttaaaaaaaaaaaaattggggcggcgaaaattaaattgggggggaaaaatatttttaatagtgaatgtaaaggaaagaaaggaaaaactgaaagcttgttctatcacaggtatgagctgctatgatacatgaagaacattccatgaagtatgttttaaaaccttgttatatctgagaggctttaaaagcctattaactgtttcagggcaaccgcggtacagacgtggtctctgtgagacttccacctgaccccagttttaagtggtacgaatgttgtgcatttaatgttaaaggacagtctgcaataataaagtaagtagccaacctgggtgcccagcagtgctgagacctggctgctctattgtaagctttggaaacacaatttatgcaacagatgtccagatatgattctatttatggaaaaaagtttatatgtgttttacaaatggttttaccatcttatattaaaatgaccttttgacaggtgtgcactgttttgtctccagtgagcacataccatgcggattttatatgtacatcagtagtgtgaatccactggcacagtgtgtgtaaatgccagatgtggtgagattttatcttataaatgtgatcagataaaataactcctgacagaaactgtaaggaaaccagctgaatgtttgacctgatgactgatgttgtatggtttatgttaaatgtatattcttttaatcaatgaataaagcattaaaaatgatcattgtaatatattttattgtatatgaagcatgactacttttagtgttaaataaactgcaataatccttatattgtgtannnnnnnnnnnnnnnnnnnnnnnn

SEQ ID NO: 9881 - DNA, 2417 bp, Homo sapiens
cgcggccgcgtcgacacggctgcgagaagacgacagaagggtacggctgcgagaagacgacagaagggtacggctgcgagaagacgacagaagggtacggctgcgagaagacgacagaagggtacggctgcgagaagacgacagaagggacagagcggagagagtgaggaggctgcgtctggctcccgctctcacagccattgcagtacattgagctccatagagacagcgccggggcaagtgagagccggacgggcactgggcgactctgtgcctcgctgaggaaaaataactaaacatgggcaaaggagatcctaagaagccgagaggcaaaatgtcatcatatgcattttttgtgcaaacttgtcgggaggagcataagaagaagcacccagatgcttcagtcaacttctcagagttttctaagaagtgctcagagaggtggaagaccatgtctgctaaagagaaaggaaaatttgaagatatggcaaaagcggacaaggcccgttatgaaagagaaatgaaaacctatatccctcccaaaggggagacaaaaaagaagttcaaggatcccaatgcacccaagaggcctccttcggccttcttcctcttctgctctgagtatcgcccaaaaatcaaaggagaacatcctggcctgtccattggtgatgttgcgaagaaactgggagagatgtggaataacactgctgcagatgacaagcagccttatgaaaagaagggctgcgaagctgaaggaaaaatacgaaaaggatattgctgcatatcgagctaacaggaaagcctgatgcagcaaaaaagggagttgtcaaggctgaaaaaagcaagaaaaagaaggaagaggaggaagatgaggaagatgaagaggatgaggaggaggaggaggaggaagatgaagaagatgaagaagatgaagaagaagaagaagatgatgatgatgaataagttggttctagcgcagttttttttttcttgtctataaagcatttaacccccctgtacacaactcactccttttaaagaaaaaaattgaaatgtaaggctgtgtaagatttgtttttaaactgtacagtgtctttttttgtatagttaacacactaccgaatgtgtctttagatagccctgtcctggtggtattttcaatagccactaaccttgcctggtacagtatgggggttgtaaattggcatggaaatttaaagcaggttcttgttggtgcacagcacaaattagttatatatggggatggtagttttttcatcttcagttgtctctgatgcagcttatacgaaataattgttgttctgttaactgaataccactctgtaattgcaaaaaaaaaaaaaagttgcagctgttttgttgacattctgaatgcttctaagtaaatacaattttttttattagtattgttgtccttttcataggtctgaaatttttcttcttgaggggaagctagtcttttgcttttgcccattttgaatcacatgaattattacagtgtttatcctttcatatagttagctaataaaaagcttttgtctacacaccctgcatatcataatgggggtaaagttaagttgagatagttttcatccataactgaacatccaaaatcttgatcagttaagaaatttcacatagcccacttacatttacaaactgaagagtaatcaatctactcaaagcatgggattattagaatcaaacatttgaaagtctgtccttgaaggactaatagaaaagtatgttctaacctttacatgaggactctattctttaactcccattaccatgtaatggcagttatatttggcagttcccacattaaagaagacctgagaatgtatccccaaaagcgtgagcttaaaatacaagactgccatattaaatttttgtggacattagtctcagtgaagactatgaaaatgctggctatagatgtcttttcccatttatctaaatatggactgctcaggaaacgagactttccattacaagtatttttaattaattgggccagcttttcaaacaaagatgccacattcaaaatagggtatattttcctatattacggttgtgcccttttataaatccccagtagattcgcgcagacaaagaagacaacttgtgcctctcagtatgaattatcacttattcgatggttttcttaaaacaaagcctcactagcaggtaaccggcaaaggatcggaccctggcgcttcggtgtcgagcaacgttttaaaagaatctaaacgagggaaaaccaggcgaggcgtgaaatacaaaacacgacggttgataaactcacggactccattcaatcgctcccctcctcgccgacagcgatcacctcctcctccaaacaacaacaaaatgaagcaaaaaaaagaaagcaa

SEQ ID NO: 9882 - DNA, 2816 bp, Homo sapiens
  misc_feature 1, 2, 3, 4, 5, 6, 7, 8, 9, 10, 11, 2804, 2805, 2806, 2807,2808, 2809, 2810, 2811, 2812, 2813, 2814, 2815, 2816: n = A,T,C or G
nnnnnnnnnnnactcgtgggcggacgcgtggggctttagtaaaacgtatttaggagaaatgttgaaaatgtacatgaagcgcctttctgatatagaaaccatttctggagtatttacactggtttgatgtttacattgctctaactcggtgcctcagatacctctgtgaccaaatttgtctccaaccacatagctcatttcctataatgttatatcataggaagccctcacagagacactaacacagctaaagatcttctgatattatcagcaagggatgcaaggactttattggaatctggagagtttaactgccttctcttggtctcctcacttacttcttatgaagttggcattacctgagactcttagctgtgattaggtacaagcttaccttttagggtagaaaaagaaagatcatttgaaaaatgtatctaaaataatccagagaacataatgtttgtcttggtctgataatgataagaagtcaaggattggcagagaaaatactaaacgccaagagttgagcctgtgggtctctccataagagttttaaaactcttgccagttaccactttatccaatttgctatcattttcgtattatcagctatcgccctgtaaaatattcaaaactagctatttctaaagtaaacattttatctgttacttttaaccagataggtgtctttgtcatccttctactataaattgttctttgccaacctgtacaggtagatgaaccaggcgagagttttaatcagccttttcttgtcccctttgtaagaaagagatgcttgccatagagaaggacatgagtacattaaaaataatttaatagccacaatatgatgttctttaagctgcaaattgagtacactgggaatcaacaaatttgatgaagcctgtctgtctcttcaccagtggagtgagtgcagcagttagaaagagaagcaatattgtgcaactggtgcagtggtgagttaatcatagtgtataaccttgtgttcatgaaacaggttgttcattgttctgcatctctcttcatttaaaaaggatacacaattctttcctcattgcatattacaccaaacgtttgagggaaaaatcctcattcgtaaaggattttggatttataatctaaaactcaacaataaagaaataatattccaagtctctggtttcctaagatacataataactgtttataaagaaggtctaagagctgatatttgccaaagtgatagaagagttgttttttcctctctactaccaagctttaagacattaaaagaagtctagtgtatttgaatattttagagaaagctttatcattttttaagatgccaagatgctgcctacgtttgcaaaagttgtctaagaattcaccatgagctatattttcttctggatctttgaccaaggtgatgtcagcttatttctggggaaggtgttgagctcttatacatgaaaatggatataggctattctctgggatgagtgtcatttcaatgctttataaatccatgaagctgcttgtctcataaagtagaactgatacaaattttggttggatatatagagaattttataaatgtattgccttagaatttctgggtggagacccaactacaatgacattgtcatgcaagaactataaagataattagagttaaaagttgtttaaattgtgcccttaaatacagcagaacctggagaaggtcatacttcaaaggtcgattttgagtccgaataaagaaagacctagtaacagatagtttttttttgttcattttcttctaccaagtagaggtttatgccctcagaactaaactagtaaaaatatctgaacaaaaaacctttcgttgttggcataaaaatgtgatacacttagagacattttgtttattgcatataaatctaatttttccataaattagatttatgatattttcataaagcacttgattagtttttcaaggcgtaccatcacaaagatgctttcctgcagagttctttgtatcaacagcctatggttgagatgttttctcatttcctgtagagagagaataccactaacaaacaagcaaaaactttagtgccaaaatagtggaactattttgtcatcttttgagaaaaaaatatacaaagaagtcatcttttcattaagtggattccctggttcctttccagctggttgtggaagtaatggctaacatccttcagctgactttgtctacaaggattattagcaaattctgtaggagcaagcatgtctgaccttaacttaatggatcccttattcaatcagtggcttctgtctttatgtctgttggcatatcaaaatggtttctgttcctagaaaagtaataacatatgcttatctttattctttttccaggtgattttgttttcaaatgctccttgtgaaaacacctagtgttgtagaaaggaaagtgccagaaagaacaacttgggaccatgagtaggtcatcaaatagcttagtgatttatcctcatatagggttataaaaccctggtatgtgtttattatgtggtcaacagagtcgtgtccggcccaaggagatatggctacgcaagcgggtggtacatattgttcccttgtatatatggactattcccaattacaatattaaaaccccgcggggtttacggttgcataacagaggtcttgcgggggacacccagtttcgcaggttgacacaggggccgcgctgttgagagtacaccttagagctcggtttgcaacgctgtgtcagttggccactgcccgagtgattaacnnnnnnnnnnnnn

SEQ ID NO: 9883 - DNA, 3293 bp, Homo sapiens
ggttctgttgctgtctgaggtgttcccggtgggggccgcttctgtctttggtgggtgtggttgttcgctgtgtttggtgcgcctcgttatgctggtgtgtgtgacggtggcgcttgctgctcgtgagttctcatgctgcctggggccgttgtgtgtgtgccctggtgccgcgcgatgcgggtgttttctttctgccggtccgttgcctgttgtgccctcttctttctttgttgtgttgtctggcctgcgccttattgtgggggtccagctgtggggtgtgcacgtatatagcttgtggtactatcctatattcttcgtcctcttctctatgttgatatcatccttgagcctccttcccctttttttgtgttgtttttgccttttcaagtgtttatttttatacatttttttgtattaaaaagaaaagcataattaccacaaattacaaaggactaaagcaggactagaataatgaatgaatcacttcagcctggaaagcagatactctcaataatattaatgttataatacaagctcattcaagtattttacatttttttgtccttttaaatatgatatcctagcacatagtaaagataatgtactacgagcgtaaggtggaaccttctccgcaaagccagatgacaagttttcctctccagtgagaaatgggctccaagttcttatcttctctgccatcagcatggctgaagggggagagggtgggtgttagggaaaatccagggacccttccacacaggaggtactctggggttccattcaggagggtgccagataattcagatcactctacccaggctttttggcaaaaaacaaccctcaccctccgtaactagtcatcttccttgtccctcctcctcacttcccttccagggccttctaagcagcttactttcttttgtaaaatcaatcaccaggaaagggaaaaaaaaaaaaaaaaagagctacaatggaacaaaacaaaaacatttaacaactttgacacaggggctcagcacctctatctgagccccaggggtccaggctggggcacggctggatggcccttctctactggtagtgcctttgctcccaagtgcaggaagagggctaaagagaaacctgccccttaacagggctgaggcacacagacctgctgatgtctgatgcccagaggttatgttggcatggaccaaccttggaagggataggatgaacagagggatctgggcaggctgttgctttatctcaggtcttggatccccatgggacgatggtaggtgtgaagtggttagccctgatggcccctgccacttctggcatgcttgtcacagatacatcggtcctaaattcaagtgtcttcagaaagtgaagatgtaaactactctttgcaacattaactcctaacatgttaccaaaaacaaaaacaaaaacaaaaacaaaaaaaaaggaaagaaaagaaaaagctcccctaccaaccaccagccgatgttgagatgaagtcctcacctccctgccccaaaggggcttcctttcagggatgtctgtgaagaagatggcagccccctggcctgggagtaaactctaggtaataacagcctttccccataccctaaggcttccttgtgccccaaaccagcagaggaaaaacactgaggtttctgtggtgctggatacagtacagggctgcgtgacctgaaggaaagaaaggaaaggagaagggggtccaggaatccagtgtccggtacaatgtggggcaggcaccagactgggcagggaaaggcctcggataccaccatcatagcagagaccagacgctcatccttggtttgagacatgaagtcacaggaactgagatgggcttcccacataccaaccactgggagggcaaaggtggggaagggcacaggctaaaaattaacaaggtgcccaaggtaaagggcaagcccttgtcagcctgggatactgtctcctactcccaacctttgggcccaacagaggaaccagttgaaaaggagggccaaagacattgcagtaagtaagcaacaggacaatgaactccatgttgcccagatcccactgagagtgaacgtgcagtcatgcccataaccgacacacatcccagtccatgtgggtcagtccttcatcaccctccctgccttctgacaacagcagactccagccattccattatcattcacagcccaacccaagcagtcagtggctgaagaaagagaatcaggtatactctatgtccacatataccttcctgccacagggcttcaccaactggcaggattccccccagcccccaactcctcctcatcccttgttcccaggcgggtcaattggagagtgagcagagatagatggcttgcagaagggtatgcaagatggggagactccaccagaccttagggagagaatggcatctttctccaccttttaagagagacagagcctccctgaggtctcaaagatttttcagggcaacacaagaaacgtttccaagcctcagctgcaggtgttcacctttccactctggggtgtgaggagatggtaagctgaggacaagtgtgttccagatgcaggccaactctgttctccaacagtttgaaccaacttggccttggggttccaagggtaggatgaagggtgtcacggcaggacggggcctggcgtgaggcaacagcaagcagagcgaggacacaacagtggcagcagtgtacagacacaggacgtcagcttcaaacgatgcaacagcagggatatcttgggcacggctctgattcgagccactcccaactctcttgcctccaggatggaggcactgtacatgcaacagtccagagaaagattctagccagtccaagcccaggcacatccagagaaggtgggagctcttcgggttgactccaccgaggaaaacaggcatttgggtatttcagattcccgctccacaataaggcaacttttaaaaaaatattatttccaaaaacaaaacaaaaattccaaggggaggggaaagacattactttctgtggattaggtgggggttttctgatttttttttttttttttggtcttttatggtcgattttgtcttttttcttcttttttccccattttttcaaggatggaaaggtcagagaaaaataaaataaaacatctttcaatagtctttcctggtaaaagcagcgtctctctgggctggggagtaaagggtgtggggcaaggggagtggggagaggctgaaaccttcccccaaaccccagttttagatccttcggacg

SEQ ID NO: 9884 - DNA, 775 bp, Homo sapiens
  misc_feature 1, 2, 3: n = A,T,C or G
nnnccgccaagtatacagaagacttgaaaaaaacctgtcaacccgatttgaccctatcatttatagagtaatattccccaaaatagcagaatgtacattattttcaaatatacaaggatcatttaccaagataaaccataattttgggccataaaacatttaggattgaaaatacagagcaaattctctaaccacaataaatttaaaaaatcgatagccaaaagataactgaaaactcccccaaatgtttgaaaattaacacatttctagaaaagtcatagatcaaaattaaattacaagggaaatctgacactattttgaactacgcgttcatgaaaacacatcaaaacttgtgaaatgcagctaaaacagtgcttggagagagaaaagttctaaaattactaatataaacttctaccttaaaaaagctagaagaaaagcaaactcaaagtagaaggaaagaaataaagataactgcagaaatcaatgcgatagaaaataagcaaatagagaaaattagtaaaaccaaaagttgctcctttaaatgatcaataaaaattacaaacccctaactaaagcaatgaacaaaagagaagatataaattaacaatattaagaacaaaagaggacaagtgactatggcttttgtagccattaaaaggatatcaagggaatactgtcaataactttataccaataaattcaacatttagatggaatggacaaattccttgaaaggcacaaattaccaaaacaatcgggctatagacaccct

SEQ ID NO: 9885 - DNA, 4164 bp, Homo sapiens
  misc_feature 1, 2, 3, 4163, 4164: n = A,T,C or G
nnnggatgagttgtgatcgtagctgcgttgagaggatgtgcttcgtctggtcgtgtttcgtcatacggctcccagtaggtgtgacttcgtgtttctcggtttctcgggtttctcaccaccagggggtggttccaagcgagtcgtcgtctagcacgttttgagcggcccgtggtcttttaactcctctctggggccctttttacagtgtctggtctttagtttgcgcaccgggagattttttggccgttgttttttttttgtgttttcttgtgtgttgtttttgtaccggaggggaatcgtattgccacaagttcaagatgacaggtacgtacgattcggacaatctcgtctattaacaggatttgtttacacaatatattacacttcaccaaccgttatactgcattgtcacttaaataccgatacatgttaccaaaagagtctaccatggtgttccttcacaatgccagcttaaggtcttttaaaacttcctcttctacatatttatagtggttacatcttgattaaatgcaacagttatgaggttttatgagtttattttctaatcaaagagaaatagtgtcagcctgtttctcaaaccaaataggaaaaacagcatgtgagatgattccctgcacataaccaaggaatccttttcatgcacacaacattggacttttacttgtgcagtcactttaacatacaaatcatctttccttgggatcgttttaaattttcttgaaataccaagtgggtggagagcttcttttcaatgaataccacacatttaaaatccagatcgtgcctcaggcattcaggagtgttatattttaatttatatttgagagtgatgactgatgaaaaatatttgcatgaaaatagaaattttcttttgttctgatcatttcttacatacttctagtcataataatgtgtaatacatatatatattatgagattcactttcaaaacaaatatcagctgtcactgaaatatagccctgcttgtcttggcaggtaaaggggctgttttcatgacacatcttgttttgaaatgtgcatgtgaaatgttagtccgaacctctgtaaaggaagtttttgcgtatgtagttagacattaatacacatgctatacacataaagaattgtgtttttcatttataggcctgcatgcatacttccaaaacactggtttgaagaatgaacatgaggataaaagaagggagagaaagacaaagcaaaataaaaaaaaattcctatatatatattaataaaatacttaagtttcctggaggcatcaacggctctttaaataaatcatcagatcatcaccagatcactggcaggggtttccaaaacttcccaacagtacagagacagaatggcttagtggtaagactctcacatgtaaggtaaaaattaacctaatatgcaaaaaagtaacaaatccttagtatcaagattaataatttataaattcatctgagttaagtgctaaacaatacattttgaaaagaagtcatctttgatttactttttctttgccattgactgctaatcaaaaataagccttacctagaaaacagaaactgaaacttcaaacacagagacagaaaaaaaaaaaaaaacccaccaatgctacctctgtaaaataaaactagaagcaaaatgaatagtttcaagacagtcggctaaccaacaaaccaaatgcacaagagaatactaaacagggttttactgtcatcaagttcgaaggcaggaagacagactagaaaaggtcttaggagagatgggctaccatggacaaatgaagccacactctatctgttaaatctaaattctaacattaaaactcctgaatcctggagttagtttaatgtcactgacattaactagctttagttattgtcattttattcaaatggatgccatttgattaggtaagtattgagcattattttaggagaaaaaccaaacccaactcctatttgcttaggtaccatgtcccatgaacaaaaaagaagaagagagcaaagtatttttgagacagtctttaagtgaagccataagaactaagttatttgaaagacaccattcacaaactgctggcagcaagtgacccagggtaaaatgaagtagaaacaagccaagaaaaggaaattcagaacattaacaatagaaaaaggcaagtggtaaactaataagaagtgtgtttttatatgaacaacaagactgcactttcccatccagccttaggtggcacacactgttttaagaaatgttttctcaaagcacgtactcaatggagggaaggaaagttagatataaaaatcttgctaaaggaaaaatgagggtggatggcagaagaaaaaagtgaaagttggtagtcatcttgggtggtttttcaacttttaaataaattataacagttccttctgaaggaagtgtggctgctaccgtggattacacttattttgaagcggggagaagggacagtggtggagacaccaaagtactgtaccaactgcactcaaatctctacatgtaagagaccaaacaagtctcactatttacaagagttgcctaaagcaacattacacttagggggggtaagtttcctacctttcacagatacgctttcatacatatggctctcttggtgactaactcttcgaatttggaagcaattatctgggaggaaagttttgcttaccaggtttcccataattctctaaacacaaaaaggtatacaacttcatatataaaagccttcatgttcattatagactagttaaatctagttctaactactaccccaacttcaaaaatcaaagcagtacaactctacaagcaataaacttttcaagttttctggcagatgagggattctgggaaaaaagcatgaaggttagtataaacatactgacatcagtaggcatagaaaacctgctcagatacgaatgcagtctcagacaagatacaggctggtgaacaccaccatctgacaataaaatgaaatacaaattcagtttaagctttaattatttcacgtgtgtaattatgtgaaactcttcagtttttttcccatactatttaaccagacaatcctgaagcatagtagccttgattttcctaatgttaacagtgagaaaatggtgactatgatagctaagcagtggctggctttctattataatataaaactatcagaaataaaaagatacctgaatagtatagaacagtacaaacaggttttggctttcatcaaccactgagtttaatccatctttgattctctgagttttagtattataatagtagtcactgtaagccataccctggcaatgatatttcatatttaaagaattcaggaaggtgatgtgttctttgtgcaaaaagaaatgcaaagtaaaataaatcctgggaacaaatgcttcaactttaggaaaagtatgtctgtgtctgtgatcgtagtaccccaaccagagttcgttttgttttctaatttctcccacttagtccatcctctggcttctggatcaaggctctgtatattcaaaacaaacaagcaaattacagagtaggtggggcaaactcgcgttagtgcaaggagtcagttcacaaggttttgcataagtatattccattccaaagaagtaaagctcacaaaaaactccttaacaaggcctttcattctttgaaggagaggagtatggtataccgtgtgacaatcaccaataagaaacctcccaaccctcccttttaaaataacaaatatgctgaatatgtctaattgcatgtggactggtaagagtttctcagttatcgcagttccaaaacattttcaagatagctttttttttttttaacttaaaaggcaagttctattttcagactttcgaacacgtttaaacttgcaactgggttttcctttttacactgatcagtttttagtgtcgatgcacaataccttaaagatggttgacattaagaacttatgcacactgaaataatgaccaaaaggatccaagaaagatagctggatacagtagacattactctgagtgtctcacatatgtttccagaaaagaaaaaaaaaagccactgaaagttgttattccatatggcactgaaacaaacattcagctcagtttaggtaagagnn

SEQ ID NO: 9886 - DNA, 954 bp, Homo sapiens
  misc_feature 1, 953, 954: n = A,T,C or G
ncgtccgtaaaattgtggccattggaatctcatctataaaggggcctctgtagcttcttaacacctgctgagaatggcgctggacacatttggcattcgtagttcgtcatataaccaggtttatccttagtctaactgcaagggatagaacctgccccaggtcacaatcattctgtccaatccagccaaggttccctccacatatgaagatggaccatggcaggatacaactgattgtgtggcaccatgtattagcagtgggaatatgtatcacatatgatgcagcctttcatatttcagcagtttgccactgtgactgtctggcaagcccccagatggcgttatattaattggattagattattttgctcaccttatgtaatactgtaacttcctataacctaatattttcggtatcattaaccaaaatttcacactcatagttgctaaagagaatgttattcaatcattaaactctgaactgatttcttctatacatttaaattatccaccctcaataatacgggtgctcaaccctatgcattttttaagtgttgctatttcttaattaaattgatttcctgtcattttgaatcatttatcacctgcgatgcatgattctattaattttgttatgttactgttttaaccaaagctgaccgtaaggataaaacacttaagttgttgctgagtactatatatcctcaatatgcatgtctgcccatcacatcaaatgttctgtcaacaagatgtttggtaattttttttaaaaaggttggaaaattaattatagaaggttctatactgtttttttaattaagaaactaaatctagcaggctaaaggttaattgtagtgattttttttcacatagatatctttctatgacctagttagttactgccattcgagaattagttcacgttgcatataaattagggtgatagggtcgcnn

SEQ ID NO: 9887 - DNA, 4372 bp, Homo sapiens
cgtccggcacggcgctcagtgccaggctggaggcggcagcggttggaggcttcgcccggctttgcagcggggacttcggcggcggcgcctcaggcacctcggcccggacacgatgaggcgagtggtacgacagagcaagtttcggcatgtatttgggcaagcggtgaaaaatgaccagtgctatgatgacatccgggtttctcgtgtgacctgggatagttccttttgtgctgtcaatcccagatttgttgccataatcatagaggcaagtgggggaggagcgttccttgtcctccctctgcacaagactggtcgaattgacaaatcttaccctacagtatgtggccacacaggaccagtgctggacatagactggtgcccacataacgatcaggtcattgccagcggttcagaggactgcacggtcatggtatggcagatcccagaaaatggactcaccctttccctgactgaacctgtggtgattttggaaggccactcaaagagagtcggcatcgtggcttggcatccaacggcccgcaatgtgcttcttagtgcaggctgtgataatgccattatcatctggaatgtgggaacaggggaagcccttataaacttggacgatatgcattcagacatgatttacaatgtgagctggaaccggaatggcagtctgatctgcacagcttccaaagacaagaaagtgagagtcattgatcccaggaaacaagagattgttgctgagaaggagaaagcacatgaaggagcaagacccatgagagccatcttcctggccgatggcaatgtcttcaccactgggttcagccgcatgagcgagcggcagctggctctctggaatccgaaaaatatgcaggaaccaattgctcttcatgagatggacactagcaatggggtgttgctgcctttctatgaccctgacaccagcatcatttacttatgtggaaagggtgacagcagtattcgctattttgagatcacggatgaatccccgtacgtccactacctcaacacattcagcagcaaggagcctcagagagggatgggttacatgcccaagaggggacttgatgttaacaaatgtgagattgccagattcttcaaacttcatgagagaaagtgtgaacctattattatgactgttcccaggaagtctgaccttttccaagatgacctgtatcctgacacagcggggccagaggccgcgctggaggcagaagagtggttcgaaggcaagaatgcagacccaatcctcatctccttgaagcacgggtacattccaggcaaaaacagggatctcaaggtggtcaagaagaacattctggatagcaagcccactgcaaacaagaagtgcgacctgatcagcatccccaagaaaaccacagacacggccagtgtgcaaaatgaagccaagttggatgagattttaaaagagatcaaatctataaaagacacaatctgcaatcaagatgagcgtatttccaagttagaacagcagatggcaaagatagcagcctgaaggtcccacccccacccctacagaaaaaatgggagcaagaacttgtgcttgggagctggttattggtgtggtcctagggagggcggaaagggaggcactgccatttggagacattccatttcagatttgtcaaccagcgataggccacattccagtaagaactcaatttgtctcccaaatttgcagaaacaaaacgtgatttaaaagctgagctttttatcagaaagcttttttgatgttttaagtgttatgtgacttgttgaactttttaaaaagtgctacttttaaaatcccagatactctgaattttagaaaacaaactaattctgattgtgtcgtgcccaagtacccttttttttttaatgaatagggaccaatgccacattgctttttatatttctttcttttttaatgttgccaaaaccaaaagtagctttgttttcctttgtattttgctactttgcagtatttgtgtgtgtggttttttttccttaatttgaaagggacagcactgtgtatgtttataaactaaatgaagataagatattattttgtataaacattcatctgagaacaatcaaagcagtagccacatggtgctggctcctttgcagcacaaacctggtcattttgatgactgtacaacaggaagacttgaaaaatcacgtggattcatattaccaccgctctcatttcatggagtcttctgatcaaaaaagctcacgtcgtatttcttcttttcctttctcttttctagaaattgggtgtttgtaccagaatggaattttgcttctcggttatcctgtgcttcagatgattataatctaacccaaactagcatgtgtttctgcagtttgttacacacctaggatcatattgcattcatcactttaaacatcatgtttcaggttttggtcaatacttgacaagggtgcccaggacaggaagacgtgtactgctgagtgttccttcttgcccttttcagcagcttgcccagctcttgagtacagtggtggggactaaaaatgtgggcatgtggagaggggtatttgccctgggtgatcctgtttccctgtgctgtccccatgctgtgttggaggaggaagtggctctccttccaccaacaaagctcctgctctaccctcttcctcacatgtgctgcgacctctctcagggctcccccagccattccttctttccttcctgccttttagctctaaccacattaagctaagacaaggccagagggtgcgattgaatgagtattgagactgaggagaatgatagagagtgaagcagaaacaggagcgcagacctctgctgtagctttaatgcatacaaacatgtccctccgcacaactaacctgccctgcctctccatctcgcaccaaggctgcgtcaaagcacagaggctccccggactcggagggggccagagactgagctctggtcacctgttcattcctcggttagctggaactttgccccgtttccagtttcttatagtgcatgcttgggaaacaagatttaaggagcctctgttttggaagggctgtctgtgattgaacgtgaaatgtgtagtgccattgggaccacgaagggaattcttgcacatgctcgtgctggtgtgggcatgggactggctggaaacgtctgtatgcagggagccagggtgagggcagagtgtggtgacagccgaacttggagtaatgtccgtgtagaaaaaggaccatgttcttatccagccaatactgggagtgctgtctccacaatttcagggcatctgaatgtttgatgtggttttgtgtgtgtgtatgtatgtgtttaatattgaagtggatcatgagatgtaaagaaaacaataatggcaatgacttatattcaaatctgtatttgtttctttatcaatgtaatctgctgaggaccttttgtctaagattcagtagtgttttaaggttctgatatcgaattaatgaagtaaagttgttgatggtggtgaaacaccgtagggcatgtggttcaaagagaagcaggagggcaagggaaagttaccctgatcttagtttgtagcttatgacttatttaatgaatggatgcccagccaagctcagagtaggcgcccaaagcattgtggattattttcctgttttgtctttttttttttttttttaagccatgacatcccagaagaggacagtgaattactcctaggtcggctcttatagagtggccatagtgttctgtcaaaacacttgcttccattttcagagataaaaaaattcattgattttaccaaaaaaaaaaaaaaaaagaagaaaaaacaaaaggggggcggggccgccccttttttttgtcttattattctttccctgtggaagtggttcttctatttctctttagttttctttctatctgtaaaccacccgaagggtaccatctaccacacaaacgaagggggcacgcgtgaaatattctaccccactacgaggggcgagtgcctactatatatataagcgagggaggcgcccaaaaacgtgtgtatctgggtggagaacaacacaatagtgagctccaccaatctctctacgcgagaggaagataaaacaccactctgatatgggctatccccaacgaacgaacaaaccaaagactaaagacagacaagacacaggacagagagaggcaggaacaagcacacgaacacaacacgccacagaaaaaaacaacggacgccgcaacagcagcgggaagactacgcagacagacgcaaaaacaacagagcactacacgcaacaagaaggtagcaccagaccaaccgctcgctaggccacactc

SEQ ID NO: 9888 - DNA, 3978 bp, Homo sapiens
  misc_feature 3977, 3978: n = A,T,C or G
cgcgtccgcctcgacgggcaggcggcgataagaggtggcgtcctccgcggcattgcgagcaccgccagtctgcgccgccaggcgtaggcggggtggcccttgcgtctcccgcttccttgaaaaacccggcgggcgagcgaggctgcgggccggccgctgcccttccccacactccccgccgagaagcctcgctcggcgcccaacatggcgggtgggcgctgcggcccgcagctaacggcgctcctggccgcctggatcgcggctgtggcggcgacggcaggccccgaggaggccgcgctgccgccggagcagagccgggtccagcccatgaccgcctccaactggacgctggtgatggagggcgagtggatgctgaaattttacgccccatggtgtccatcctgccagcagactgattcagaatgggaggcttttgcaaagaatggtgaaatacttcagatcagtgtggggaaggtagatgtcattcaagaaccaggtttgagtggccgcttctttgtcaccactctcccagcattttttcatgcaaaggatgggatattccgccgttatcgtggcccaggaatcttcgaagacctgcagaattatatcttagagaagaaatggcaatcagtcgagcctctgactggctggaaatccccggcttctctaacgatgtctggaatggctggtctttttagcatctctggcaagatatggcatcttcacaactatttcacagtgactcttggaattcctgcttggtgttcttatgtctttttcgtcatagccaccttggtttttggcctttttatgggtctggtcttggtggtaatatcagaatgtttctatgtgccacttccaaggcatttatctgagcgttctgagcagaatcggagatcagaggaggctcatagagctgaacagttgcaggatgcggaggaggaaaaagatgattcaaatgaagaagaaaacaaagacagccttgtagatgatgaagaagagaaagaagatcttggcgatgaggatgaagcagaggaagaagaggaggaggacaacttggctgctggtgtggatgaggagagaagtgaggccaatgatcaggggcccccaggagaggacggtgtgacccgggaggaagtagagcctgaggaggctgaagaaggcatctctgagcaaccctgcccagctgacacagaggtggtggaagactccttgaggcagcgtaaaagtcagcatgctgacaagggactgtagatttaatgatgcgttttcaagaatacacaccaaaacaatatgtcagcttccctttggcctgcagtttgtaccaaatccttaatttttcctgaatgagcaagcttctcttaaaagatgctctctagtcatttggtctcatggcagtaagcctcatgtatactaaggagagtcttccaggtgtgacaatcaggatatagaaaaacaaacgtagtgttgggatctgtttggagactgggatgggaacaagttcatttacttaggggtcagagagtctcgaccagaggaggccattcccagtcctaatcagcaccttccagagacaaggctgcaggccctgtgaaatgaaagccaagcaggagccttggctcctgagcatccccaaagtgtaacgtagaagccttgcatccttttcttgtgtaaagtatttatttttgtcaaattgcaggaaacatcaggcaccacagtgcatgaaaaatctttcacagctagaaattgaaagggccttgggtatagagagcagctcagaagtcatcccagccctctgaatctcctgtgctatgttttatttcttacctttaatttttccagcatttccaccatgggcattcaggctctccacactcttcactattatctcttggtcagaggactccaataacagccaggtttacatgaactgtgtttgttcattctgacctaaggggtttagataatcagtaaccataacccctgaagctgtgactgccaaacatctcaaatgaaatgttgtggccatcagagactcaaaaggaagtaaggattttacaagacagattaaaaaaaaattgttttgtccaaaatatagttgttgttgatttttttttaagttttctaagcaatatttttcaagccagaagtcctctaagtcttgccagtacaaggtagtcttgtgaagaaaagttgaatactgttttgttttcatctcaaggggttccctgggtcttgaactactttaataataactaaaaaaccacttctgattttccttcagtgatgtgcttttggtgaaagaattaatgaactccagtacctgaaagtgaaagatttgattttgtttccatcttctgtaatcttccaaagaattatatctttgtaaatctctcaatactcaatctactgtaagtacccagggaggctaatttccttaaaaaaaaaaaatctatccatctacttctctcttacctgatttatgtgttagaataaattcatgaaattcgattccaagcatacgaaagatgcctaaagttgattctatgctccttagatccagacagaataatgagtacaggtttatgaaattctaaaagtttctgtcgtctttaaaaaggaacgtgcagtatatttctatctggctgtttagataaccctttccttgtattaattgtgagcacggagctcactggtgggggaggttctgaaactctctgccctcctgtggttgaatgaagatgttgcaagacttgcacaaaggaggttattcttctgacagcatcaacttttagagatggttctttttcatctttccaattcagttacttgacagtctccttccccagtatgctgaagtttgttaagagtcaccagtaattgtgcttttcagacagtagtgcagcttcaaaatcgaggccatcactgggctgatgggctgggagaaccttgccatgtgcctgcctgtttcctgcccccttagtcactgcccatttcctgcccccttggtcgctgacacaccttcacccaaagtgccatggttctgatggtggcagttccatctccctgacatcaggaagcttttctcgatcagagcagagcggggcctgcctgccctcgtgtcactggatttctttctcttataatcagctgaaacagagttctcaaagaacagtaaactcaggttcagaggtattatggaataagaatggtttcatagtttggcttttctatataatgcctccctctcaaactgaaatattcatttttttagtggagtatttgactagagagaaggtaaggcagaaatacagtctacactggcttttaaaaatgtaaagccaatttccaaccggaccccaaatagtacaggttgaacattccgttccaacaatccaaaaccccaaatgctccaaaatcttaaactttgagttccagcattccgtcagaagtggaaaattttacacctgacctcatttgacaggtggcagttacagtgcaatcaaaactttgttccatgcccaagattattaaaaatattggataaaattaccttcaagctatgttgtataaggtgtatataaaacaaatgaattttgtgtttagacttgggtctactcccaagatacctcattatatatatacaaaaatccccaaatccaaaaacatttgaaacacttctggtcccacacattttggataagggatatttgacctatatctaattatataataagaaaaatgtattttctttttttttttttttgagatggagtttcactcttgttgtcgcccaggctgcaatggcacaatcttggcttactacaacctccgcctccctagttcaagggattctcctgcctcagcctcccaggtagctgggattacaggcatgtgccaccatgcctggctaattttgtatttttagtagagacggggtttcgccatgttggtcagactggtcttgaactcctgann

SEQ ID NO: 9889 - DNA, 2310 bp, Homo sapiens
  misc_feature 1, 2, 2108, 2290, 2291, 2292, 2293, 2294, 2295, 2296, 2297,2298, 2299, 2300, 2301, 2302, 2303, 2304, 2305, 2306, 2307,2308, 2309, 2310: n = A,T,C or G
nnctctagggaaaaggacgcagttggtgtggagcagcccgtcccgcctcccctcggcggagacagcaggcagagagatgaggaaactgagacccagaaaggtggaagcacttgtctaaggtcacgcctccaggaagcagtgtgtccacgactccagtccaagtggtcaggctccagagcccacagtcccaggggtccatgatgccgagctgcaatcgttcctgcagctgcagccgcggccccagcgtggaggatggcaagtggtatggggtccgctcctacctgcacctcttctatgaggactgtgcaggcactgctctcagcgacgaccctgagggacctccggtcctgtgcccccgccggccctggccctcactgtgttggaagatcagcctgtcctcggggaccctgcttctgctgctgggtgtggcggctctgaccactggctatgcagtgccccccaagctggagggcatcggtgagggtgagttcctggtgttggatcagcgggcagccgactacaaccaggccctgggcacctgtcgcctggcaggcacagcgctctgtgtggcagctggagttctgctcgccatctgcctcttctgggccatgataggctggctgagccaggacaccaaggcagagcccttggaccccgaagccgacagccacgtggaggtcttcggggatgagccagagcagcagttgtcacccattttccgcaatgccagtggccagtcatggttctcgccacccgccagcccctttgggcaatcttctgtgcagactatccagcccaagagggactcctgagctgcccacatggcctaagatgtgggtcctggatccttcccccttctcaccataaccccctctcagtgtttccccaacttctcccttttagcagggtccctttagagcccaactccaggtcaaatctggagctcaaatcccagtgctccctccccaggagtggggccccaactcttccaagataccagcattcctcaagtcctcccaaaacttcctacccacaccctcttcccaaggccctcaggggcagaaaacatctccttcaacccgtccccactccttcctctgcatgaccttgggcaaacccttgccctttcaagccatcagctcctgcctctctgccatgagggctttggatcagattcctcttctcgccaggatgaggacacgcactgccctccatagacacagatgaaggggtgggggtcattcagctcgaatgggtcccagatgctcacttggcctttccctgcaggatgagtgaagacgtttgcctctcacagtgtgtcttctacctgcattttggcatcagagccccccagcccacccaccacaggcaattactagccctagttgataggtgaggtgggtgaagaaggctggaggtgacatgtccgaggtcacacaacaaagcagcatgcaggaactagaaacacatcttcagcctcctcctgggccagctcttgtgctacaggtggggcggagccagcccctcaccttcctggttccctgagggtcctcagggtggaggacaggtttggcccagaaagactagccagaggcctgatggtcccaggtggctctggatatactttggatatggatttaaatggtctctaagagccgggggtagggggcaggaaaagtgggttgtctttgcccctcaaagtccacctacctagaaaccaagcccacggtcttggccgtgaccctgataataaatgggctctctcagaggcgccagcccctccctccccagccggaggcgtcatctctcttctgtaccactagagggagctctgatgcagctggagagcagcgctcaaggctctcgcccctcccctccctaacccttaccttcagtctccaccagcctgaagggcctcctaggggatcctcaggcggcccccaccagggcacaccctactgtccttgtgcctcacgccccctcctcatcctgcaccccttccatcccaccttccctttcaataaacagctgggatggaaacaaaaaaaaaaaagaaaaaaaaaaaaaaaaaaaaaaaaaaaaaaaaaaaaaaaaaaaaaaaaaaaaanaaaaaaagaaaaaaaaaaaaaaaaaaaaaaaaaccttggggggggggccgggcccccatttccccttttagggagccgtttacccccccccccctggccgtgttttaccaacggttgggctgggaaaaaccctgccgttcccaaattaaaatgcttggagaaaatacccctttttgcacagnnnnnnnnnnnnnnnnnnnnn

SEQ ID NO: 9890 - DNA, 2415 bp, Homo sapiens
  misc_feature 1, 2, 3, 4, 5, 6, 7, 8, 9, 10, 11, 12, 13, 14, 15, 16, 17,18, 19, 20: n = A,T,C or G
nnnnnnnnnnnnnnnnnnnnacatgttcatatacatatttatatatatctcatgtacaaagttacattctgaaccccagggattccataatagaaataaatactgaaataactacattgctaaatgagctctttgctcatagaaatgaagctcagcctctaagagacagcaagtgggacattctagaacccatttttcagattatagaggcaagtaaaattctgatagaatgtcttggacaaaaaacgaatttggaacataaaatggttaagatatattcaaatagagaaatgtatgacaaaattaataaaacttaatcttttaagagaaaagacagacatttagtgttacagaatagcataaccctgttagaaaagcatttatgatttccacatttaattttctcttctactcttcccatgttacaaagtgggaccaaatgagtccctttctgaacatgatcaattaagaagagccctaaatctggttgagtcctttggtaacggtcataatactcacaaggaaataaatattcagttccatggcatttgcaagacacatgttctttaggacagttaatattatgacacatctgttttattttgttactaaggcagcctatgttaaagggtctcgtctcaaatgtaggaagacctttacaagaaatgaacaatacagtaactgaaagaattgattttaaccttttctatgcaaacacaatctgaaaagttatgtgctgcatattgtgctcaaaatgttttatactctccacaagctgcaattaagagattcattcctatttttaaaatttagatccacatgggttagagaaaaatactctcaaaagtgagttcctagagaatattatccctttgcctcacagagattttaacctgcatttaagagtaagtgttaggttgaggcatatgatattgtcgcttttgcagatcagcaatggttgaacactggcaatttcatatggttcaaccttgcacatgactcaagtgtaaaaaaaggagaaaccttcaagtattccttatttcttccaataggggtacactttttttgtacagtgagatcaacccaaagtacgcaagcctcttctctcccttgatgtggtagctacaggcagttacattcctttgctgcttgtgagaagcttacattttggcattttcttccaaaaattaccacgttgaccaaagtaaacattacaagaatatgaacttgttattgggggaaaggggaagtgaagcaatctgtagaaaatatttaactgaaattacaaacataaggacaagcctttaaagcaaattatacaggcatttttgtcctctctctggtccctgcagttaattaacagggccacagataatctgacatctttagataaaacaactacacacctatattacttaagttaaagccagtaagttcaaaaaaagcaattacaaccatttgacatgtttgtatttttcatctctaactcctgatttcctaaattacattcagtcatacaaacatggctgaacaacagcaaatgggatctgactctgggatgtttacttcttgggattaaaattcccaaacactttggtgtctctttcttgtgaatctatacaacatttccaataaatgtttaataatgattttttaaaagatattgccaaaaatggctcagatttaagatgaaataaaaacatagcaaacaagctatggaaaagtagcctacattttggtgccctgcaaaaaagtgactaagtagctcaagcaaaaaattattcttttaatacagcttttaccaaaacagttttaatacatgagtggctacaattttattgtgtacacaatgtgcttatagtcacatgtggcccaatggatccaaatgcctcctctggctcatgaaatcccatgtacttcacaatctagcctaatcgtgtatatgcataaaagccactggtatactttttacagacatctttgtataatagtccagaaaaaaaaaatcagtggtacttaagaatgtttagacaatttgacatctacgtttgctttcttttcttttcagtagtccttctgatgattgggggcctttatcccataggtttatactgttaaaacagtacataaaattacatttagctttgcttcggaccggcgcgggggctcacgcctgtaattcaagcacttcgggaggccaaggcgggtagatcatctgaggtcaggagtttgagaccagcctggccaacgtggcgaaaccctgtctccactaaaaatacaaaaattagctgggcagggtggcacacacctgtaatcccagctactgggaggctgggcccgggcatctgcctccacctgagaggtggaggttgcagtgagctgagatcgcaccactgcattccagcctgcggacgc

SEQ ID NO: 9891 - DNA, 548 bp, Homo sapiens
  misc_feature 545, 546, 547, 548: n = A,T,C or G
cggtgttttaggcctgttcactttctcttactcactgtctattcacttgtcctgttcactcgtctggaagatctcagccagcaccatgactgacaatgagctgtctgccttggtagtggataatgggtcagggatgtgcaaggcaggctttggtggtgacgatgccccccgggctgtgttcccctccatgatagggcgtcctcgacaccagggcgttatggtaggcatgggccagaaggactgctacgtgggagatgaggctcagagcaagagaggcgtcctgaccctgaagtatcctatcgagcatggagtggtcaccaactgggacgatatggaaaagatctggtaccacacattctacaatgagctccgtgtggcaccagatgagcatcccatcctcctcaccgaggcacccctgaaccccaagatcaaccgggaaaagatgactcagatcatgttcgaggctttcaacacaccagccatgtatgtcgccatcaggctgtgctgtccctctatgcctcaggacggaccacaggcatcgtgannnn

SEQ ID NO: 9892 - DNA, 1985 bp, Homo sapiens
cgacccacgcgtccgcggacgcgtgggttctggccctgctggaaaagatggtcgcactggacatcctggtacagttggacctgctggcattcgaggccctcagggtcaccaaggccctgctggcccccctggtccccctggccctcctggacctccaggtgtaagcggtggtggttatgactttggttacgatggagacttctacagggctgaccagcctcgctcagcaccttctctcagacccaaggactatgaagttgatgctactctgaagtctctcaacaaccagattgagacccttcttactcctgaaggctctagaaagaacccagctcgcacatgccgtgacttgagactcagccacccagagtggagcagtggttactactggattgaccctaaccaaggatgcactatggatgctatcaaagtatactgtgatttctctactggcgaaacctgtatccgggcccaacctgaaaacatcccagccaagaactggtataggagctccaaggacaagaaacacgtctggctaggagaaactatcaatgctggcagccagtttgaatataatgtagaaggagtgacttccaaggaaatggctacccaacttgccttcatgcgcctgctggccaactatgcctctcagaacatcacctaccactgcaagaacagcattgcatacatggatgaggagactggcaacctgaaaaaggctgccattctacagggctctaatgatgttgaacttgttgctgagggcaacagcaggttcacttacactgttcttgtagatggctgctctaaaaagacaaatgaatggggaaagacaatcattgaatacaaaacaaataagccatcacgcctgcccttccttgatattgcacctttggacatcggtggtgctgaccaggaattctttgtggacattggcccagtctgtttcaaataaatgaactcaatctaaattaaaaaagaaagaaatttgaaaaaactttctctttgccatttcttcttcttcttttttaactgaaagctgaatccttccatttcttctgcacatctacttgcttaaattgtgggcaaaagagaaaaagaaggattgatcagagcattgtgcaatacagtttcattaactccttcccccgctcccccaaaaatttgaatttttttttcaacactcttacacctgttatggaaaatgtcaacctttgtaagaaaaccaaaataaaaattgaaaaataaaaaccataaacatttgcaccacttgtggcttttgaatatcttccacagagggaagtttaaaacccaaacttccaaaggtttaaactacctcaaaacactttcccatgagtgtgatccacattgttaggtgctgacctagacagagatgaactgaggtccttgttttgttttgttcataatacaaaggtgctaattaatagtatttcagatacttgaagaatgttgatggtgctagaagaatttgagaagaaatactcctgtattgagttgtatcgtgtggtgtattttttaaaaaaatttgatttagcattcatattttccatcttattcccaattaaaagtatgcagattatttgcccaaatcttcttcagattcagcatttgttctttgccagtctcattttcatcttcttccatggttccacagaagctttgtttcttgggcaagcagaaaaattaaattgtacctattttgtatatgtgagatgtttaaataaattgtgaaaaaaatgaaaaaaagcatgtttggttttccaaaagaaaaaaaaaaaaaaaaaaaaaaaaaaaaaaaataaaaagagaaaaaaaaaacaaaaataaaccaataatgagtaaaaaaaaaaaactttggggggggccccggtacccaattccccttatagagcgccgttttaaaatcaactggccgaattttaaaaaggtcaggactggaaaacctttggcttaaccaaattaaa

SEQ ID NO: 9893 - DNA, 1460 bp, Homo sapiens
  misc_feature 1, 2, 3, 4, 1460: n = A,T,C or G
nnnnggtctggctctgtgtggtcctgtgcgtcgaacccctggtgtgtgaaagccggtgcccgcggcgttttggggggaacccaccccttctgtgcccggtttctgggaccctttggccgtccaatacccttgggccccggcccaacggagggtttgaaaatttttagggccaaccgcgcacacattttttgttttttctgttttttttattttttaagcttttattttatcactcttatcaaacacacatcagaaagcattatcaacagtgcatcttatggtaagtcagtttacaacaaaactgaacaaggcaattgtgtttacagaaaaagtcttcagcaaaaaagtatgcaatacagtcaactgaaacgcattgttcacactttttaggaatataggaaagtggaaaataaaagttctttgctattcagcaggaaagagtttaaaagacttgaatggaaatcagaaatttagggatttgagaaaataactttttggtactgacacacatctacatacatagtcccacttagtttttgttttttctttaaaaaaaaaacaaaagctcacaaacaataagacatcacaaataatacagcagaaccacagtgccaagaaatgccaagaccaatatgctactgaaacaactggtagaaatgttacagacaactattcactatgtattgtaatattcttgtagttctgaggtgaaggtaaaccaacaggagagattactccttgtaactggctttggtttaagtgatctttcacatttttttctaaccataccttcttataaaaaatgtagcaattacatgttactgagggaaaatagtactaggttttaatattcacaaccaactactccagctgacacaggatgccatcaaccattaaaatttattgatcatacttagattttctaaggctgatcaacagatagcaaagatggaacccttttgggaaaaaataaaatcccttctaccccagttttgacactgttaagaagttataaaggaatgttaaattatttaagatatttcaaaaaagaattaagaatggaagagtaaattctgctggaaaagatagggcagctttacagtctgcaaagtaaataatctacagagatgcagcttaacttttttttattataataaacatacttatttccataaggtgctgtgactttgcagctagtgcatactaatgccacccactgtacccaatgtatcaaaaggaataaggaatgtgaatcgcagaaagtagaagaaataacataagagaataacacaatagaaaaaaggcaaaaaatacattaaatatgacaacaacataaataaaagaacaaaacataattcgacaaacaaaagactaagacgatataaaaaacaaaataatctataaagaggaccataactacgtacttctctttacttttcttctttctttcgtctatgcan

SEQ ID NO: 9894 - DNA, 2425 bp, Homo sapiens
tcgacccacgcgtccgctggaccacctggcagagaagttccggcagaaggcctccatccacgaggcctggactgacggcaaagaggccatgctgcgacagagggactatgagaccgccaccctctcggagatcaaggccctgctcaagaagcatgaggccttcgagagtgacctggctgcccaccaggaccgtgtggagcagattgccgccatcgcacaggagctcaatgagctggactattatgactcacccagtgtcaacgcccgttgccaaaagatctgtgaccagtgggacaatctgggggccctaactcagaagcgaagggaagctctggagcggaccgagaaactgctggagaccattgaccagctgtacttggagtatgccaagcgggctgcacccttcaacaactggatggagggggccatggaggacctgcaggacaccttcattgtgcacaccattgaggagatccagggactgaccacagcccatgagcagttcaaggccaccctccctgatgccgacaaggagcgcctggccatcctgggcatccacaatgaggtgtccaagattgtccagacctaccacgtcaatatggcgggcaccaacccctacacaaccatcacgcctcaggagatcaatggcaaatgggaccacgtgcggcagctggtgcctcggagggaccaagctctgacggaggagcatgcccgacagcagcacaatgagaggctacccaagcagtttggagcccaggccaatgtcatcgggccctggatccagaccaagatggaggagatcgggaggatctccattgagatgcatgggaccctggaggaccagctcagccacctgcggcagtatgagaaaagcatcgtcaactacaagccaaagattgatcagctggagggcgaccaccagctcatccaggaggcgctcatcttcgacaacaagcacaccaactacaccatggagcacatccgtgtgggctgggagcagctgctcaccaccatcgccaggaccatcaatgaggtagagaaccagatcctgacccgggatgccaagggcatcaggccaggagcagatgaatgagttccgggcctccttcaaccactttgaccggaagaagacaggcatgatggacacggatgatttccgcgcctgcctgatctccatgggttacaacatgggagaagcagaatttgcccgcatcatgagcattgtggaccccaaccgcctgggggtagtgacattccaggccttcattgacttcatgtcccgcgagacagccgacacagatacagcagaccaagtcatggcttccttcaagatcctggctggggacaagaactacattaccatggacgagctgcgccgcgagctgccacccgaccaggctgagtactgcatcgcgcggatggccccctacaccggccccgactccgtgccaggtgctctggactacatgtccttctccacggcgctgtacggcgagagtgacctctaatccaccccgcccggccgccctcgtcttgtgcgccgtgccctgccttgcacctccgccgtcgcccatctcctgcctgggttcggtttcagctcccagcctccacccgggtgagctggggcccacgtggcatcgatcctccctgcccgcgaagtgacagtttacaaaattattttctgcaaaaaaaaaaaaaaaaagttacgttaaaaaccaaaaaactacatattttattatagaaaaagtattttttctccaccagacaaatggaaaaaaagaggaaagattaactatttgcaccgaaatgtcttgttttgttgcgacataggaaaataaccaagcacaaagttatattccatcctttttactgatttttttttcttctatctgttccatctgctgtattcatttcttcaatctcatgtccattttggtgtgggagtcggggtcgggggtactcttgtcaaaaggcacattggtgcatgtgtgtttgctagctcacttgtccatgaaaatattttatgatattaaagaaaatcttttgaaatggctgtttttttaaggaaaaaaaaaaaaaaaaaaaaaaaaaaaaaaaaaaaaaaaaaaaaaaaaaaaaaaaaaaaaaaaaaaaaaaaaaaaaaaaaaaaaaaaaaaaaaaaaaaaaaaaaaaaaaaaaaaaaaaaaaacccccccccccccccggggggacccccaaaccccccaaaaggaaacatttttaaccccccccccctggcccgtttttaaaaaactgggaaggggaaaaaccctgggttaccccaaaaaaaaccccctgaaaaaaatcctctttttccccgggggggaaaaaaaaaaaaacccccccccaaatcccttttcaaaaaatttccccccccacaggggaaaagaaaatttaacccctaaac

SEQ ID NO: 9895 - DNA, 3339 bp, Homo sapiens
  misc_feature 3338, 3339: n = A,T,C or G
gtccgcggacgcgtgggttgagaagaacattcaaatctaaggtccttgcacgatatcctgagaacgtagaatggaatccctttgaccaagatgcagtaggaatgctatgtatgccgaaagggctggcattcaagacccaggctgatcccagggagccccaattccatgcctttattatcacaagggaggatggctctcggacatttgggtttgccctcacattttatgaagaggtgactagcaagcagatctgcagtgcaatgcagaccctctaccacatgcacaatgctgagtatgatgtcctacatgctccccctgctgatgacagagaccagagcagcatggaggatggtgaagacactcctgtgaccaaactgcagcgcttcaactcctatgacattagccgggacactctctacgtctctaagtgcatctgcctcatcacacccatgtctttcatgaaggcatgtcggagcgtgctggagcaactccaccaggcagtcacttcacctcagccccctccactgccccttgagagctacatatacaacgtactctacgaggtgccgctcccacctcctggccggtccttgaagttttctggggtctatgggccaataatctgccagagaccaagtaccaatgagcttcccctatttgactttcctgtcaaagaggtttttgaactgctcggggtggagaatgtgtttcagctttttacttgtgcccttctggagtttcaaatcctgctctactcacagcattaccagagactgatgactgtggcggagacgattacagctctcatgtttcctttccagtggcagcatgtctatgtccctattctcccagcttctctcctgcatttcttagatgctcctgttccatacctgatgggtttgcattccaatggcctggatgaccggtcaaagctggagctgcctcaagaggctaacctctgctttgtggacattgacaaccacttcattgagttgccagaggacttgccacagttccccaacaaattggagtttgtccaggaagtctctgagattctcatggcatttggaattccccctgaagggaatcttcattgcagtgagagtgcctccaagctgaagaggctgcgggcctctgagcttgtctcggacaagaggaatgggaacattgctggctcccctttgcattcctacgagcttcttaaggagaatgaaactattgcccggctgcaagccttggtcaagagaactggggtgagcctggaaaagttggaagtgcgtgaagaccccagcagcaataaggatctcaaagttcagtgtgatgaagaagaactcaggatttaccagctaaacattcagatccgggaagtttttgcaaatcgtttcactcagatgtttgcagattatgaggtgtttgtcatccaacccagccaggataaggaatcctggtttaccaacagggagcaaatgcaaaactttgataaagcatcttttctgtcagatcagcctgagccctacctgcccttcctctcaagattcctggagacccagatgtttgcatctttcattgacaacaaaataatgtgtcatgatgatgatgataaagaccctgtactccgggtatttgattcccgagttgacaagatcaggctgttgaatgttcggacacctactctccgtacatccatgtaccagaagtgtaccactgtggatgaagcagagaaagcaattgagctgcgtctggcaaaaattgaccatactgcaattcacccacatttacttgacatgaagattggacaagggaaatatgagccgggcttcttccctaagctgcagtctgatgtactttccactgggccagccagcaacaagtggacgaaaaggaatgcccctgcccagtggaggcggaaagatcggcagaagcagcacacagaacacctgcgtttagataatgaccagagggagaagtacatccaggaagccaggactatgggcagcactatccgccagcccaaactgtccaacctctctccatcagtgattgcccagaccaattggaagtttgtagagggcctgctgaaggaatgccgcaataagaccaagaggatgctggtggaaaagatgggccgagaagctgtggagctagggcatggggaggtgaacatcacaggggtggaagagaacaccctgattgccagcctttgtgatctcctggaaaggatctggagtcatggactacaagtgaaacaggggaaatcagccttatggtcccacctgttacattatcaggacaaccggcagagaaaactcacatcaggaagcctcagtacctcaggaatacttcttgattcagaacgtaggaagtctgatgccagctcactcatgcctcccctgaggatctccctgattcaggatatgaggcacatccagaacatcggggaaatcaagactgatgtgggaaaggccagagcatgggtgcgactgtccatggaaaaaaagttactttccagacacctgaagcagctcctctcagaccatgagctcaccaaaaagttatataagcgctatgccttcctgcgctgtgatgacgagaaggagcagttcctctatcacctcctgtctttcaatgccgtcgattacttttgcttcaccaatgtcttcacaactatcctgatcccgtaccacattctgatcgtaccaagcaagaagctggggggctccatgttcactgccaacccatggatctgtatatcaggagaattgggtgagacacagatcatgcagattcccaggaatgtgctagagatgaccttcgagtgccagaacttggggaagcttactactgtccagattggccatgataactctgggctgtatgccaaatggctggtggagtatgtgatggtcaggaatgagatcacaggacatacctacaagttcccgtgtggccggtggttagggaagggcatggatgatggaagcctggagcggatcctagttggggagctgctcacatcccagcctgaggtggatgagaggccatgccggacccgccgctgcagcagtcccccagtgtcatccggaggcttgttaccatctcacccaacaacaagcccaagctgaacactgggcagatccaggagtccatcggggaggcagtcaatggcattgtgaagcacttcataagcctgagaaagacgaggggatgagcgatttgtctgtggaaattgtggccttggttcgcttgaaaaggttttcacaggtttaaaacggcccgggtccaaaagttcaaggcgatctcgtggaaacgacctttagaaattaaaaagagttcccgann

SEQ ID NO: 9896 - DNA, 3249 bp, Homo sapiens
  misc_feature 1, 2, 3, 4, 3248, 3249: n = A,T,C or G
nnnnagtcaaccgtttaaaacgcgggccattaattgtaatcgaccctcttagggcaattgggtaccggcgcccccccgagtttttttttttttttggggggatgtgtttttggttgtgtggtgggtttttgtttgtcacatttccaaagcagagtaccaacatttattaatcctcacaacacccctgtgaggtaggtcagtatgtcctttagagtcgagaactgaggcagaggtcaagcaaacctgccctgggccacagagcagcagatgaagggcctagacctggatccagaagctagggctctcggtccagcattcatccactggtggacatcacatgggcttatttttaccagcgaaggttacgtgaaggacaaaacgcactcagccagcaacggaaactcaacagttcaaacagcactggggaacatgtcagttaaagagacgaaacgctgaccagctcatgaatgaggcaagacaacatgcggctgaggaagtgtggaatcatcacgactggggattagaccaagaacgggcgctcaggagggttcaggaaaatgtaaacaaactaggaacccatccaaggggtgacaggcccaaatgcctacggtctccaaatggtagaaaaattagaaaaagatagtggaaaaatccaaccacgcaaccttaactttaaactaggaatgacaataatgtgtctaatgttcattcacactagaaaggccgataatgtttgtaatataactactggcgatagtatcctatttgtatgccaactttcatctcaagtattctgcttttctttccccacagacaaacaagtgttgttctttacagcagacctctttccctctacataccaatctatccactcgcataactactaagtggctcaatggcctatgtctcatgcttaattggctgagctaggcgcggaatccgggaaaccacaacagactgtactctgctcctgtatttcaggaataactgtcactaacctgcctctgtccgattccaccttctatgaagtacacacagaggagcagttcattcttttgtaaagggattggtggactttgttcgagatgccatttcaaaagaaatgagaaaaaagaaaaactaagacctgcactgtaaagcataatacaggagtagatttattacagctactccacattttccagagtgatacaatgaccatagagttaaaaactatcactgttatcgctgtttattttacaatacttggtttagtctacaagtttaaggcaaacatactaatgcatttgcttttcttcagaaatcatacttataaagattacataaaatctgtcccaaaacgtctaagaaatattcagtaattaaaaataagtctgattaagatgctttaccaggatacatgaatgaactaaggtggtatatgcttttaaaaacaaaatttaaaaaattcaaaaaaggcaatctttatcttgtttcaacaatgcattctgaaaaggttaaatttcagaaattatttaaaggtaaataagagtggcagccataaggaatactatttataaaataaacagagttatagaggctactttaaagaagaatgaactttggacttctgagtatgacgagtgcacgatgatggaccactgtcatggggaacacagtgcggcatcacggcacacagactggcatcgcctgggcgtgcgctgctccatgtttctcagaaaaagaggagttgatgcactttttcagctgctttttgtttgtttccagtgagcataaatgcttaacatcattaagaaaacaaaaataaaatttgaaggaaggcagccctttttaacaggaaggcggagtgtggcttatgtgtctccatttaacactgccaggcagttctgcagcaactgtagattaccctttgcatgcttcagttctaactctgccagttccactaaattttttctgaatgcagcaactcttcttgtcttaaaatctataagttcttgttttgcagactcagatattttttcaaatttctgacaacataattgttgggaagtttcggcctgtagaacatctttattttttgctcttgctttatccagtgctttattagcattttcataatccactagtgacctagaccttcgatacaggagatccttagcagcttgagattctcttaagtaatattttaaaagatcagaaagtttgaggtcttcatcagcagacactcgtgcttctatttttcttgttttatcgaacagttctgaaactttgagaaaaaacttgcatatatctgtagaatcctgagttcctaaagcatataatgaagaaccaattctattgtaatcatctgcagcacttttgtgggatcttgtcattctatcagatttagcagatgcatccttaactcggttatgatattccaaaagaaatgttcgttcgtgctcaaagaaatcatctacatcctttactcctgaaacgattactccatctgctgatttaaccatgtttttaaagaagtcttcaagtttctcttttttattttttcctcgcacactcaaatcttgattatattccaagaagacatggaaatttaaatctcttctcaaaataggatgtgctgccacacgacacaggaacacttcatgcatcgcaactgtcttcttgaatattgccaaatattcagcttccagttcctgtttcatctttgtgaattcttccttcgtcattgacccttctccttcaccaagcttctgtagtttttcccttgaagcatcaaaatcaggtcttggtggtgctggtggaatgatataacctgcatagtcttcattttcaacaaaggaatcatgaagccagataaattcctcatgttgccgaacaactgaaaactcgttttgtttaaaatttggcaatgaactctttgtgtgaacagtgaattttactttatcccgctcactaagagcatcagaaatgtccacctgcagagcagcatcactttgaagatctacatttattgctttaagtccgcggtcctcttctgagaggaagtccgggccgtcgtccaggccttccatcatggctgctccgaggcaggcgcgccggggaaaaggatgagatgggggagacacaaagggagacattagtgacaggctggcgcggtccccgcgcccgccccgcgcccgctgcccccaccgcgctcccgggactcggcgccgcggagaacacccaccatcatggctgcgccgcggacnn

SEQ ID NO: 9897 - DNA, 441 bp, Homo sapiens
actagtaacatggtgtgtatgatacactaaaaagtaaatggacaagaagtaaaatgccagtgagattatgctgggtcagatccaaagccagcacggcaccgggtttcttgcctaaggtccatggtgaccactccttggctattgccaatgttcactcaaggcccaagcactctttattcagctggtggcaaatccagccaggcttgtgtttttcccttcagtatgacgagctccccctaagcccaagacaagtcctaaaatgtcatctgggagccaggacctggaatcaggatccttaggaatttacttggtgctgtattctactatggctgagctggcaatcaaagtgcaagattaagccctttattttctttggtctcctttcctcaagcagatggatgctctccctgtggtcaccgacaccccaggcctgaggcaagt

SEQ ID NO: 9898 - DNA, 2570 bp, Homo sapiens
  misc_feature 2568, 2569, 2570: n = A,T,C or G
gacgcgtgggtttttttttttttttatgcgctaaagttacaggaacacgggccctagttttcattgatagtaacgctgcttctaatttggcttaaccacattcatgcttaccctgctgctcagctttctcagggaagcaactccaggaacactccttccacttccctctctaccaacagatgtcaggactgtcatttatctacacatttgtgttctttagaaaaaggcccaccccctgcacaagcacagcctcttgggcagataggtggctgggtcagtgcttaagacaggattctagtcttcacttgcctgtgcagctgggcgctgaccttccaggtagagcacagatggcacaaccccgaggcagccccaacttgcatttccctccctccaggggctattcctgtcttaggcgatttgtggggtgcagtgaatgaaactaaagagttgttgcacctgaaaaagacaccagtgattgtttattgggtagtcgattggagactttgattttttttttttttcacatgggaaagtcttagattccagtagatggaattgcaatcctttgcagtttgttctcattacagataatcaacatttcttttgtataattcaatacatgatcaagttaattggtaaatttttattgaaatttaaaacttgcatttttatatatgtgtatgtgtacacataaaaatattttttaccatatgaaaattgcagtagctaattttctgatttcctattttataatgatacatgggctggaaaaatgtagaacgtttttatattctagaaatttattttggaagtacatttttataagggtctaatctcacttttggaaaatgaaagcacaggaatgatggggtctggtttatgtgaacaagtgagtagaaacccctttggatcattttattactgcatttttatttggtgctttttaggaagtagatctttggtaccacttcactacgtagagcattcgaagttttatccatgttatatattgtactcctgtggcatgaaaaatagctcccaagatatagagaggagaggagtgaagaaaaggctgtggtttttttttgttttgttttgtttgccacttttttatctcctattcctcaccacatagtgctttttcctgaaaagctggactgagaattggccttgaatcaggtcagagtgttaactgtcaacatgaagtattttcacttcgcagcatcaactttcaagcataagtaaaaacacaacttgcatactttgatggagcttaattgtgtgagtagaatatgtagcaaagctttttaggattttcagaactagaatactttttaaggaattaaaagtgtttctggaagtcaaaaatgggaaagcaaaaagtagctgtcctccctaaagagctttagaagatagcttaacctgtaggtacatgttatgaaataaacctttctaacataccaggagtagggcaactgtgtgagattgcgggggctacttgagagcccaccatacattggtactgccatacctattcatctaacgaggcataccggggcaaaggagagctttattgcatgcaccctcgacaaaacgccggcctagcaaaccttcctcgctagcctctgtgtcttcttcaaatagtgattattgttttaaagcagacaacacaataacagcaacactccaacacacactctactagataggcagacaagctagaacacacaaaacacaacactcatcacaaaaggaagagaggcaggcggagaggagcacacgacacacgaagcaaggaaagaaacgactggacagaaagcacagaagaccaaagagggacgaagagcgaagcaggaggacacgcgcgaaaagaaaaaagggcagagaaggagaaaagccgacgaccaccacggaaaaaagacgggcagaggcggaccgggcaaagagcaggaagggagccgaacgacaagacgaagagagaaccgggagcgagaacagagagaagaaatcgatgagacgagacgggagaaaacgagaagagggacacagaaaggaaccgggagagagagaagaccaggaagacacgaaggtaaagagggcaaggacgaacgagcagcgaacagaacgagcggcaacagagcagagcgaaagaacgaagcgaaagagagagaagacgagaggagcgaaggaagaagacgcagaaggagagaacaagcgagagaggccgagaaggcaaagaacgagaggagcagacgacgagaacagaacagaagacgaacgaacagagagatagcagagcagtagacggacagagaagcacaaaacgcagagcaagagagcggaaacacaagagactagaggagacgagaggacgcgagaacggacagccgaaagcggcagagaggaaaccagagcaaagcagagacgacgacggagcagagaggggaacgaggccgaagacaacagagagaaggaggcggacgcgacgacggtagcagaacgccacagagaagagaaagagacacggaggacgaagccgagagggagagacgcaggacgagcagagannn

SEQ ID NO: 9899 - DNA, 2679 bp, Homo sapiens
  misc_feature 1, 2676, 2677, 2678, 2679: n = A,T,C or G
ncagcacgctggcgtagggtagtatgtttcaagacaccatagtaggccagttacattttaattaagtcatcgacagtattgacacgtaaattgtatttttcaatctgtgctcatcaaaattaaaattagttattgatttagtcatcacatttaagtagaacacatgtggcacaatagtattaagtatatttgagcacttttgcaagacagaaagtatttacaagcatctattgctactttatgcctaatgaaatataaaatgtaggatgatgagagactttgtggcattctttcatttaaacctttatgaaattaaccatctagttcatcattacatactcctagaaaaccatccatttcactgcccacattttggcttcctaccacaaattccacataagacttctctatgaaggaccagtcatttacattgctcatttcattctgtgttcagaagtcagtattgtctttctccaataattaaggtgcaatacaaattaaatcaaccttgattttccagactatttgaataataacttgcttttatggctttaaactccaggtctttcctttttaaaatatttctgcattctcttttatgaactagatcaggatgccgtgtttttcctgtgctttcacccccaaaaggttttgtgcatgtgtatgaatacacataatattagtgaatgtgaacccatgttctatacgcactaaacacacagttaatatataaacgcctgcttcatttgtttcaacaccttcattatcaatatgattcatattgatgagatatagtgatgcataatgagccaggcagagagctgaaatgatatcagttaatgatgtcacagtgttagcaccctgcatggatgtggtcaaaatatcattcaagttgtacttcctagtttttatcatcatactactatgtcatatgattttcagactaatttaacatgagaaatgttttggccctaaaggatttcacttaacctagttaccctatttcagtaagtattttggaattcaaccctcgaattattttttctcatttcagcatagtgataggggatgcaatgaggcttcattattttttatgacctgcccctcatttgctctgatgttccctaaattctgtaatcatatcataacttttgttatgaatagagaggaatgggctcactgaaacctgacactagaaattggtgggtgatgctcataactgcaaacacttagcttattgaagtgcctctatttacatgttctttagttataatatgtatttttctaacagaaatacacgtctgtaattggtatatattatactttgtatgtgtcacaacaaaagctaaacagaggctaaagtctttagcagagaagaatgaattacaaatttaccaataagagctctgtttatggttctgtattgaaggacaaccatgacaaccttctgtcattttcacgaaggccaagttggtactttgattatagccatcgtagaacattagcactagaaatctgtctcccttacaatgacttacctagctagcatcaagtaacttgtatcacctgctttaaatgtaagggatagaaaatactattttgtctacactgaaaaacattattattcattgataagtagtaataattataaaagtaacattctttaaagcaaacacattgaaaatattattacaggcagaaccctgatttttaatttatattccctgctgcagacattagccttctttaattcttttgccattacatacatgtttcggctacagactgaacacgaactaaagtccctaaggaggaaaaaaccttaacatattcctgagatgtgattcttttattacttctttttgcaaagctaattatcaaatgatttgattaaacctagacgcattaggaaatgcaagttttacctaaaacttgcagaaatttaaacacatttccatttacttactaacgaacagacctgatttttatttaaaaacacaatttagctttgccaacagaagagtaaaggaaaccataacttataaatttgtaatgtgttcctccttgttggagacattagccagtgtttagttttagaccaacttatacaaacagagtattgatttgtacacattctggagacttgctatatcatggtttgctatggcacagactcagcttagcatggggacattttgaacttcattcaaagttgagtagttactggaacctttgacattgccttgtaatgaggtacttccaaaaaaagacccctaacaatggcataatagtgaggtctctctgtgcatatacataatatatatgcaggataaatgtgtgcaccaatcaaatctaaaattttatgtgactgtcaaatgaatattatttgggttaagatttttcatttctgatttggatagaaaattgctattaatcttgtattaaaatagtttttaaaaatccaaacaaaacaacaaaacacagacaaacaaaactctgttgcgccgcgctcggccccaagacaactcttcgacacttcgttgggcgcgcgccccagagagaagggaatgcggcacaacgggcaaagagacccggcccgaacacggcggttcccccaaaaatcgcgggggcccggcgtggaaaccaggccgggcacgggcacacacgccgccatannnn

SEQ ID NO: 9900 - DNA, 1165 bp, Homo sapiens
gcgtccgcccacgcgtccgtagggctctcggatgcagggagcctgggcccaaacagcagcttccggagtcggaaggagctgaggaagaagactgactgaaggagcttgcgacttttccgcctcggcaaccggacccagcagcaagcaggacgggcggcgctctgctactggtcccgttaagccagagtagcccaagccctgaagtcactgctcatccggaatggaaatcccgccgaccaactacccagcctccagggcggccttggtggcacagaactacatcaactaccagcaggggaccccgcacagggtgtttgaggtgcagaaggtcaaacaagccagcatggaggatattccaggaagaggacataagtatcgccttaaatttgctgttgaagaaattatacaaaaacaagttaaggtgaactgcacagctgaagtactttacccttcaacgggacaagaaactgcaccagaagtcaacttcacatttgaaggagaaactggaaagaatccagatgaagaagacaacacattttatcaaagacttaagtccatgaaggaaccgctagaagcacaaaatattccagacaattttggaaatgtatctccagaaatgacgctcgttctacatttagcctgggttgcctgtggttatataatatggcaaaattctactgaagacacatggtataaaatggtaaaaattcaaactgtcaagcaagtgcaaagaaatgatgactttattgaattagactacaccattctacttcataatatagcatctcaggagattattccctggcaaatgcaagttctctggcatccacaatacggcactaaagtaaaacataatagccgtctgccaaaggaagtacaactggaataaacaaaaaccctaacactggaagtgtaaacatgtctattgatgtgtatgccaatttcactggcatctagcttatgaggccaaataatcccaaagtgtcactttatataaatgtcttgattacagtatagaactttatagagtccataatacaaagtatcactacataaaaatgtctttaaaacagtaatagtggtatgtatatccaaaataaaaagcttcaatttcagcctcaaaaaaaaaaaaaaaaaaaaaaaaaaaaagaaaaaaaaaaaaaaa

SEQ ID NO: 9901 - DNA, 2097 bp, Homo sapiens
  misc_feature 1, 2, 2096, 2097: n = A,T,C or G
nngctgccgcgggtcacgtgctgcggaggcttggggaggggcggcgaggcggggtttatatagcccgggcgcccgcgggccccacgctttgaccgggtcgtggcagccggagtcgtcttcgggacgcgcctgctcttcgcctttcgctgcagtccgtcgatttctttctccaggaagaaaaatggcatccgttgcagttgatccacaaccgagtgtggtgactcgggtggtcaacctgcccttggtgagctccacgtatgacctcatgtcctcagcctatctcagtacaaaggaccagtatccctacctgaagtctgtgtgtgagatggcagagaacggtgtgaagaccatcacctccgtggccatgaccagtgctctgcccatcatccagaagctagagccgcaaattgcagttgccaatacctatgcctgtaaggggctagacaggattgaggagagactgcctattctgaatcagccatcaactcagattgttgccaatgccaaaggcgctgtgactggggcaaaagatgctgtgacgactactgtgactggggccaaggattctgtggccagcacgatcacaggggtgatggacaagaccaaaggggcagtgactggcagtgtggagaagaccaagtctgtggtcagtggcagcattaacacagtcttggggagtcggatgatgcagctcgtgagcagtggcgtagaaaatgcactcaccaaatcagagctgttggtagaacagtacctccctctcactgaggaagaactagaaaaagaagcaaaaaaagttgaaggatttgatctggttcagaagccaagttattatgttagactgggatccctgtctaccaagcttcactcccgtgcctaccagcaggctctcagcagggttaaagaagctaagcaaaaaagccaacagaccatttctcagctccattctactgttcacctgattgaatttgccaggaagaatgtgtatagtgccaatcagaaaattcaggatgctcaggataagctctacctctcatgggtagagtggaaaaggagcattggatatgatgatactgatgagtcccactgtgctgagcacattgagtcacgtactcttgcaattgcccgcaacctgactcagcagctccagaccacgtgccacaccctcctgtccaacatccaaggtgtaccacagaacatccaagatcaagccaagcacatgggggtgatggcaggcgacatctactcagtgttccgcaatgctgcctcctttaaagaagtgtctgacagcctcctcacttctagcaaggggcagctgcagaaaatgaaggaatctttagatgacgtgatggattatcttgttaacaacacgcccctcaactggctggtaggtcccttttatcctcagctgactgagtctcagaatgctcaggaccaaggtgcagagatggacaagagcagccaggagacccagcgatctgagcataaaactcattaaacctgcccctatcactagtgcatgctgtggccagacagatgacaccttttgttatgttgaaattaacttgctaggcaaccctaaattgggaagcaagtagctagtataaaggccctcaattgtagttgtttccagctgaattaagagctttaaagtttctggcattagcagatgatttctgttcacctggtaagaaaagaatgataggcttgtcagagcctatagccagaactcagaaaaaattcaaatgcacttatgttctcattctatggccattgtgttgcctctgttactgtttgtattgaataaaaacatcttcatgtgggctggggtagaaactggtgtctgctctggtgtgatctgaaaaggcgtcttcactgctttatctcatgatgcttgcttgtaaaacttgattttagtttttcatttctcaaataggaatactacctttgaattcaataaaattcactgcaggatagaccagtaaaaaaaaaaaaatcggggtctaggcggggggggaaaagaggttggagggcctgggctagtgttctgaccaggttttgtaaggggatgggggccaaaggggggataatgaacagann

SEQ ID NO: 9902 - DNA, 1686 bp, Homo sapiens
  misc_feature 1, 2, 3, 4, 5, 6, 7, 8, 9, 10, 11, 1682, 1683, 1684, 1685,1686: n = A,T,C or G
nnnnnnnnnnngagccagagtctcgctttgtcgcccaggctggtgtgcagtggcacgatctcggctcactgcaagctccgcctcccaggttcacgccattcttctgcctcagcctcccgagtagctgggactacaggtgcccattaccatgcccggctaattttttttgtatttttagtagagatggggtttcactgtgttagccaggatggtctcgatctcctgcccttgtgatccactcgccttggcctcccaaagtgctgggattataggcttgagccaccgcgcccggcccaatttttgtatttttagtagagacagggtttcactatgttggccaggctgctctcaaactcctgacctcaagtgatctgcccacctcccaaagtgccgggattacaggtgtgtgccaccatgcccagccaagaaaacactttagaaactgacattctccagtgctgatgaagcggctttaaaagagcccatcattaagaagtttgaagaggaaggaaacccttactattccagcgcaagggtatgggatgatgggatcattgatccagcagacaccagactggatcttgggctctcagttttagtgcagccctcaacgcaccaatagagaagactgacttcggtatcttcaggatgtaactggaataaaggatgtacttctgttaggacatgtactgaaaattaacacatgtagtagccttaaagattttagacttctcgaacatgaggctgttacagtaatttttataagcactgtgcatagtacttttctaccttaaaaaaatcagtgaggatatttatttaatgaacatcaattccttttaaattttcttagagaaatttctctgtggctcagttttaccacccataaagcggagacagtaatttatggttatcctttctgacccacaaagtatgaaaagttctgtaatctgtaaactcagttctgtaatctgtattattgagatgattaatataaagttgtattttcactgaaatgattgttttgctggttatgcttggtgatattttagcgggcttatttttgaaaggcatctgttacttcagtggcataaagtgccctcacactgctgtgcagccatcaccaccattcatctccagaatttgttctcagtcccaaactgaaactataccattcaaacaacagcgctccccatttccccctcccccgagcccatgacatctccttatttatactgagtctgagaaagcgatgtaaccacaatagacacaaaccagacaatacgaaagaataaatacacgactccaccgaagcaacacaacacccagaagatcaaacaagactatgcgccaccacaccacccaaacagcaggaacaaagagaacctaagaaaaacaccacaaacaagaatctacacaacaaacgcaacatcaacaagatagccaaggatagactacacaaaaagccatagaggaacctcggactggtcaccaagagcagaacaaccgacaacacacaatacagtacaaacaagacaaacgctggacaagcgagtaaaaagatgaagaaaaaacgaagaatcaacaacaggagaagtatatgaaaacaacaccaacgcaagaacacaacagtctgaacgacagagacaaatactaaaacgacaaacgtcagctactattaaccnnnnn

SEQ ID NO: 9903 - DNA, 673 bp, Homo sapiens
  misc_feature 1, 2, 3, 141: n = A,T,C or G
nnnggagctgggggatgtttactggtgtggggggacctgggaacatcactgtcgttcgtacatctctcgtaggatcttcatgctttctgagtaacgaagctggttccgatgagaggcctccttccacctctggcggatggntttccagcgctgcatgttgcgatagatgagtgtggagggtgagctgggagagcattcacgctcgcgcacagaggggctgttgcgcatccaggcgggcagattgggtacagtggcgtgttctcgctgaactgggccaagtccacgctccggtcgaacagcttgatcacatatgtgttggatcgctgcggccctccctcagccagcccatcatccatctccctcctcttcttcctccgctggtgggggaagcgggcagatggccttttgccagtggctgcgatggagcagtccttattgtgggtgtctgagggtgttttcccagcttcctcatccagacgctccctgtccatgtgactcttctccagcagacactgcaagacagcatccagttggttccgggctttggccatctccagctagcctttgatttggctctgttctgtgtaggctgggacaaggaaggcctctcggaagaaccagaagatgttgaccaaccagagaaaaggcaggaaagcaaacccccccaggtagt

SEQ ID NO: 9904 - DNA, 219 bp, Homo sapiens
acgataatgtctttaatatgaaatgctacattatttataattggtagagttattgtatctttttatagttgtaagtacccaagatattgtatttggagaagtagatcggtgagcaggggagcagcgtttgatcccccctgcctatcagcttcttctgtggagcctgttcctcactggaaattggcctctgtgtgtgtgtgtgtgtgtgtgtgtgtgtgt

SEQ ID NO: 9905 - DNA, 562 bp, Homo sapiens
  misc_feature 555, 560, 561, 562: n = A,T,C or G
cggatttcctcctctgtgaaatgggcaacacacctacccttgcccacctcacccccctcaccccgtcgacgtcgagtgaggagcagctgtcctctctgacaccaccccggcctgcctctttgttgccatgagagctgcctacctcttcctgctattcctgcctgcaggcttgctggctcagggccagtatgacctggacccgctgccgccgttccctgaccacgtccagtacacccactatagcgaccagatcgacaacccagactactatgattatcaaggtaacgggctaggggtaggataggacgggccggcagctggggtggggagaccccctgggaggggtagagggagcagacccccttatcctcccctggctgcagaggtgactcctcggccctccgaggaacagttccagttccagtcccagcagcaagtccaacaggaagtcatcccagccccaaccccagaaccaggaaatgcagagctggagcccacagagcctgggcctcttgactgccgtgaggaacagttacccgtgcaaccggctctaantccannn

SEQ ID NO: 9906 - DNA, 1343 bp, Homo sapiens
gcgtgggtgaaaatgtacaacacaatgcttgtcaatggagcaaggaccaagttaacttatcaccaaagctgattcagccaggaacgtttactaaaacaaaagaagacattttagaatctaaatctgaacaaactaaaagtaagcaaagagatacacaagaaagaaaaagagaagagaaaagaaaagctaacaggagaaaatcaaaacgtatgtcaaaatataaagagaataaaagcgaaaataaaaaaactgttccccaaaaaaaaatgcacaaatctgtcagttccaatgatgcttacaattttaatttggaagagggtgttcatcttactcctttccgacaaaaagtgagcaatgactctaatagagaagaaaacaacgagtctgaagtgagcctctgtgaatcaagtggttcaggagatgattccgatgacctctatttgcccacttgcaagtacattcagaatcccacgagcaattcagatagaccagtcaccaggcctctagctaaaagagcactgaaatacacagatgaaaaagagacggagggttctaagccaacaaaaactcctaccactacaccacctgaaactcagcagtcacctcatcttagcctgaaggatatcaccaatgtctccttgtatcctgttgtgaaaatcagaagactttctctttctccaaaaaagaataaagcaagcccagcagtggctctgcctaaacgtaggtgcacagccagcgtgaactataaggagcccaccctcgcttcgaaactgagaagaggggacccttttacagatttgtgttttttgaattctcctattttcaagcagaaaaaggatttgagacgttctaaaaaaagtatgaaacaaatacaatgaaggtttcgttggatattgtttaaattcaatctacacctctttctgttgcttcaggagaggatctgtaagagtacctgcccgggcggccgaggtacatgttctttttgcatttttaattattgtaatccttttagataatgatgtgttcatttgaactaactacatactatgatcaagtatattgcatcctaacgctacctctgactcaacctgactttgtaggaaagcctacacgtagccttgtttgataaaaacacggaagtgactagagaatggaagataaaggaagaagctaggaagtccttgctatcaaaaccttatcctaatataggaccaattgaagtattcaaaaagaaaaacagtatcttatatgattagtttttgttggtggttttgttttcatttatttttgcaagagccactttttatttactttctctagggataagagataaaacttgaagt

SEQ ID NO: 9907 - DNA, 4274 bp, Homo sapiens
  misc_feature 1, 2, 3, 4, 5, 6, 7, 8, 4274: n = A,T,C or G
nnnnnnnncaagggagacctcctcccgggcatgcagagcgcagcgattctgtgcacagggagccggagggctggggctgggagatcccggcggagccccggcagagcagtcgcccgtgagcccccgcaactcagacgcgctcggcctcgcgctccggggctgggaccaccgagggcgagctgcagccttcgccacccggtccgccgccggactccgcctcccacaaacagcccggcaaggcccttttccgccgctccctcatccagcgaagcctccttcccagcttccccggcggcggcgccgtgacgtcacttccgttctccagcgcgcacgtgggaggaagtgctggtgccctctgcccatgctcccgtctctttggttacgctcgtcagccggtcggccgccgcctccagccgtgtgccgctatgggagtcccggcgttcttccgctggctcagccgcaagtacccgtccatcatagtcaactgcgtggaagagaagccaaaagaatgcaatggtgtaaagattccagttgatgccagtaaacctaatccaaatgatgtggagtttgataatctgtatttggatatgaatggaatcatccatccctgtactcatcctgaagacaaaccagcaccaaaaaatgaagatgaaatgatggttgcaatttttgagtacattgacagacttttcagtattgtaagaccaagaagacttctctacatggcaatagatggagtggcaccacgtgctaaaatgaaccagcagcgttcaaggaggttcagggcatcaaaagaaggaatggaagcagcagtcgagaagcagcgagtcagggaagaaatattggcaaaaggtggctttcttcctccagaagaaataaaagaaagatttgacagcaactgtattacaccaggaactgaattcatggacaatcttgctaaatgccttcgctattacatagctgatcgtttaaataatgaccctgggtggaaaaatttgacagttattttatctgatgctagtgctcctggtgaaggagaacataaaatcatggattacattagaaggcaaagagcccagcctaaccatgacccaaatactcatcattgtttatgtggagcagatgctgatctcattatgcttggccttgccacacatgaaccgaactttaccattattagagaagaattcaaaccaaacaagcccaaaccatgtggtctttgtaatcagtttggacatgaggtcaaagattgtgaaggtttgccaagagaaaagaagggaaagcatgatgaacttgccgatagtcttccttgtgcagaaggagagtttatcttccttcggcttaatgttcttcgtgagtatttggaaagagaactcacaatggccagcctaccattcacatttgatgttgagaggagcattgatgactgggttttcatgtgcttctttgtgggaaatgacttcctccctcatttgccatcgttagagattagggaaaatgcaattgaccgtttggttaacatatacaaaaatgtggtacacaaaactgggggttaccttacagaaagtggttatgtcaatctgcaaagagtacagatgatcatgttagcagttggtgaagttgaggatagcatttttaaaaagagaaaggatgatgaggacagttttagaagacgacagaaagaaaaaagaaagagaatgaagagagatcaaccagctttcactcctagtggaatattaactcctcatgccttgggttcaagaaattcaccaggttctcaagtagccagtaatccgagacaagcagcctatgaaatgaggatgcagaataactctagtccttcgatatctcctaatacgagtttcacatctgatggctccccgtctccattaggaggaattaagcgaaaagcagaagacagtgacagtgaacctgagccagaggataatgtcaggttatgggaagctggctggaagcagcggtactacaagaacaaatttgatgtggatgcagctgatgagaaattccgtcggaaagttgtgcagtcgtacgttgaaggactttgctgggttcttagatattattaccagggctgtgcttcctggaagtggtattatccatttcattatgcaccatttgcttcagactttgaaggcattgcagacatgccatctgattttgagaagggtacgaaaccgtttaaaccactagaacaacttatgggggtatttccagctgcaagtggtaattttctacctccatcatggcggaagctcatgagtgatcctgattctagtataattgacttctatcctgaagattttgctattgatttgaatgggaagaaatatgcatggcaaggtgttgctctcttgccattcgtggatgagcgaaggctacgagctgccctagaagaggtatacccagacctcactccagaagagaccagaagaaacagccttggaggtgatgtcttatttgtggggaaacatcacccactccatgacttcattttagagctgtaccagacaggttccacagagccagtggaggtaccccctgaactatgtcatgggattcaaggaaagttttctttggatgaagaagccattcttccagatcaaatagtatgttctcctgttcctatgttaagggatctgacacagaacactgtagtcagtattaattttaaagacccacagtttgctgaagattacatttttaaagctgtaatgcttccaggagcaagaaagccagcagcagtactgaaacctagtgactgggaaaaatccagcaatggacggcagtggaagcctcagcttggctttaaccgtgaccggaggcctgtgcacctggatcaggcagccttcaggactttgggccatgtgatgccaagaggctcaggaactggcatttacagcaatgctgcaccaccacctgtgacttaccagggaaacttatacaggccgcttttgagaggacaagcccagattccaaaacttatgtcaaatatgaggccccaggattcctggcgaggtcctcctccccttttccagcagcaaaggtttgacagaggcgttggggctgaacctctgctcccatggaaccggatgctgcaaacccagaatgcagccttccagccaaaccagtaccagatgctagctgggcctggtgggtatccacccagacgagatgatcgtggagggagacagggatatcccagagaaggaaggaaataccctttgccaccaccctcaggaagatacaattggaattaagcttttgtaaagctttcccaaatcctttcatcattctacagttttatgctatttgtggaaagatttctttctcaagtagtagtttttaataaaactacagtactttgtgtatttcttttaactgtgtatatttctactgatctgatctcactgtttatgttgctttccaaagatgtatgttgcataatacagtggatctgaatttattattgcttataaaacacatttgatggaataggagtactggtttttcataatggttaaaaatgaaaccagctgtggatttcaaaacacagtgtattctagatcatctaagatccatgctgatttttattgcacaagaattaggtttgaactcttgagctggaacctcagcaaactagagtatatattgttcagtatttctttggaaacatttcattaatgtacttgtcttacagaaatttctgaactttagtaaaaaaaaataaagttaaacttttaaaacgtcaaaaaaaaaaagaaagacagcggcagaaccagcaacgagcaggaaacgagaccagaggagagaagacagagaggacccccgagggggcgacaagatgaagcgacacgcaagatagtgtgagaaggcggcccacttagaagccacaaaaataaagcacagaacaagacccacacatacaaagagacaagtaaacaagaagaggaaaaaacgaagggacgaacacactcaagggagagacaacagagaaaaaaccacaccagacgagagccaacgaaaatacaaaaacagagtcaacgggataacaacgacgcaatagtgagggagaaaaaggcacgcaggacatcacatcatgcggggcgagaatgacagaggagagagcgaagaaaaaagggacagaagaacagcgagcagtagtgcaggcgggggaatcacgagagatgacgcggaaacagcgccgaagcacaagcgcagaacagaaagaaggaagatgatgcagagcagagaan

SEQ ID NO: 9908 - DNA, 473 bp, Homo sapiens
  misc_feature 1: n = A,T,C or G
ncatgatttactcattaaactttgaatttggatgcaattttttccctataggatgactataattctggtccctcaatataccctttagatagatgaagaagccccaaaacagataaattcctggttggtaatttacaaaaaaatggattctcttggttttttaaataaaagccaaatttcccatggagaaaaaaaaaaagaaaaaaaaaaaaaaaaaaaaaaaaaaaagacctgcccgggcggccgaggtacagaatgacctggtgtcccacaatctggttttcatcgggagggttatagtcaaagcagtagtctgttagtcctttgttctggagcatcccgaagaaaccaggcctgtcctcaggcacatgcagttctggatacacagtctccaagaaccacttgaagtctttacactggagcttgtcccggagctgcttcctctctgtcacatccccaaaaggttccaagcg

SEQ ID NO: 9909 - DNA, 4110 bp, Homo sapiens
  misc_feature 4109, 4110: n = A,T,C or G
ctcctgccctttcccctccccatgtccctccttcttctccctcctccctctctccctccctctggcgtctccagccgactttcgcttcccgtcagcagcctttggcggaagagtgtcccgcctcttccgctctacagcggaggtggctgtggcggtggcgctggtggctgcggcggcggcggcggcagcggcgctcgagcggttcctgtcagggtcagccggcgggccccctgggtggtccacctgcaaatcgcggagcggcgccccagggatcgatggcgatgaactataacgcgaaggatgaagtggacggtgggcccccgtgtgctccggggggcaccgcgaagactcggagaccggataacacggccttcaaacagcaacggctgccagcttggcagcccatccttacggctggcacggtgctacctattttcttcatcatcggtctcatcttcattcccatcggcattggcatttttgtcacctccaacaacatccgcgagatcgagattgattataccggaacagagccttccagtccctgtaataaatgtttatctccggatgtgacaccttgcttttgtaccattaacttcacactggaaaagtcatttgagggcaacgtgtttatgtattatggactgtctaatttctatcaaaaccatcgtcgttacgtgaaatctcgagatgatagtcaactaaatggagattctagtgctttgcttaatcccagtaaggaatgtgaaccttatcgaagaaatgaagacaaaccaattgctccttgtggagctattgccaacagcatgtttaatgatacattagaattgtttctcattggcaatgattcttatcctatacctatcgctttgaaaaagaaaggtattgcttggtggacagataaaaatgtgaaattcagaaatccccctggaggagacaacctggaagaacgatttaaaggtacaacaaagcctgtgaactggcttaaaccagtttacatgctggattctgacccagataataatggattcataaatgaggattttattgtttggatgcgtactgcagcattacctacttttcgcaagttgtatcgtcttatagaaaggaaaagtgatttacatccaacattaccagctggccgatactctttgaatgtcacatacaattaccctgtacattattttgatggacgaaaacggatgatcttgagcactatttcatggatgggaggaaaaaatccatttttggggattgcttacatcgctgttggatccatctccttccttctgggagttgtactgctagtaattaatcataaatatagaaacagtagtaatacagctgacattaccatttaattttatattatgaaagcaaatcatctgcatgtgcatcaaggccagtcctattcaacctagctttcgaatgctgatatctggttagtatgtcattttgaagttggcacataacttttctaaaaaaaagcagtctttgttgtttgcttcttccctacggatgacttctaaaaatatatgacgggtataaaaaaattagctatattgatcatatcaacactgtaactgctgaaatggcattctaatgtttgctttttattcggacaggccacatgatgcatagagcctctttcatgtgacttgtgtctactgcttaaatctttatgctgtgttgatgatattatattgacatatgaagctgtatatgtgtatgtattttgtggagaaagggattacaagatgtatgagtataatgacttgctaacctttcaggattcagagaaagatgaagaaagaccatatctaaataatacacttcatcattttcatgtgtataaatgcttaaagtaccatctttgttgaggtggttcatgtatccagtttatccagtacagttatttgtcaagcttagctttgatttcaaaggacacgcttaccttgtctggcataagaattaatgctcatgtctgcagtggttgggtaggtcctgcttaggagaattaaaaaattcctctttccgtttggttgaatgttgcagtcaggaaccccaactcacttggaatgtttttatatgtaatcatttcccttgaagcttatactttataagggaagaaagaattcaggtgatatgggaaaactgcttggcagaccttcatcttctgcctcaactgtaaaccacatgtaaatgcttaatggagactgttttcattcttgtgatatttaacattcagaaaattacttcagctttggaaatactcaggctgtttttattctgcaggtaagtgttttgacttaagtactaatattccagaaatttttgaaagcagtaaccttaatttcctatgtatttcattccacttttgcatataggtcaaatagcaatgtgtatgcacattctctttagttaaggcaccaattgttttggttggttttcctaagacatactttaaaaagatgttctataaatttcctagttaaattatggggattttggagtatgtacatgataaattataatacgtatatggttgaagttattttattttttactaatgaattattttaatattccttattgaataaatgctgtaacttgtttgctatggaacttattcttaaagttctagttaaaaataatttttccacatgcatgaaaatatgtattaatcagaggtggcttaattacattgaaattgcttttttgttgttgtttttttactgaaataactcatgtttgtgtagaagaatgcctgtttactcagagtttatattttccttcagttatattttaaatcaaaaggtctgggtaatgtatacttttgattaatatatactttttttaaaaaacaaaaaacaatgtaatggttaatagtagaaatgtgccacacttttcaagttttatataacatatgaaattcagttaaaagaatgtgtgtttcataatgacttttaactggtaaaaatattacttgcacgaagtacttgatgtatggttatcctgaaatttcggagtatttggtgtgttctttgtctaaaaatagtctgttttgtcagtccttcagaatattatttattctgaagattgtccctcttgcacttggcagtttattttcggggatacattgttgggggagaggggtttctgccactctttccagattgagtctgtgctgtttaaggaggactaccatcctgcaactctttttctaattggggcacagaggatgtcgctaaagaaaagttgaagagccctttcagcactttctcatctgtggagaagatggaatcttaaaatacatttggagttttatctgttttacaagtccattgatggcctaagttcctcctgttttctgctgtttgatctctaaggaactcctgttgctaaatatgaagagtatggaacattcatatagtctctgtgaagcatggggggagggaagacatttctttttcttataggctttatgctcaaatgtcatagtctcctttcaaagaattgtgttgcattttaaatgcacccagcttaagtagaagacattgaaggatgcattaattttcaggaactattttgaattatgaaaagattcccaattgaaaaaattattcaacaagtaaaagctaagaaatttcattgaaatcataaggcagtttaagcataaattgataaaaatagctgtgtactactaattaatagaaaatcattcaaccaagagaagagtcaagtgaatatcgtttgtttatttgctagtgagtttctttgtaacgttgattttattaaatgataatatttggttagtatgtcctatgttaataaaaatgaacaaaattaattttgctatgttcaggtgtcttgataaaataacaatgctccagtgttgttgcttacatttagcactaaattttaacacagggtcagtgagtccaggttttaacttcttcatgcctggatgggataaggctcctgggtaccctggttttcccggcccttcctggtctcgaggggatcacgcgggaagggggttcacgggcgccgggggctggcccacggggatgggcgctccactttgtgcctcgggttcgtagccgtcnn

SEQ ID NO: 9910 - DNA, 248 bp, Homo sapiens
acattctataatacaaaactctttttaacagaaccaaatgagtatactacagcgagactccagtgttatctatattgttttgttgacccttcctctcatatataactattaaagataaaaataacctgtgggacaactatttttcatataaaataattccatatttaaaataataatgaactgcaaacaagaagtctaaaataattgatatcatagtagatttttcaagtctagcagatggtgctagc

SEQ ID NO: 9911 - DNA, 2004 bp, Homo sapiens
agcgtccggccgctcgcactgcggtgcgatccctgagggctcggggcaggggactggggaccgagcaggagctggcggggtgagctctgcgaagcgggcgtgagaccgagcgcccatgggccggtcacgccgggtgcccgctcaccccccgacgccagcaggagcgcgcgcgcaggccccgcggggccgggagggcggcacgggcggggcccccgtgctctcaccgccccggggtgtggttcccgcggacaggccgggcggggcggcgggtttaaggcgccggcctgcccgacacggctcactcgcgcccttgccgctgccaccgcaccccgccatggagcggccgtcgctgcgcgccctgctcctcggcgccgctgggctgctgctcctgctcctgcccctctcctcttcctcctcttcggacacctgcggcccctgcgagccggcctcctgcccgcccctgcccccgctgggctgcctgctgggcgagacccgcgacgcgtgcggctgctgccctatgtgcgcccgcggcgagggcgagccgtgcgggggtggcggcgccggcagggggtactgcgcgccgggcatggagtgcgtgaagagccgcaagaggcggaagggtaaagccggggcagcagccggcggtccgggtgtaagcggcgtgtgcgtgtgcaagagccgctacccggtgtgcggcagcgacggcaccacctacccgagcggctgccagctgcgcgccgccagccagagggccgagagccgcggggagaaggccatcacccaggtcagcaagggcacctgcgagcaaggtccttccatagtgacgccccccaaggacatctggaatgtcactggtgcccaggtgtacttgagctgtgaggtcatcggaatcccgacacctgtcctcatctggaacaaggtaaaaaggggtcactatggagttcaaaggacagaactcctgcctggtgaccgggacaacctggccattcagacccggggtggcccagaaaagcatgaagtaactggctgggtgctggtatctcctctaagtaaggaagatgctggagaatatgagtgccatgcatccaattcccaaggacaggcttcagcatcagcaaaaattacagtggttgatgccttacatgaaataccagtgaaaaaaggtgaaggtgccgagctataaacctccagaatattattagtctgcatggttaaaagtagtcatggataactacattacctgttcttgcctaataagtttcttttaatccaatccactaacactttagttatattcactggttttacacagagaaatacaaaataaagatcacacatcaagactatctacaaaaatttattatatatttacagaagaaaagcatgcatatcattaaacaaataaaatactttttatcacaacacaaaaaaaaaaaaaaaaaaaaaaaaaaaaaaaaaacaaggagccggaggacaacagcaaaaaaccaacacacagagtgaggcaacaacagaggaccaagcaaaacgaaagacgccaaaacaaaacggagggccccactcggagcttatacaaccgatgcaaaccacggacagacgcagccaccaacgacaatgtagagagcaagtacccataccccgtcgagtctaccaaaagagcgacaatccaccgggaggagcaacaaaagccaagacagacccaaacaacaacatccatctgacaaaggcacaaaaccaaaacccacatcaacgtagcggtaaccacaaaccgacccaagcagagtcaagaaatccaccaacgaggtagcaaaacaatacaacagagggacacaacccacacaccacaaacaacagacaacaccacagccaacaaccacccacagacacacggcaacggcaccacacaacacagcacgcgcaccacacaccacaccacccccaaccaccccccaacaccgaaccacaaaagcagacacgcaacacgacagagccaagcacaccaac

SEQ ID NO: 9912 - DNA, 242 bp, Homo sapiens
  misc_feature 232, 233, 234, 235, 236, 237, 238, 239, 240, 241, 242: n = A,T,C or G
acagcactgggctttataaagactgcactcagaaccacactgcacagtccagttttttaaaaagctgctacatgacagacaggtaatcccactgagtgagttttgagaaacaaatcaaacgaagtaaacaagaaacataaaaaccaaatagcaaatgaataaaagcctgttcttgtaacttaaaaaaaaaaaaaaaaaaaaaaaaaaaaaaaaaaaaaaaaaaaaaaaaaannnnnnnnnnn

SEQ ID NO: 9913 - DNA, 742 bp, Homo sapiens
  misc_feature 728, 729, 730, 731, 732, 733, 734, 735, 736, 737, 738, 739,740, 741, 742: n = A,T,C or G
accatctgaatacctctttgaaagaaggaagactttacgtagtgtagatttgttttgtgttgtttgaaaatattatctttgtaattatttttaatatgtaaggaatgcttggaatatctgctatatgtcaactttatgcagcttccttttgagggacaaatttaaaacaaacaaccccccatcacaaacttaaaggattgcaagggccagatctgttaagtggtttcataggagacacatccagcaattgtgtggtcagtggctcttttacccaataagatacatcacagtcacatgcttgatggtttatgttgacctaagatttattttgttaaaatctctctctgttgtgttcgttcttgttctgttttgttttgttttttaaagtcttgctgtggtctctttgtggcagaagtgtttcatgcatggcagcaggcctgttgcttttttatggcgattcccattgaaaatgtaagtaaatgtctgtggccttgttctctctatggtaaagatattattcaccatgtaaaacaaaaaacaatatttattgtattttagtatatttatataattatgttattgaaaaaaattggcattaaaacttaaccgcatcagaagcctattgtaaatacaagttctatttaagtgtactaattaacatataatatatgttttaaatatagaatttttaatgtttttaaatatatttaaaaagacaaaaaaatgcnnnnnnnnnnnnnnn

SEQ ID NO: 9914 - DNA, 3686 bp, Homo sapiens
  misc_feature 3679, 3680, 3681, 3682, 3683, 3684, 3685, 3686: n = A,T,C or G
cccacgcgtccgggcgacggccaggggacggacatctgggggagggctgggggtctgaatggcaggagctgcaccagggggctgtgcgcgctgcgcgggtgtgcgcgcctcgccgggggctgtctccacctcttctggcaagttggcctatgagtgcgcagctccgcttacaactatcaacagccgggaagtcgacccacgcgtccgggggggcgcaggaccctcgcaacttcttcgcaggactccagcctggccgccggcgcccgcagccgtccgagagccctgcgcccgcgcctccccttgcgcaccgtggcagcgcccggcgggcggtcctgccagccccgacgggatgcccgcagccatgctcccctacgcttgcgtcctggtgcttttgggagcccacactgcaccggcggctggggaggccgggggcagctgcctgcgctgggaaccccactgccagcagcccttgccagatagagtgcccagcactgcgatcctgcctccacgccttaatggaccttggatctccacaggccggctctttcgagcccaccagttctactacgaggaccccttctgcggggaacctgcccactcgctgctcgtcaagggcaaagtccgcctgcgccgggcctcctgggtcacccggggagccaccgaggccgactaccacctgcacaaggtgggcatcgtcttccacagccgccgggccctggtcgacgtcaccgggcgcctcaaccagacccgcgccggccgggactgcgcgcggcggctgcctccggcccgggcctggctgcctggggcgctgtacgagctgcggagcgcccgggctcagggggactgcctggaggcgctgggcctcaccatgcacgagctcagcctggtccgcgtgcagcgccgcctgcagccgcagccccgggcgtcgccccggctggtggaggagctgtacctgggggacatccacaccgacccggcggagaggcggcactaccggcccacgggctaccagcgcccgctgcagagcgcactgcaccacgtgcagccgtgcccagcctgtggcctcattgcccgctccgatgtgcaccacccgcccgtgctgccgccccctctggccctgcccctgcacctgggcggctggtgggtcagctcggggtgcgaggtgcgcccagcagtcctgttcctcacccggctcttcactttccacgggcacagccgctcctgggaagggtattaccaccacttctcagacccagcctgccggcagcccaccttcaccgtgtatgccgccggccgctacaccaggggcacgccatccaccagggtccgcggcggcaccgagctggtgtttgaggtcacacgggcccatgtgacccccatggaccaggtcaccacggccatgctcaacttctctgagccaagcagctgtgggggtgcgggggcctggtccatgggcactgagcgggatgtcacagccaccaacggctgcctaccgctgggcatccggctcccgcatgtggagtacgagcttttcaagatggaacaagaccccctcgggcaaagcctgctcttcatcggacaaaggcccaccgatggctcaagtcccgataccccagagaaacgtcccacctcctaccaagcacccctggtgctctgtcatggggaggcccccgacttctccaggccaccgcagcacaggccatcgctgcagaagcaccccagcacagggggtcttcacatagcccccttcccacttctgcccctagttctagggctggccttcctccactggctatgacattggacttgacatcaggatggcggctctggacacccattcaacccttcagactccctcctggcagctgtagggaaggaaccattctcctctgctctgtcatggatggatgcacagccccactgcttccaaactctgcctgtgtcccatgtggctcaggacatgagcttaacccctgcaaagcctataccacatcccacagcccgggtccccagtcaagcacttggatgcggcagtgatgttcatcgctacgtgagtttctaaagatcactcccaatttttctactttcctcatccttggcagctcgccaacaggtgcagtcagggggccacacggaacacccccatcccatgttccccccagttcttcccatcctgacccttgggattccaagatgggagcaagaggagatcctgaggctctgcctagggacgaggcctacagttctgccatgtctgtaggttgttgtttaaagattattaattcgaatttagcaatacgatctctaagtggtgccatgaattaaagatgccacttcgggctttcagtgcttctcagcttttgggcaaagggcttgtgtcttcaggggcagctcagctttcctgagtcctgactgctggcattcgtctgcatttgcctgtgcttctgcgagtcggacctcaagctgccaacactgcatgtggataaatccagttttcccgggccagcatgcaaaatgaagaggactccatctaagctgagaagcatggcctccccagagcagcctgcagcctccaagccttcctggcccaggcaaatgccagtgtgcaccaggctggctgctgggggcaggtctttggaggggagcagcatttccagccttctgaacatagttaatagtaatgacagccgtaacactaacgcgctctgcaattcgccctgcccagccatcctcggttgccaagattgcctgtgcctgcctgacaaaggaagagaatctccgaatgtgtatctttgggcccaccctagggagaggtcggggtcaccaggctacatggcgacatctaggcagctccgccttgcccagcctccttgccataatcctaatatattggtgtcctctgctcagaggggactgtcatcatggtgggaacaggctgtgcctccccagggactctgcccatgttcccagggcctcatctgtacactgtgaaattaactggcatcctggtgggcccaagggttttcaggactgggggccaatgactcaccccctccttcctcctcctgatccctatctctagctcttatcacagattttgaacaattgtctgtgaggttaatgatggtttcagagggaagcccttttcctccctgagactgtgtggggttcagtcagcctgctgaaattgcttccacttattacccatccttcctcttaaaaaaaaaaaaaagcccaccaagttagtattctctgtagctctcagacagctacaagtgttcctggcatatttaccaaagtacaagaaatcattacattatttacggtctcagactacatcagggttgggggagctcctggtggggatggcagtgggtgtcgatgatatgtccacggctgagcaggtcttgtatccgaagcttgaagtaaccatgccaccatttatcatcaaatttgaaccttttaataaaattaaacagcctgaaaaaaaaaaaaaaaaaaaaaaaaaaaaaaaaaaaaaaaaaaaaaaaaaaaaaaaaaaaaaaaaaaaaaggggcgcccttatcctgttttaaaaaaaaaccttccggcccccccccttaaccttaaaaaaaaaaaaaatgccactgttgttggtaacttggtaaattaaaattaaaaggggtcccaataaaaccannnnnnnn

SEQ ID NO: 9915 - DNA, 1537 bp, Homo sapiens
  misc_feature 1, 2, 3, 4, 5, 6, 7, 8, 9, 1531, 1532, 1533, 1534, 1535,1536, 1537: n = A,T,C or G
nnnnnnnnnatattcagtttgcagtagacattccttaagtatttgtatttatttatgattatcaattttacataacattaatattgtatcagacctccttatgaaaatgagtatggatgtgcacagtatgtttgatttttatccacaagaatgaatctgattcagaatgcttttctcagctgacatacagagcactaaatattttaaggcaagtccataggtctgaatctcttaagaattctcggcctctgtgggatttagggaagcattataaatgcattaatccttatagtcaattctgtgcctaggattttgccagggaacagttcactgactaggaaaagcactacattttaaattcagcattagtgcattgggaaggatctttactgctttgtgcttggcatgtcattattttccatttgacattagggcctttccaaaatgaatgtgaggaattgctttcacttcaagactttccttcttttcactaaaactctagaaggtgttacaagggggagggaaggggggcaaagtccttgaacattttctttggctcgtgccatgttatgatcatataccttttaaataaggggaaatagtatctttaaagttaatgtctagccaagagtttagtaaacgaagaattaaactgcactgttgatcggtgctttgtgtaaatacatctttaacatttgggtggagaggggccttaagaaggacagttcattgtaggaaagcaattctgtacatgagtttaagcattcttgttgcattgtctctgcagattctatttttgtttacaatattaaaatgtatgttagcaaaatgggtggattttcaaataaaatgcagcttccacaaaagttttgttatggtattctggtctgagatgcattttcatttttcctttctctttttattatcaatattgtcatttttccctaataaaatatacccaggtgattatatttgttgatctaataacatggaaggtttgttttatatgaattttcaaaaagatgtctctttacactttttgttaccttgtagactcttattgataaatgcaactacttattaaaattgttcactttttgtcttttgatcagatgcctttagtcaggtaagtttaagggaaaatacgcagtttaatgttttggtacatataattatgtctgccaaagaaacctttgattgtatcatattgcctatttagtagtgcatagggttcagagtacatgataaaggatcaaaagctttgcattgataagtgtctcataatatttgctgtgattggagaaaaaatgtagtcgtagccaataaattttatcagcttttaagtttcagtattattaaaccattcattacacacaaaaaaaaaaggggggcgcaaaagtacccaggggcaagttagcgtcccgttttgaaaggccaagggggggtaaaacgagccgggggtacaaccgcggaagccggctggagcactttgggactgccccagtacggataatagttggcctccgtggannnnnnn

SEQ ID NO: 9916 - DNA, 2531 bp, Homo sapiens
agggagtcgacccacgcgtccgggcggagcctgcgcggggccggtaggatcgcgtcgggagccggtaccgaggcccgagccgcgggagtcgagcgaaggcagcgccgaggccgcggtttccccctgggcctccccagcagcagccatgggcatcaaatttttagaagttatcaaaccattctgtgcagttctaccagaaattcagaaaccggaaaggaaaatccagtttagagagaaggttctgtggactgctataacgctcttcattttcttagtgtgttgtcagatcccactgtttggaatcatgtcatcagattctgcagatcctttctactggatgagagttattctggcttccaatagaggaactttaatggaattgggtatctccccaattgtaacatctggtttgattatgcagttgttagctggagccaaaatcattgaagttggagatacaccgaaagatagagctttattcaatggagcccagaaactgtttggtatgatcattaccattgggcaagccattgtgtatgtcatgacggggatgtatggggaccctgcagaaatgggtgccggaatctgtctcctgatcatcattcagttgtttgttgctggtttgattgtgctgctgttagatgagctgctacagaagggttacggcttggggtctgggatttccctctttattgccaccaacatctgtgagaccattgtctggaaggcctttagtcccactaccattaacactggcagaggtactgagtttgagggtgcagtcatagctctgttccatttgttggccaccaggacggacaaagtccgagctttacgggaggctttttatcggcagaacttacccaatctcatgaacctcattgctacagtttttgtgtttgctgttgttatatatttccaaggatttcgcgttgatctgcccattaagtcggcccgttaccgaggacagtacagcagctaccccatcaaactcttctacacctccaacatccccatcatcctccagtcggccctggtgtccaacctgtatgttatttcccagatgctgtctgttcgatttagtggcaactttttagtaaatttactaggacagtgggccgatgtcagtgggggaggacccgcacgttcttacccagttggaggcctttgttactatctttctcctcctgagtccatgggcgccatctttgaggatcctgtccatgtcgttgtttatatcatcttcatgttggggtcatgtgcattcttctctaagacatggattgaagtgtctggttcctcagccaaagatgtagctaaacagctgaaagaacagcagatggtaatgaggggccaccgagatacctctatggttcatgagcttaataggtacatccccaccgcagctgcgtttggcggtttgtgcattggtgccctgtcagtgctggctgacttcctgggggccattggatctggcactggaattctgctagcagtcactattatttaccagtattttgaaatatttgttaaagaacaggccgaagttggtgggatgggtgctttgtttttctaaatgttcaaatatttcattttgtgcgtgtgaaagggaaaacactttgacggatcgtttttgtcagatgacactggtggctccccttttctcccctcacagtttcttgtttcgagtgctgactgacccgtttctgaaatggacaccgagctaagtctgtgtgcagcattagtacccgctgccttaaaactcaagtttacattattcattaaaaaaagtacatctagtgttgcctgtaatgctggaaaccagtgtatctaccttgctgtgttaaatcatgacagtgagacggtgagatggattcgttttgcacacaacattcaaaacacttcatattgcccccacttgttgaaaaataaatgtagttcaaattgccactttccagtatttttgagcttatttaatgagttctggaacatttatatctaatctatattttagataattactttttatacttttttaactcatggtatccccactccccacccccacctcatttttatttgtcccttctcaaagcagccacttagcccacatgggcgaaatcaagtctccagttatttctgccacaactgcttctaaggcctcctccttctcctcctcctcttcctcttcctccttttccttctcctcctcctctcttcccagtgacagcatcatcgtgctgtttgcctgtattggctatgccttctaactccaaccagtcacttgagaatattctttcaagattctgggccccgattcttttctgtttaaatccctaaagcaaagatctaattctcaagcaatgtctgtagttcagtgggggtgaacaatgaatatattcatgctaggaatttgtgtctgttgttgtactcacagcagcaacatgagtgtaaacagtagacaataaacttttatttaagaaaactgattcagttgtgttggaaaaaataaagaaatctgatattaaacg

SEQ ID NO: 9917 - DNA, 4206 bp, Homo sapiens
  misc_feature 3731: n = A,T,C or G
acccagcgtccgcgcgctgggggcgcaggaaacaatagaggccgcgcgcacagagcgagctcttgcagcctccccgcccctcccgcaacgctcgaccccaggattcccccggctcgcctgcccgccatggccgacaaggaagcagccttcgacgacgcagtggaagaacgagtgatcaacgaggaatacaaaatatggaaaaagaacaccccttttctttatgatttggtgatgacccatgctctggagtggcccagcctaactgcccagtggcttccagatgtaaccagaccagaagggaaagatttcagcattcatcgacttgtcctggggacacacacatcggatgaacaaaaccatcttgttatagccagtgtgcagctccctaatgatgatgctcagtttgatgcgtcacactacgacagtgagaaaggagaatttggaggttttggttcagttagtggaaaaattgaaatagaaatcaagatcaaccatgaaggagaagtaaacagggcccgttatatgccccagaacccttgtatcatcgcaacaaagactccttccagtgatgttcttgtctttgactatacaaaacatccttctaaaccagatccttctggagagtgcaacccagacttgcgtctccgtggacatcagaaggaaggctatgggctttcttggaacccaaatctcagtgggcacttacttagtgcttcagatgaccataccatctgcctgtgggacatcagtgccgttccaaaggagggaaaagtggtagatgcgaagaccatctttacagggcatacggcagtagtagaagatgtttcctggcatctactccatgagtctctgtttgggtcagttgctgatgatcagaaacttatgatttgggatactcgttcaaacaatacttccaaaccaagccactcagttgatgctcacactgctgaagtgaactgcctttctttcaatccttatagtgagttcattcttgccacaggatcagctgacaagactgttgccttgtgggatctgagaaatctgaaacttaagttgcattcctttgagtcacataaggatgaaatattccaggttcagtggtcacctcacaatgagactattttagcttccagtggtactgatcgcagactgaatgtctgggatttaagtaaaattggagaggaacaatccccagaagatgcagaagacgggccaccagagttgttgtttattcatggtggtcatactgccaagatatctgatttctcctggaatcccaatgaaccttgggtgatttgttctgtatcagaagacaatatcatgcaagtgtggcaaatggcagagaacatttataatgatgaagaccctgaaggaagcgtggatccagaaggacaagggtcctagatatgtctttacttgttgtgattttagactccccttttttcttctcaaccctgagagtgatttaacactggttttgagacagactttattcagctatccctctatataataggtaccaccgataatgctattagcccaaaccgtgggtgttttctaaatattaataggggggcttgattcaacaaagccacagacttaacgttgaaattttcttcaggaattttctagtaacccaggtctaaagtagctacagaaaggggaatattatgtgtgattatttttcttcttatgctatatccccaagtttttcagactcatttaagtaaaggctagagtgagtaaggaatagagccaaatgaggtaggtgtctgagccatgaagtataaatactgaaagatgtcacttttattcaggaaatagggggagattcaagtcgtatagattcctactcgaaaatcttgacacctgactttccaggatgcacattttcatacgtagaccagtttcctcttggtttcttcagttaagtcaaaacaacacgttcctctttccccatatattcatatatttttgctcgttagtgtatttcttgagctgttttcatgttgtttatttcctgtctgtgaaatggtgtttttttttttgttgttggtttttttttttttttttaacttgggaccaccaagttgtaaagatgtatgtttttacctgacagttataccacaggtagactgtcaagttgagaagagtgaatcaataacttgtatttgttttaaaaattaaattaatccttgataagagttgcttttttttttttaggagttagtccttgaccactagtttgatgccatctccattttgggtgacctgtttcaccagcaggcctgttactctccatgactaactgtgtaagtgcttaaaatggaataaattgcttttctacataaccccatgctgatgggttttatttagtataaaacatccatcaaacaccagtctctggcttctagaagagtccttcagatgacagttgttgtccatggtctttgactatcaagagcagaattaaatgtaatagtcccagagctgtagaaaagaactttactccttcccagggaaagtgaaagacataaaacactgaatcagaggtggcacagattagtctttgataaggtaacgtttctttgaagtctgtctgtagagaactacatggacttccaagagtgtcaaaggcagtgtggtagagagaatttaaggcaagatttaaatttggaaaaggtgcttgaaccttttctcagaggttttatttccccagtatgtttttcactggggcctttacttaggttagaaataataggctttgaaggcctctatcaccagatgcaataaccagataaaattcctgttttttcccaatcgcttagttttttgttgttgttgttttttaactgagtagatcattctgacccagaactactttcatgaggtaagatctttgggaaaatctgaatagcgttaaccattagattcaaatctcaaatggtttcttttcaagtctagttgttttagagtatagtgagaaataccttgacacaattttaagagtaaactatatgggtcagcatatccttgaacaaaaagtagactttgtaaaagtattcatttaaattctaacactcgtggcacaaaagaatggaaattgtaaacccatgtaatggaaattggctatctttttgaccccacatgtgcccctcaaaaatgtttttggtttgggtcaacacaaggcaagatacattctttaaaatactcccagatgtgtccatacattcatcctttactcagtgcatatgtgagggttgttgctggaagacaggaggctcatctttcctttccttggtgcattgagatcagtatcaacagcagatgaaatagaatccagcaaagagttgacatgttctgcctccggccaactctagaatctttttaagcaggtcagccagtatttgcaacttccacaggatgaattgcttgccaagtttctggcactcttgtctggttggaagagtacatccaaagggtacttagtgatcctttgctaagaagttttttgctgtttccgggttacagatttggccatatatttctaaacagccccttgagactgtgtctccattccacctgcctgagaagtgggagcatcagcctgttccaggctcttgggtagtagcatagccttataagtagagagctcttcagcaagactgagccttagctgttccatctctttgttcttctgttgctggagttgcaccccatttcttaaactnctctggcgttcttccatttcctccagctgttccctgtactgctgcacctcttcatctcgtttttgcctcacaagtgcgatctggtcctccaggttcctgttttgcaggcggagctgccgggcctctgcttgcaggggtctcagagcctccttcatttcctggatctcagcctgggttctctgcagagctttggtcccagcttctttcctctctaggagccgcaggaactgaggctcatactcctcctcccaggtcctggcggctctctgccatgagattttcaaactgggcagagagtcgccggctttcctggagaaagtgcccatccctctggcttggaggggcttctagttgttgccgcagctgctccttctgcttctgataggcatcccggagcagggccagttcctctgagagctgggttgcccttgtagtcagcacttcccggaaatcggcaaactgagccacgtcctgc

SEQ ID NO: 9918 - DNA, 2370 bp, Homo sapiens
agagctgagccaagcgtttactgggcagctgttacgctcagattccaaatgataatgtttgagagcgctgactctacagccacaagatctggccaggatctctgggctgaaatttgttcctgtctgccaaatcctgaacaagaagatggtgccaacaatgcattctcagactcctttgtggattcttgccctgaaggtgaaggccagagggaggtggctgactttgctgtccagccagctgtaaagccttgggctcccttgcaggattcagaagtgtatttagcatctctagccattttattttaaaaatatttcctgacttcggatgtggcttgagctgtaggcgcggagggccggagacgctgcagacccgcgacccggagcagctcggaggcggtgaataatagctcttcaagtctgcaataaaaaatggcctccaacaaaactacattgcaaaaaatgggaaaaaaacagaatggaaagagtaaaaaagttgaagaggcagagcctgaagaatttgtcgtggaaaaagtactagatcgacgtgtagtgaatgggaaagtggaatatttcctgaagtggaagggatttacagatgctgacaatacttgggaacctgaagaaaatttagattgtccagaattgattgaagcgtttcttaactctcagaaagctggcaaagaaaaagatggtacaaaaagaaaatctttatctgacagtgaatctgatgacagcaaatcaaagaagaaaagagatgctgctgacaaaccaagaggatttgccagaggtcttgatcctgaaagaataattggtgccacagacagcagtggagaattgatgtttctcatgaaatggaaagattcagatgaggcagacttggtgctggcgaaagaggcaaatatgaagtgtcctcaaattgtaattgctttttatgaagagagactaacttggcattcttgtccagaagatgaagctcaataattgttcacattgttcttttatatatatttatatatatatataaaaattgggtcttagattttgatttactagtgtgacaaaataactacatcctaatgaaaatcaagtttgatatgtttgttttgaaagtagcgttggaagagttgttgggggttttttgcatccatagcactggttactttgaacaaataaataaaagctttctgtagttgcttcctttatcagaaaagaacatttgataccatggtatatcatttcctcttcattaaagaacagcttttctaaatgttgggggaaatgtccatagtcattactcagtcaaaacttgtgttctcatgagcctaaggaccattctagatttattacgtgttttttgtgtgtgtgtgtgtgtgtgtgtgtgtatccataaaatgcatatgtaaatttttttttgtttttaagcattcacccaaacaaaaaaatcacaggtaaacccatgtttctgagatgccattattccaagcaaaataagagataatcccttcaagttaaattgaaaattttcctgaaaccatacatttcaagtgaaataagtaattctagataggacaatttaaattggataattttaaagtgtctataattgcagtggtttatttgcaaaattcctaaaaggaaaaattttatcactgccatcacagcaggtttcctcatccagatgaggaaactagacaaatgctagtgtgttttaactagctaaacaaaactaagttaaatgaacatttaaaagtttccctagcgggccattccttagcaaaatgttggaatccctgttgctacattgactaaaaggtcatgatgaatggaatatgtaagacttggctcatagaaacctaatcagatggttagaggtgttggcagtttaggacctgctgtcataaatgtgtgaacaaccttttgtaacctaacctattgacctgcatgttttttctttaccccaattcattacatggaggctcaatcttgagtttgctttactggttcagcaaaagccaggaagaacaactttgtagtaatcaaaatgttatccaactgtatattgtttactttattgtaaatactggtgaacagtggttaataaatagttttatattcctttatgcaattattagacttttttctttatttgatatgcctttacagtagaaatagaaatgcccacactcattggattatctttgtttataagttagatgataccagtaaggcattacagtacatatcctagatcttttgagcttacgagttttaaacttgaatatgtatttccacaggaatgtttccacagttgggaaataaaagtttcatgtgatgcctagggtcaatgtctcattaaaatgaggttttaaa

SEQ ID NO: 9919 - DNA, 1871 bp, Homo sapiens
gacccacccgtccgcccacgcgtccgcagctattgagatcttcgaatgctgcggagctggaggcggaggcagctggggaggtccgagcgatgtgaccaggccgccatgcgctcgtctcttcctctctcctgccgcctcctgtctcgaaaataacttttttagtctaaagaaagaaagacaaaagtagtcgtccgcccctcacgccctctcttcctctcagccttccgcccggtgaggaagcccggggtggctgctccgccgtcggggccgcgccgccgagccccagccgccccgggccgcccccgcacgccgcccccatgcatcccttctacaccccgggccgccaccatgataggcgagatcgccgccgccgtgtccttcatctccaagtttctccgactggccgaggctgcgcgcctgattcctgttttggcggctcaatcggttggttcctggagattgttttgtccggtactactgtgttatttctaaaaccctgcccgctttttccatccccgcacatgcacaacaacggatgcaatcctggacattttaaaaagttgatagttttcattttcgctcctcaaaggagcctggggtaggaggaatccgcagtgggagctaacgatcctaagcgttgtttctctgttcttcttttcttctatagaacattataaacatcactggttcccagaaaagccatgcaagggatcgggttaccgttgtattcgcatcaaccataaaatggatcctctgattggacaggcagcacagcggattggactgagcagtcaggagctgttcaggcttctcccaagtgaactcacactctgggttgacccctatgaagtgtcctacagaattggagaggatggctccatctgtgtgctgtatgaagcctcaccagcaggaggtagcactcaaaacagcaccaacgtgcaaatggtagacagccgaatcagctgtaaggaggaacttctcttgggcagaacgagcccttccaaaaactacaatatgatgactgtatcaggttaagatatagtctgtggatggatcatctgatgatgatggataaatttgatttttgctttgggtgggctcctcttggggatggattatggaatttaaaccatgtcacagctgtgaagatctggcacaagatagaatggtaaaaaaaaaaaaaattttaagtgacagtgccatagtttggacagtacctttcaatgattaattttaatagcctgtgagtccaagtaaatgatcactttatttgctagggagggaagtcctagggtggtttcagtttctcccagacatacctaaatttttacatcaatccttttaaagaaaatctgtatttcaaagaatctttctctgcagtaaatctcgcaggggaatttgcactattaataggaaagttaaacgttttaaacatggtagtactggaaattttacaagacttttacctagcacttaaatatgtataaatgtacataaagacaaactagtaagcatgacctggggaaatggtcagaccttgtattgtgtttttggccttgaaagtagcaagtgaccagaatctgccatggcaacaggctttaaaaaagacccttaaaaagacactgtctcaactgtggtgttagcaccggccagctctctgtactccctggcaccatctggttcatgccaggtttagagttcatcgtgtttggcttcctggtctttgagtttaaattcctcggctgtgaccttcccatctccattccggtcctggttggtgaacatattcttcacaatcagctcagcatcaaagccaggagcgagtttccctttgccagatgccacctgggcgtgaatgtacctgcccggcg

SEQ ID NO: 9920 - DNA, 272 bp, Homo sapiens
  misc_feature 272: n = A,T,C or G
ctgaaagtccccacacacaaagcctttattctatataattttataaacacaaattcatgattatctgttttgagagttttaagttttgttttaatgtttaacttttatgtgcatatgatgcttccatgtgttggttactagagtagtaggttaactacagacatactgttttgtttgtgggaaatgactaatgaagctaattaaaagaagcattcaaatctgctttctaccaacattaacaattaacagggcactggacagagtttgtaccn

SEQ ID NO: 9921 - DNA, 4386 bp, Homo sapiens
  misc_feature 1, 4386: n = A,T,C or G
nccacgcgtccgcctgcgcgcgctcctccgtacgagaactagttttgttccgtgccctctggactggaaccttttggagagaacccccggcaggaccaaccccgcacccgccagcaccgcggcaatgtccagcaatagttttccttacaatgagcagtccggaggaggggaggcgacggagctgggtcaggaggcgacctcaaccatttccccctcgggggccttcggcctctttagcagcgatttgaagaagaatgaagatctaaagcaaatgttagagagcaacaaagattctgctaaactggatgctatgaagcggattgttgggatgattgcaaaagggaaaaatgcatctgaactgtttcctgctgttgtgaagaatgtggccagtaaaaatattgagatcaagaagttggtatatgtttacctggttcgatatgctgaagaacagcaggatcttgcactcctgtccataagcacttttcagcgagctctgaaggacccaaaccaactaattcgtgcaagcgctttgagagttctgtcaagtattagagtgccaattattgtacctatcatgatgcttgctattaaggaagcttctgctgacttatcaccatatgttaggaagaatgcagcccatgcaatacaaaaattatacagccttgatccagagcagaaggaaatgttaattgaagtaattgaaaaacttctgaaagataaaagcacattggtagctggcagtgttgtgatggcttttgaagaagtatgcccggacagaatagatctgattcataaaaattaccgcaagctatgtaacttactagtggatgttgaagagtgggggcaggttgtcataatccacatgctaactcgatatgctcggacacagtttgtcagcccttggaaagagggtgatgaattagaagacaatggaaagaatttctacgaatctgatgatgatcagaaggaaaagactgacaaaaagaagaagccgtatactatggatccagatcatagactcttaattagaaatacaaagcctttgcttcagagcaggaatgctgcggtggttatggcagttgctcagctgtattggcacatatcaccaaaatctgaagctggcataatttctaaatcactagtgcgtttacttcgtagcaacagggaggtgcagtatattgtcctacaaaatatagcaactatgtcaattcaaagaaaggggatgtttgaaccttatctgaagagtttctatgttaggtcaactgatccaactatgatcaagacactgaagcttgaaattttgacaaacttggcaaatgaagccaacatatcaactcttcttcgagaatttcagacctatgtgaaaagccaggataaacaatttgcagcagccactattcagactataggcagatgtgcaaccaacatcttggaagtcactgacacgtgcctcaatggcttggtctgtctgctgtccaacagggatgaaatagttgttgctgaaagtgtggttgttataaagaaattactgcaaatgcaacctgcacaacatggtgaaattattaaacatatggccaaactcctggacagtatcactgttcctgttgctagagcaagtattctttggctaattggagaaaactgtgaacgagttcctaaaattgcccctgatgttttgaggaagatggctaaaagcttcactagtgaagatgatctggtaaaactgcagatattaaatctgggagcaaaattgtatttaaccaactccaaacagacaaaattgcttacccagtacatattaaatctcggcaagtatgatcaaaactacgacatcagagaccgtacaagatttattaggcagcttattgttccgaatgaaaagagtggagctttaagtaaatatgccaaaaaaatattcctagcacaaaagcctgcaccactgcttgagtctccttttaaagatagagatcatttccagcttggcaccttatctcatactctcaacattaaagctactgggtacctggaattatctaattggccagaggtggcgcccgacccatcagttcgaaatgtagaagtaatagagttggcaaaagaatggaccccagcaggaaaagcaaagcaagagaattctgctaagaagttttattctgaatctgaggaagaggaggactcttctgatagtagcagtgacagtgagagtgaatctggaagtgaaagtggagaacaaggcgaaagtggggaggaaggagacagcaatgaggacagcagtgaggactcctccagtgagcaggacagtgagagtggacgggagtcaggcctagaaaacaaaagaacagccaagaggaactcaaaagccaaaggaaaaagtgattctgaagatggggagaaggaaaatgaaaaatctaaaacttcagattcttcaaatgacgaatctagttcaatagaagacagttcttccgattctgaatcagagtcagaacctgaaagtgaatctgaatccagaagagtcactaaggagaaagaaaagaaaacaaagcaagatagaactcctcttaccaaagatgtttcacttctagatctggatgattttaacccagtatccactccagttgcacttcccacaccagctctttctccaagtttgatggctgatcttgaaggtttacacttgtcaacttcctcttcagtcatcagtgtcagtactcctgcatttgtaccaacgaaaactcacgtgctgcttcatcgaatgagtggaaaaggactagctgcccattatttctttccaagacagccttgcatttttggtgataagatggtctctatacaaataacactgaataacactactgatcgaaagatagaaaatatccacataggggaaaaaaaacttcctataggcatgaaaatgcatgtttttaatccaatagactctcttgagcctgagggatccattacagtttcaatgggtattgacttttgtgattctactcagactgccagtttccagttgtgtaccaaggatgattgcttcaatgttaatattcagccacctgttggagaactgcttttacctgtggccatgtcagagaaagattttaagaaagagcaaggagtgctaacaggaatgaatgaaacttctgctgtaatcattgctgcaccacagaatttcactccctctgtgatctttcagaaggttgtaaatgtagccaatgtaggtgcagtcccttctggccaggataatatacacaggtttgcagctaaaactgtgcacagtgggtcattgatgctagtcacagtggaactgaaggaaggctctacagcccagcttatcataaacactgagaaaactgtgattggctctgttctgctgcgggaactgaagcctgtcctgtctcaggggtaacctgcttacatctggactttagaatctggcacacaacaaaagtgcctggcatccactactgctgcctttcatttataataatagcccttccatctggcagtgggggtagaatacactcttgacattcttgtctcctgctttagaatgctagtgtgtatctatcatgtatgcaatactttccccctttttgctttgctaaccaaagagcatatattttactgtcagttgtctcaactcttgaatccatgtggcgttttctctgtcctgctgcttcttttggcctcctcgttttccttctctttttcgacaatggtagacatgaatgagatatttaaagttcattggaaatcttcttccctacagcagtaagcaaaaattagcaaagagatagtctaaatggcctctcagcttggtatgtgaaaatgagatcacatactttttaaatccaaatacaaaagcatagtctctgcaagattttgttctttgaatttcttgatattgtaattgattattgataactgtcatcatgaaattatctctcaataataagataaataaactagcatatgaatcataaaaacaaaaaaaaaaacaatcaaaacaaccgaaaagaaggggggggggcgcaaaaataaccccgggggggcccgtcgccccctttttttaaaaggggcgcccccatagaggcggacgcaaattaaaaacagagcagacgcggccggagtaaaacaacaagcgctcgcgggggaaacaaacgcacgtcggggcccatcttggagacagagcaccccacacttgttggccgtgcatacgtggggaccccacccaagagatttaagcgcccgaggaaaaaaccgcggagttttgcgaaccacagcacattccgggcgaaattgtcttctttttaaagcggcctcaaatagttcatcaaaccaccgacgcacaacatagaacaccactacaacagtctcaataan

SEQ ID NO: 9922 - DNA, 349 bp, Homo sapiens
  misc_feature 1, 2, 3, 4, 5, 6, 7, 349: n = A,T,C or G
nnnnnnnaaagcccttttggggggggttttaaccccccgacacacagggaggggggggttctcccaggaacaaagggccaaaatatactccttctttcaggggaaaggagaaagagggccattaaaatcagctcttaccagacatgggaagaaaaagtatagcttgctgcccaggcccggtttgggacccaagttaatactgcccagtgggtttcagggccacataccaacgggggtatttccttgaccggaaagtatggtagttattagatcccaatcgtccaaaaaagaaacactcatccgaaccacattgagaagccaggaatctgccatcttccttaatagccan

SEQ ID NO: 9923 - DNA, 3742 bp, Homo sapiens
  misc_feature 1, 2, 3741, 3742: n = A,T,C or G
nngctggcagcatggggtctgcatgggattactggaagaaaatgtgcccgagaaatacacctgttatgtttgccaagaccctccaggtcagaggcctggcttcaagtactggtatgacaaggagtggctgagcaggggacatatgcatggcctggcatttctagaagagaactactcccatcagaatgccaagaagatcgtggccacccaccagcttcttggtgatgtgcagagagtgattgaggttctgcatggcctgcagctcaagatgagcatcttgcaaagccgggagcatcctgatctgccgctgtggtgccagccttggaaacagccctcaggggaggggagatctcatttcagaaacatccctgtcactgacaccaggagcaaggaggaagctccaagctatagaactttgaacggggcagtggagaagcccaggcccctggccctgcccctgccgcgttctgtggaggaatcctatatcaccagtgagcattgctaccagaagccccgcgcctattaccctgccgtggagcagaagctggtggtggagacgaggggctctgccctcgacgatgcggtcaaccccctccatgagaacggcgatgattccctttccccgcgcctgggctggcctctagaccaagacaggagcaagggggacagtgaccccaaacccggctccccaaaggtgaaggaatatgtctccaaaaaggccctaccagaagaagcccctgctcggaagctgctggacagaggtggagaggggctgctgagctcccagcaccagtggcagtttaacctgctgacccatgtggaatctcttcaggatgaagttacgcacaggatggactccattgagaaggagttggatgtgttggagagctggctggactacactggggaactggagccccctgagccgctggccaggcttccgcagctcaagcattgtatcaagcagctgctgatggacctgggcaaggtgcagcagatcgccctctgctgctcaacatgaaactgggcacccaaaactcatgggggcacaatcctggggcacctgcaggaggagcttcgcatatttaaataaataaacctagcatgctgaatgcacgtgacaccgactgacttcagggatctgggccaggagtgtggtggacattggacaaagaggccattttggctgcgggaggacactctgatctcgaagcctgccataaaggtagcaaatagactcttgggattcccctcttctgtgcacatcgttgaatgaagagagtctttttgcacaaacttcacttgaaattgtgccactgatgataaacggaatgagagccaaaaaagtttagttggagacagttgtaaattcaatttggagtttatttaattgacttttctatcacgttggggcacatgccaactccctggtttcttcctggcatggtgtttgggcagcaggcatcattttccttttctagcttcataggaatattgtgagctcaccatgctgtggaggttgggaaagagcagagtcttggctgccctgctttctccttaggactcttcacttttctcaccacatctcttgcatgacttcatggtactggggacaagtttgtatgccttcaccccagagctggctgggttatggcttttgtagcagagcccatacagcctatggaagaactagaatctcactcacagtaataagaatctaggaggaattccaaaccgaagcaggcagggtctggaacccaaaggacagcattttctacccacttcttaatattgacagcttccccgttctatttaatgtccaaaaatgtttcccaaaatttcaaactctttcactgtaaagatttgttacaaagaatgtggtttggggaattaccttattttatattgttgtaaacaaacttcaaattctacatgtgcgacttttctccttcctgaagggtgtttagtagtcagcgttttcagaattgttttgttactatactttaacattttacatttcctgtttgtattattttgtgagagcaaggtgatcatgctgcttaaggtccaggtacaacctatttgtaccttttgagacaatatttgtgttacttttgcaggttacggttccacatgtaattgctatattttgttttgtttttccttactaggcaaagttaaaatgttccatgctttgaggagtgacccatttcactactttgttttcttatcactaaaggcaaaaatcaaagcacagttgtccattaacacttataagttaattatgggtttatgagtctgtaatgttatatgctgcaaacatttactatgtaaacgtgaagtagccaataatatctcaatagtagtaacagtatctttagcgacctttggaatagttaagcacaggtcattgtggacatgaattcaggcctctgtactaaaatctatttcagggaatgttctgtctagtgatttgctcaccatttgatatataatgaattataggacaagtataagctgatctgctatagctgtccatcagagagaatacacgtggctataacatctataacaaaacgacgattcctctacaagaggctgtttctcactgctaacgttggtgtttctggcgtgggaagaaatgcacaggcgtgcatggcatgcacgttcagacagctgcattgtaagagttctgtcatgcagtctgaaaagggaagaaacaggatggctttctgtagccacacctgtgaggcgtgatgattgttgtattattagattactgatttttcttttctgaaaatacatttgagttttaatcacatctgtggaagctgtaacttttaaggtagtcaatttcatgtcttgttcaacgatgtaagcagaaactgaattgccctaattttgccaactggccattattgggattattgtttaaatttttggtaaaggaagtaatctcctttcattcattgtgacttttgttcttagggaagcagagaagactccccaagttcttataacctcattgtgcttccctaatttaaagccatgttgaggggctccattcccaattcctgggtcaaggtgaattaaccctatgttggagcactggaaaccgttatttgcaaacattgctgttaccatttagaaatatgtgcactatcagctgggtgcagtggctcacgtctgtaatcccagcactttgggaggccgaggcaggtggatcacctgaggtcaggagttcgagaccagcctggccaacagggtgaaaccccgtctctactaaaagtacaaaaattagctgggcgtggtggcggacgcctgtaatctcagctacttgggaggctgaagcaggagaggtgctggaacctgggaggcggaggttgaagtgagccgagattgcgctattgcactccagctcgggcgacaactgcaagatccatctcaaaatattagctaacgacagaacgaaatttgtgccctacctaagtttgtcttagaaaatttccactattaaagataacctgacaaaatagtcccgcttggctaatccttgttcttagtggagtgtttccaggggtctgtagcccatgccctggtacatatatgttacgctataaaaggccgtataaagtgttccgcacttgccacgctcttgcttggacaaagtcgcttttcacaaaaaatccaagaaaaaaaaggggccgcgcacactactcgtggtcactatattatcatgcnn

SEQ ID NO: 9924 - DNA, 1347 bp, Homo sapiens
  misc_feature 1345, 1346, 1347: n = A,T,C or G
tacactaaaaatggcaccttctgtcttctgacatcactggacagtatagggggggaaaaaatcaaccttaagaaaaagaaatttgatatgaaaaaaagaattcaaaacatcccaatttgcaattacaactggtaatataagctgtgtcatctgatactcttcagtgtccaattaaaatcacactctatctggcaatctatagtcacaactacctaaaaatgtcttaaggaagtaggaataaagaaggcatgtagctttaactgaagcactactttgttaaagaataaaagcatttttttttaaatgtcacctgacaccaaatatctggttggaagaggtgctgttttaaattttcaggggaaccctcaagatttatgcaagaattgaaaaaaataaaagtaaattttctcttccttgtataggcttagcattattgaatatactatgcctactctcaataaaaatgaaacaactcaaaatatttaaaagatacttgtttcctaagcacttcaattctcaggttatactaaactttatgatttcatattccctcaataaatcctaaattctctcaataaaatccccgcgtaccccacaagctgcattcaaactcaaatctgtgggaatgagtgactcgacaaaatgtaattcggatcagatcctcatcccctgactgtgtgaaaaaagtactctccttctagtgaaggattgtcacagagtttcactggatgaaactatgacccagtattcttactgtattttacatatgcctgtaaattatttgcaaaaaagaagaagaagaggaagaaagaaaagaaagaaagaaagaaagaaagaaagaaaaagaaagaaagaataaaaaaaatgataacatggcaaccaccaaactcccttaaaaacaaacattggtgacatggccaattaagtatcagtgagcctcctatctgggacttatctgttcctattgtttcaaaaccatttcatgtacactactgaggtaagtaagtttataacttgaaatgtgaacttttttttttttttagtgttaagagcaaccacactatataaatgtaaaaaaaaagttttagagttctgttttcaaacattgctagtggtttagttaactttagctgctttatatttgaaaagcttttatttagatcttgctccatttacagtacattcttaggatgtatgtagtaaataaagctttctttaaagcaatcaaaaaaaagtcgacgcggccgcgaatttagtagtagtaggcggccgctctagaggatccaagcttacgtacgcgtgcatgcgacgtcatagctcttctatagtgtcacctaaattcaannn

SEQ ID NO: 9925 - DNA, 2033 bp, Homo sapiens
  misc_feature 1, 1943, 1944, 1945, 1946, 1947, 1948, 1949, 1950, 1951,1952, 1953, 1954, 1955, 1956, 1957, 1958, 1959, 1960, 1961,1962, 1963, 1964, 1965, 1966, 1967, 1968, 1969, 1970, 1971,1972, 1973, 1974, 1975, 1976, 1977, 1978, 1979, 1980: n = A,T,C or G
  misc_feature 1981, 2032, 2033: n = A,T,C or G
nctctcagttttatatacatatacgtattcactctagtaaaaaggccagatccttttttgccacaacttctcatacagtttctattcgtattccccccccaacacaatcttaaagcacagcgtttgtcccccccgtgtggcttactccgcccccccccctcctctccctggagctcttcataagaactcggaagctttacccctcctcattgggaacctccgcaacgtccattatcttaatctattctccccagtttgagaccttctcgctatctttcatttcgccagttctccctgagctgctgaatttttccagaagtcattaacttctgctctttgattccaagagagtctgaatattttcctgttctcttttcacctgtgagacctcacttctaatctggacaacctctgaatggaccttctctttctctttcacagattccttgaatttcgatgccaacacactcacttcactctctaaggatgactggagtttttcataggaagaccgaggtaccattgcatcagtcatagcagctttctcttctaagagttgtttctccagctttgctacttccacttccttgcttgcaaggtgttccttaagattgcttattttttcttccatctcttttgctgcagtccgcagcgtggttatcacttgcaaatgttctgtgatagagacagagttctctttttgtgcatccaccagttgtttgagctgggtcaactcattcaacacttttgaatactgagacttcatttcagacagtgcatcttctgctttagccctggacacgtttgtcaattgcatcagtttctcatgctctgctttatggatatattcagctgtgacatcctctagagatttcctcttcctgtaatcctccagctcagcctgggcttctttgtacagctgtgacagctcgctcacctgtttattgagttcatctatcatcctattcatggcttctttcatgtcctcagcttcatcactggcttcctgtgtcatctgactttttagtgtgtcttttaatttcatgatttcttcttgggcttcttggtatttctcaaacaaaaatgctttctccttattcatattctcaataacagagcaatatgaacttttcatttcctcgtactcttccacaggtggcttaatcactgtacctttctccctctctaccagtttttcctctaactctctcactttctctttatttctttcactttcttctaatgcattctgcagatcctgctttagcacatttatttcctcttccgtgaccctcagctcgtggaaatgtgaataattatccatgctttcaggtgagacaagaccgagtttcatctgcttctgcacactaaggacttctttcatagcctcctcgtatttgctctgagtttctttaagtttctggctgaggtcagagctgttctctgaaatctcagtgttgtttaagcataccagttctgcccttcgggattggagttcgacctgtagctgttttctctctgcttcagagctctctaatctcttctgtagatcttgcaaaatctcttgcagttgctgaattctgacatcattgtcagtagtggatttacctaaagaatgtattaagacagatggagatgatttggagtctgggggagaggtttcaccaggttttcccagggatgggcccaagtcagtttgggtggaatggtatgagtcaaagcttaggtctgcttccgcctccttgggtgatttggcctgtaatttatcttgtaactccttattgtgtaaggtaagggaagcaacttttgcttgcaatagagagagaagatcttgttggtcagcttcagaacttatatccaataagctatcagcacctgtagtacctgcccgggcggccgaggtaccagaaagtaaattaaaactcaaaattaataagaataannnnnnnnnnnnnnnnnnnnnnnnnnnnnnnnnnnnnnntagtaaaaatctctaattacttatttatattaatatatatttataatatann

SEQ ID NO: 9926 - DNA, 1324 bp, Homo sapiens
  misc_feature 1321, 1322, 1323, 1324: n = A,T,C or G
ccgggcaggtacgcgggggtggcggcgttgggttgagcgggctttttggaagtttgtggcggagttctgtgatatgagcaacaatggaccagaagattttatctctagcagcagaaaaaacagcagacaaactgcaagaatttcttgggcagggcctggggaatgcttttttatctcatattagtgcctgtgatggcatctttcatctaacacgtgcttttgaagatgatgatatcacgcacgttgaaggaagtgtagatcctattcgagatatagaaataatacatgaagagcttcagcttaaagatgaggaaatgattgggcccattatagataaactagaaaaggtggctgtgagaggaggagataaaaaactaaaacctgaatatgatataatgtgcaaagtaaaatcctgggttattagatcaaaagaaacctgttcgcttctatcatgattggaatgacaaagagattgaagtgttgaataaacacttatttttgacttcaaaaccaatggtctacttggttaatctttctgaaaaagactacattagaaagaaaaacaaatggttgataaaaattaaagagtgggtggacaagtatgacccaggtgctttggtcattccttttagtggggccttggaactcaagttgcaagaattgagtgctgaggagagacagaagtatctggaagcgaacatgacacaaagtgctttgccaaagatcattaaggctgggtttgcagcactccaactagaatactttttcactgcaggcccagatgaagtgcgtgcatggaccatcaggaaagggactaaggctcctcaggctgcaggaaagattcacacagattttgaaaagggattcattatggctgaagtaatgaaatacgaagattttaaagaggaaggttctgaaaatgcagtcaaggctgctggaaagtacagacaacaaggcagaaattatattgttgaagatggagatattatcttcttcaaatttaaaaactcaaaaaccgaagaagaacataaattttagttatgctcagataacatacaacttcaaaaggcatctgatttttacacattaatttctgaaaccaatgcgacaaataagtcgggacaatgggaatcttgacaacaaatattttttggttgacactcaatattggttccccccctcataaatgggttcataatgtgaccggttggttccgttttaaccctccattggagtttcggaccttatccgaaactatccttgttcagcgacatgagagaacgggcctgctcaaaggttgccgttcaatgaaaaaggggannnn

SEQ ID NO: 9927 - DNA, 1897 bp, Homo sapiens
  misc_feature 1, 2, 3, 4, 5, 6, 7, 8, 9, 10, 11, 1897: n = A,T,C or G
nnnnnnnnnnnctgctgctgcttcggttttgcgtgtgcctgttgttggtgtgtggcgttctctcgttgctcccctcttcttcctttgtctctttcttgatgcttgagtgttcttttcccctctttcagtgtgccccgtcgcttctgctcttgtttcctgagccgacccgtccaggcctttcatttgtccgatggaccttacctggtccagatccttctgctgtggaacgtgactccatctggcagtttcaaactgtgagcaccccctgcctgggtcttctcccacagagctctgaggaattgcacagaatgactctgaatggacaggggttcaggaaacaggctctgctgaaatagaaacatgatctggatccatggctgaggttcttggctgatgagaataaaactggacttactgtataggcagtaatgacccttcagggagcaggtgaagaacaactttgctacacaacttctcacagtgtcttcaatggtacactgatcagggactggaatcttctttccaatttccatggcatatgctttcactttgctgaggtttttttttaagtgcaagtagagcttatcttggtattctataggacttgcagttgtctctggagtttcttcctgggagttttctttaacagtttctgacaaattctctgagtctatatgtataatatttgggtatgaaactgaagactcccccagctgtgatctctcagtgtctgtcttaaacggcagcttgtcatttccttggccaagtgggtctatttctgaaagagagatgctggctggtatgtctcccctgttttcatcttcgccgtcatctgaacccacaccctttgtgagcatagtgtggaaagccaaactttttgacctgttaaatctaatgttttttctttcttctttagaaacttggcccagactatatcttctgatagagccaggggtattgctccctgcatttatcttgtcttcaaaagcctggattttaacttggagtttttcatggtcttcattttcagttactatgagcttggtttcttccagtttctcagggaattcaatttcagtgctgatttttctcctgccacttccagccttggtattttccagttgtcgggtaaggagtttagcaatggcggtgaagctgttgctcatgcggaagatgtctctgctctgagggcccaagattgaggagaaggtgtcggtgatgcttttaatctccagcaggagaatatggtgaaacgaatgctccatgttggccagttggctcaccaggtatgtcaggcagctcctggctctctcttcatccacatgcccaacagctccataaatccttgccatctgtccagtgaggtaggggaatctctcacctatctctttcagcattggaagaaaactgttcaaagccactggctcatagactgctatctctatgaggatgtttaggatgatgtcattatgggttgaatccttcaaatgcccaattaggaaaggaatacacttctgaactacctcgagttgttatatctttgctgctacatgcaaaagccgtagtagatggtactgttctggctgttcccagctgagacatcaaggccaggagttctgtcaggtgtctattcaattggctgaggctgctttgcatacacagcagtaacactctcagcgacatggtgttaccttggagtatgctctttactataacttcccgtgtgatcagcaggagatctgcctgggtattgccgcgacgacggttcgtgaactatccgcacagttcttgttgcctgtggaggatcaccggacggggatgcaatgcaacctgggacgcgtacgagcgcacgattaatgattgccgggtgtcagtcaaggcaggatcagagatatan

SEQ ID NO: 9928 - DNA, 267 bp, Homo sapiens
  misc_feature 1, 2, 3, 263, 264, 265, 266, 267: n = A,T,C or G
nnnaggctgttcaccagcttgctcagaatcacgccattcttcagccagacctgaagccaagcgccaacgggctgggccgggccacattaaggccccacctggactaatgattcaattcaaccagccggttcttcaagttcttggcttactttttttgaattttggaacggaacttgggggttaaggccttaggagggaccctggtgggccatgtttgggggaaagaaggcttcctaagggcttcgcaggaaggagggaagacnnnnn

SEQ ID NO: 9929 - DNA, 5332 bp, Homo sapiens
tcgacccacgcgtccggaattcctggacacccggggcaaggtgggcccaggggaaggccgggctacgatggctgcaacggaacccagggagactcaggtccacaggggccccccggctctgaggggttcaccgggcctcccgggccccaaggaccaaaagggcagaaaggtgagccttatgcactgcctaaagaggagcgcgacagatatcggggtgaacctggagagcctggattggtcggtttccagggacctcccggccgccctgggcatgtgggacagatgggtccagttggagctccagggagaccaggaccacctggaccccctggaccaaaaggacagcaaggcaacagaggacttggtttctacggagttaagggtgaaaagggtgacgtagggcagccgggacccaacgggattccatcagacaccctccaccccatcatcgcgcccacaggagtcaccttccacccagatcagtacaagggtgaaaaaggcagtgagggggaaccaggaataagaggcatttccttgaagggagaagaaggaatcatgggctttcctggactgaggggttaccctggcttgagtggtgaaaaaggatcaccaggacagaagggaagccgaggcctggatggctatcaagggcctgatggaccccggggacctaagggagaagccggagacccagggccccctggactacctgcctactcccctcacccttccctagcaaaaggtgccagaggtgacccgggattcccaggggcccaaggggagccaggaagccagggtgagccaggagacccgggcctcccaggtccccctggcctctccattggagatggagatcagaggagaggcctgccgggtgagatgggacccaagggcttcatcggagaccccggcatccctgcgctctacgggggcccacctggacctgatggaaagcgagggcctccaggaccccccgggctccctggaccacctggacctgatggcttcctgtttgggctgaaaggagcaaaaggaagagcaggcttccctgggcttcccggctcccctggagcccgcggaccaaaggggtggaaaggtgacgctggggaatgcagatgtacagaaggcgacgaagctatcaaaggtcttccgggactgccaggacccaagggcttcgcaggcatcaacggggagccggggaggaaaggggacaaaggagaccccggccaacacggcctccctgggttcccagggctcaagggagtgcctggcaacattggtgctcccggacccaaaggagcaaaaggagattccagaacaatcacaaccaaaggtgagcggggacagcccggcgtcccaggtgtgcccgggatgaaaggtgacgatggcagcccaggccgcgatgggctcgatggattccccggcctcccaggccctcccggtgatggcatcaagggccctccaggggacccaggctatccaggaatacctggaacgaagggtactccaggagaaatgggccccccaggactgggccttcccggcctcaaaggccaacgtggtttccctggagacgccggcttacctggaccaccaggcttcctgggccctcctggccccgcagggaccccaggacaaatagattgtgacacagatgtgaaaagggccgttggaggtgacagacaggaggccatccagccaggttgcataggagggcccaagggattgccaggcctgccaggacccccaggccccacaggtgccaaaggcctccgaggaatcccaggcttcgcaggagctgatggaggaccagggtccaggggcttgccaggagacgcaggtcgtgaagggttcccaggacccccagggttcataggaccccgaggatccaaaggtgcagtgggcctccctggcccagatggatccccaggtcccatcggcctgccagggccagatgggccccctggggaaaggggcctccctggagaagtcctgggagctcagcccgggccacggggagatgctggtgtgcctggacagcctgggcttaaaggccttcccggagacagaggcccccctggattcagaggaagccaagggatgcctgggatgccagggctgaagggccagccaggcctcccaggaccttccggccagccaggcctgtatgggcctccaggactgcatggattcccaggagctcctggccaagaggggcccttggggctgccaggaatcccaggccgtgaaggtctgcctggtgatagaggggaccctggggacacaggcgctcctggccctgtgggcatgaaaggtctctctggtgacagaggagatgctggcttcacaggggagcaaggccatccaggaagccctggatttaaaggaattgatggaatgcctgggacccccgggctaaaaggagatagaggctcacctgggatggatggtttccaaggcatgcctggactcaaagggagacccgggtttccagggagcaaaggcgaggctggatttttcggaatacccggtctgaagggtctggctggtgagccaggttttaaaggcagccgaggggaccctgggcccccaggaccacctcctgtcatcctgccaggaatgaaagacattaaaggagagaaaggagatgaagggcctatggggctgaaaggatacctgggcgcaaaaggtatccaaggaatgccaggcatcccagggctgtcaggaatccctgggctgcctgggaggcccggccacatcaaaggagtcaagggagacatcggagtccccggcatccccggtttgccaggattccctggggtggctggcccccctggaattacgggattcccaggattcataggaagccggggtgacaaaggtgccccagggagagcaggcctgtatggcgagattggcgcgactggtgatttcggtgacatcggggacactataaatttaccaggaagaccaggcctgaagggggagcggggcaccactggaataccaggtctgaagggattctttggagagaagggaacagaaggtgacatcggcttccctgggataacaggcgtgactggagtccaaggccctcctggacttaaaggacaaacaggctttccagggctgactgggcctccagggtcgcagggagagctggggcggattggactgcctggtggcaaaggagatgatggctggccgggagctccgggcttaccaggttttccgggactccgtgggatccgcggcttacacggcttgccaggcaccaagggctttccaggatccccaggttctgacatccacggagacccaggcttcccaggccctcctggggaaagaggtgacccaggagaggccaacacccttccaggccctgtgggagtcccaggacagaaaggagaccaaggagctccaggggaacgaggcccacctgggagcccaggacttcaggggttcccaggcatcacacccccttccaacatctctggggcacctggtgacaaaggggcgccagggatatttggcctgaaaggttatcggggcccaccagggccaccaggttctgctgctcttcctggaagcaaaggtgacacagggaacccaggagctccaggaaccccagggaccaaaggatgggccggggactccgggccccagggcaggcctggtgtgtttggtctcccaggagaaaaagggcccaggggtgaacaaggcttcatggggaacactggacccaccggggcggtgggcgacagaggccccaagggacccaagggagacccaggattccctggtgcccccgggactgtgggagcccccgggattgcaggaatcccccagaagattgccgtccaaccagggacagtgggtccccaggggaggcgaggcccccctggggcaccgggggagatggggccccagggcccccccggagaaccaggtttccgtggggctccagggaaagctgggccccaaggaagaggtggtgtgtctgctgttcccggcttccggggagatgaaggacccataggccaccaggggccgattggccaagaaggtgcaccaggccgtccagggagcccgggcctgccgggtatgccaggccgcagcgtcagcatcggctacctcctggtgaagcacagccagacggaccaggagcccatgtgcccggtgggcatgaacaaactctggagtggatacagcctgctgtacttcgagggccaggagaaggcgcacaaccaggacctggggctggcgggctcctgcctggcgcggttcagcaccatgcccttcctgtactgcaaccctggtgatgtctgctactatgccagccggaacgacaagtcctactggctctctaccactgcgccgctgcccatgatgcccgtggccgaggacgagatcaagccctacatcagccgctgttctgtgtgtgaggccccggccatcgccatcgcggtccacagtcaggatgtctccatcccacactgcccagctgggtggcggagtttgtggatcggatattccttcctcatgcacacggcggcgggagacgaaggcggtggccaatcactggtgtcaccgggcagctgtctagaggacttccgcgccacaccattcatcgaatgcaatggaggccgcggcacctgccactactacgccaacaagtacagcttctggctgaccaccattcccgagcagagcttccagggctcgccctccgccgacacgctcaaggccggcctcatccgcacacacatcagccgctgccaggtgtgcatgaagaacctgtgagccggcgcgtgccaggaagggccattttggtgcttattcttaacttattacctcaggtgccaacccaaaaattggctttatttttttcttaaaaaaaaaagtctaccaaaggaatttgcatccagcagcagcacttagacctgccagccactgtcaccgagcgggtgcaagcactcggggtccctggagggcaagccctgcccacagaaagccaggagcagccctggcccccatcagccctgctagacgcaccgcctgaaggcacagctaaccacttcgcacacacccatgtaaccactgcactttccaatgccacagacaactcacattgttcaactcccttctcggggtgggacagacgagacaacagcacacaggcagccagccgtggccagaggctcgaggggctcaggggctcaggcacccgtccccacacgagggccccgtgggtgggcctggccctgctttctacgccaatgttatgccagctccatgttctcccaaataccgttgatgtgaattatttaaa

SEQ ID NO: 9930 - DNA, 3381 bp, Homo sapiens
  misc_feature 3380, 3381: n = A,T,C or G
gttcgtaaacaacatactgtcataggaaaactggagagcttaaccaacttgctcttagaaatgttaccttaaaaaaaaaaaaaaagcaagtgcttaagagaaaatacaattttaattattttgttgagcctgcagagtaagtttttaaaaatataagttcatagcattttaattaactttgaaagttcatatgcatcagaaaatttatgaaaatttgaatgaaaaaaatttcatctatttatttttctaattttaatggcaaatttacactattatggctgataattctgtgaacttaccttcttgttgactgattctttttcccttaatcccagctttaaggagataggtgaagttattgtacaaagttaagtgataccataaagtatatattataaagtcatacatggcttttggacagtattatatttcagttgcagtgctgcattccattaaatttcataaaatgctagggaaaatgtgtttgataaaattttctgcagtgagaaatgacagactgagtgcctgacaatttaagccacatatgaagtatgcaagtaaagattcagtccttaatgtcatctatatcatggtataaaagctcaacaagtatcttataatttggagttaactttataaagtaagaagagtttggatatcttgataaaagattttcatgtttgctgctttttttataataaaaatcccaacattttgccatcttatgtttagctacatgaacttcgcaatttcatcggctcattctaatgaccacctaaaagtcctcaatctttgaatattgctttattagctcctctaactggtattctaacagtttagcagcacttatatttattaatgctttacatttttacccctttttgtgtaaacacaaatacacccatgcatatacacacaaacattattgtccttgtgagggtttgggggaaatgaaaaatagtacctttctcctcttcttttgattccttagttcccaaatagactggtgctagtcatttagtcatctgtaaatttcgaaatgtagtttgattaaatgtgaactgaattctcagcaatgaaaaatgtcaagttgaattcatctaataagtgaaaataatatattttgtaaacagattacatttgaacacctaaataagtatttgtttcataatcattacatgcttgtttatgatttacaaagatttggtagagaaaagtacagtccttaaggcatatatatgccaatgcattaaactactcagcttttgtgccagctcaggtgttcataggaacaggaatgtggaataccagctttttactttaattatacttttatgctgaatttttcttccagttaaacctttaattacactagtatgtaaagtagttactgagaaaaataagtttttgatttcccttctgttgatctgtaacatttttaaatgaagctatttaacacatgacatgctaatgttacttaatggattcctatgtatttcattaaaaaaaagtctcccacctgtgttaagacagctaaatatttcttgatgttggcttgaggaccaagtgagccatcttgccagttaagcaagttttatatcagaggaccaaatggttaagaagagaatttgtacatttcttgagcttccccatgtgaagcttgggttcagtactatcctattactatccatcttcataatgagtgaagcaaactgaaagggaattcataatcttttttcttatctgaacagaaaaactaatgaaaatcaacaataaatctttattttaattttcattcaacagctgaaaaaccatgtctgttgaccacattggaccattgcctagttaaaatccataaaattccctataaaccaatgaaaagaaacttgtctggcaataatttccaacattttaaattctaatttttagttacaaagaaaaaggatagaatgaggcttttcaaggaattcttgctcatcccttcaattatttggcaggtaaaacagtcctagaattcagcttcctttttggttttattactattaaatagatactttcatataaatggaaacacttttcctcaaaacattaattcaaaacatactccttatattaaggattatagcaccatattttttgtatattccctatgtgtaactttttcctgttggtatgtgatatttttcatttaatatgactatctgctggtgttggggccaatagatttgtgaatattctgtggatgtgtctatgtataggtgtatatatatatatatatatatttttttttttttcccagctaattacctcaaatgtgtgattgtttaatatataccacactatgtttgcacagagcagggcttccattagcagtggatatttttatgtctgactttgaaaatcagtcaacacaatttcattggtgtgaattatttgttgctctttttcatattttaatggagagattcctattataaggcccatgcttcaaacataattatatctttctatatccagccatctggaaatacataggggtaagaagtatttcttgaaatgtccttgtttagtaagttagtaaaaactgggatgactagttgccaagatgtcttgtaactgcatagcagatgacacctggcatggcaagtctcattcacttcagcacaacactctgtacatttcagtctgatattctactttgccatttaaggacaccattaaaatcatagagattttcagtgacattggagtattgtaattattactttcaaaaaattatttttaataggatgattaaaccaatgagaagaaacacacataaatgatattttgcagtttatctgtattaagaaatgcttcttgccaatttctagttttagtttttggattgctacataagactttctttccatttactttatgtgtttttaaaagctgcaggtaatttttaaggtttgatggaattataatggaagccttgtataagttaaatgaaattggtaaaggagagcttactttgtctataatgcattcaggattaaaaattagatttcaaaatgaaatgtctgatttgtaaaatatttaatgttatatcagacttacataaaattttctgtgagaactcaaatgcatttgatttttaatgaatgttctgaatgaaatatgaatttttgtctttcagtctctgtagtttatctcaatatattaataaaaaggtctgttctcactgtaaaaaaaaaagaaaaaaaaaaaggggggcaaataccggggaatacgacaacttgtaaaggcaaggggaaaaaagagggggaaaggggagaagcgtgtggacggggtgaccacaagagaaaaaatggcgggtgaaaaaaattggtgaagann

SEQ ID NO: 9931 - DNA, 2024 bp, Homo sapiens
ctcctgccacttgacccttctgcaggacaggcccagcacttaggttggaagggccagagaacttcttcctgacaggatctaagggatttttggagcatgtttgtatgtggactttgggcctcaaagtgttttgaggaccatggttccttgtttagtcaagggatgttgctgctgaacgaggagtgatcagcagctggactgtgccttggacctaatgaggcgcctgcctccccagcaaatcgagaaaaacctcagcgacctgatcgacctggtccccagtctatgtgaggatctcctgtcttctgttgaccagccactgaaaattgccagagacaaggtggtgggaaaggattaccttttgtgtgactacaacagagatggggactcctataggtcaccatggagtaacaagtatgaccctcccttggaggatggggccatgccgtcagctcggctgagaaagctggaggtggaagccaacaatgcctttgaccagtatcgagacctgtattttgaaggtggcgtctcatctgtctacctctgggatctggatcatggctttgctggagtgatcctcataaagaaggctggagatggatcaaagaagatcaaaggctgctgggattccatccacgtggtagaagtgcaggagaaatccagcggtcgcaccgcccattacaagttgacctccacggtgatgctgtggctgcagaccaacaaatctggctctggcaccatgaacctcggaggcagccttaccagacagatggagaaggatgaaactgtgagtgactgctccccacacatagccaacatcgggcgcctggtagaggacatggaaaataaaatcagaagtacgctgaacgagatctactttggaaaaacaaaggatatcgtcaatgggctgaggtctgtgcagacttttgcagacaaatcaaaacaagaagctctgaagaatgacctggtggaggctttgaagagaaagcagcaatgctaaacctctgtttcatgctaaccagacacgccgtgcactcgttagattcctttcttagaaaactcgttttctgctcccttccctcgtcccttccctccccgacaggtcacataacagctgcatcattgaccgcacagcgccatctctccctgagaataaagccgatagccaccctcctccggctccgagcctgcttctgccacacctcgctctcagttctctccacatttccatagagaccgtgtggtttttgttcacccgggccccccgtcttcctccctgtccccccatttataggcataaaatccactgtctgccagcctcccttccctcccacctttttggtacattggtgtaaaaaatgtaaaacaaaaaaattttatgaactaactgtggtgtgtgaaagagagaagaaaaactggaaatcttattccgtgtgtgtttgggagttgcttggggttgggggtcgtggggacaggggacagctctgggagcagaggtggccctcggtgccgtcctgcgcagactctcccgtcccacggaggccgcggggtgggggctggggggggtgccgccgaccgttccgctcttccggccaggtgcttttctgtcaatttctatggaatgcaaaaggaggtttttgttttattttgtttttttgtaaagcttaagaaaaaaatctacatcttatacttgagcctccatacttaaaaaaagaaaagaaaagaaatcaataaaaagaaactggggcgcagttaaaaaaaaaaaaaaaaaaaaaaaaaaaaaaaaaaaaaaaaaaaaaaaaaaaaaaaaaaaaaaaaaaaaaaaaaaaaaaaaaaaaaaaaaaacccaaaaaaaaaaaaagggggccccccccggggggggcccccaattccccctttaggggatttttttacccccccctattggccgtttttttaaaacgttgggacgggaaaaacccggggtttccccaaattaattcctttgaaaacaatccccttttcccgagttgggttaataacaaaaa

SEQ ID NO: 9932 - DNA, 1622 bp, Homo sapiens
  misc_feature 1, 2, 3, 4, 5, 6, 7, 8, 9, 10, 11, 12, 13, 14, 15, 16, 17,18, 19, 20, 21, 22, 23, 24, 25, 26, 1622: n = A,T,C or G
nnnnnnnnnnnnnnnnnnnnnnnnnngtctcatttttctctatttgtttcattcacaatgtttcactctaccttactctttatactcctttttatatctttctaggccttgaacacattgctcgtactggccttgttctttgatcgcccccttttcatttaactgatatattttttatttattaatgtaggctaaacaagcagaagccatcagtaagagacaagaggaaagaaacaaagcatttattccacctaaggaaaaaccaattgtgaaacctaaggaaggtaatgctttctatgatgtaaaagtctttattaattaggaaaagtaaacccataataaatttgtctgaatctttttaagaaacagttgtatcttttcatcagttctcttagcatttcattaattactaatcctaaggacaagggatggctgagataatttataatttagaggcagctaatgcctatttcagtgcaaactggattgacagtcctctcctgacctctggtctgtgcttggaaaagactctttgttgtgaaagatacaaacccagggcagccagtgcatcttctgtagaaatgcaagaagatccctgagctctgctgtcatgcctctcaaagaggaattatcagaagttgtactttttcttctctttatgtgatcttggcttagagtttggcttctatatcggtaacatggatttctcatcaccttagactaaaggatgctgacaggtcttattcaggagctattagtgcgaaagtgattgtggtttttaaatggcagaaatcactttcgcactaacctagtatttaaaagacactaagagaaaacattgtcatgccatttcttctgatgcatcctcttctgcatttttttcccctgtggtaacacttatcctcttcctaaagtaaccctccaaagtgaacagtgacacactgaagggagagggctcaccagcaatattgtacatagactgggtcagaaacagatataatacattattattttaatatattgcttgttaatagctttaaaaatactacattctatggtagattattggttatataaaaggtagaaatgtcataagtattataatttccagtctgtaaaacctgtcagttgagtgctttgaaggtactcaatatactcaatagctagttaccctaatttagtttctccacacggtggaggctttaacactctgtgcttctcaggttgctgggtagtttgatgttttatcttatgattcttttatgctgtgatcctgtactttgaatggtaagaaaaagttgcattctttttcactgcttcctttctctattttgttcacacttttggcattgattagatagttggcttctattagggggacttccacacactctcaaattattgtctttattaccaaaatgttgttaaatataccaaaatcttgttaaaatactattaattagtcattcattgaattaatattcaatgaattaatctaacattaaatgaattcattgaatattcaattaatattgaattaatatttggaaaactttaaattttcgttttgatattagaggaagtagattttgacctctagcttagggttagctgattaaacn

SEQ ID NO: 9933 - DNA, 515 bp, Homo sapiens
  misc_feature 1, 2, 61, 62, 501, 502, 503, 504, 505, 506, 507, 508, 509,510, 511, 512, 513, 514, 515: n = A,T,C or G
nncgtatacgactcctatagggccgattggagctccacgcggtggcggccgcccggcaggnntatttttttttttctttttctttttttttttttttttttttttttttttttttttttttttttgtgttttttttttttttttttttttttcttccccccttttaaaatttttttttataaaaacccccaaaaacccccaaaaaaaaacccaattcttttcctcttccccccccccctcccccccccgatttaaaaccccgccgccccccggggctagaaaatttatgttaacgggttcccccccccccggccccggggggggcccccggccccctctttggggccccatgagggggccccccccccccccctgcaaaaaaaaggcccttgcccgttcccaagggaaaaccggtcccccttccaaaataaccccacaccccggccgggagataaaaagccgccccccccggggcccaaagaacgccccccccccgcggannnnnnnnnnnnnnn

SEQ ID NO: 9934 - DNA, 2034 bp, Homo sapiens
  misc_feature 2034: n = A,T,C or G
gcgtccggcagttggttgccctcctgtccgtcagaggtgcagtaccagaggtggcgtgctgccgacttcgcgtttgccttgctggatgattccgcttgtttgccggctgcgtgagtgcttagagcttttcggtggaagatgccggacagtaacttcgcagagcgcagcgaggagcaggtgtctggtgctaaagtcatcgctcaggccctgaaaacgcaagatgtggagtacatatttggcatcgtaggcatcccagtgaccgaaatcgccattgctgcccagcagctaggcatcaagtacatcgggatgaggaatgagcaagcggcttgttatgctgcctccgcgattggatatctgacaagcaggccaggagtctgccttgttgtttctggcccaggtctcatccatgccttgggcggtatggcaaatgcaaacatgaactgctggcccttgcttgtgattggtggttcctctgaaagaaaccaagaaacaatgggagctttccaggagtttcctcaggttgaagcttgtagattatataccaagttctctgcccgcccaagcagcatagaagctattccttttgttattgaaaaggcagtgagaagcagtatctatggtcgtccaggtgcttgctatgttgacataccagcagattttgtgaaccttcaggtgaatgtgaattctataaagtacatggaacgctgcatgtcacctcctattagcatggcagaaacctctgctgtgtgcacggcggcttctgttattaggaatgccaaacaaccccttcttatcatcgggaaaggtgctgcttacgctcatgcagaagagagtatcaagaaattggtggagcaatataaactgccatttttgcccacccctatggggaagggtgttgtccctgacaaccatccatactgtgtaggtgcagccagatccagggctttgcaatttgctgatgtaattgtgttatttggtgccagactaaattggattttacattttggactgcctccaagatatcagccagatgtgaagttatccaggtgatatctgtgcagaagaattggggaataatgtaaagcccgctgttactttgctaggaaacatacatgctgtcactaagcagcttttagaggaacttgataaaacaccatggcagtatcctccagagagcaagtggtggaaaactctgagagaaaaaatgaagagcaatgaagctgcatccaaggaactagcttctaaaaaatccctgcctatgaattattacacagtattctaccatgttcaagaacaactacctagagactgtttcgtggtaagtgaaggagcaaatactatggacattggacggactgtgcttcagaactaccttcctcgtcacaggcttgatgctggtactttcggaacaatgggagttggtttgggatttgctattgcagctgccgtggtggctaaagatagaagccctgggcaatggatcatctgtgtggaaggagacagtgcatttgggttttctggcatggaggtagaaaccatctgcaggtacaacttgccaatcatactgttggtagtgaataacaatggaatttaccaaggttttgatacagatacttggaaagaaatgttaaaatttcaagatgctactgcagtggtccctccaatgtgtttgctgccaaattcacattatgagcaagtcatgactgcatttggaggcaaagggtattttgtacaaacaccagaagaactccaaaaatccctgaggcagagcctagcagacacaactaaaccttctcttatcaacatcatgattgagccacaagccacacggaaggcccaggattttcattggctgacccgctctaatatgtaaataaagacgccagttggtggtcttgagttttctctttcttgcaagatgaaattttattttccacagcaaaattactctactgttaaaattgtgcaaaataaaataaacatttaaaatgacattttacagtaaaggaattgattaaaaacagaaaaagttan

SEQ ID NO: 9935 - DNA, 898 bp, Homo sapiens
cggaatacttctagaattaattaacgcgggggcagtttgaatcgcggtgcgacgaaggagtaggtggtgggatctcaccgtgggtccgattagccttttctctgccttgcttgcttgagcttcagcggaattcgaaatggctggcggtaaggctggaaaggactccggaaaggccaagacaaaggcggtttcccgctcgcagagagccggcttgcagttcccagtgggccgtattcatcgacacctaaaatctaggacgaccagtcatggacgtgtgggcgcgactgccgctgtgtacagcgcagccatcctggagtacctcaccgcagaggtacttgaactggcaggaaatgcatcaaaagacttaaaggtaaagcgtattacccctcgtcacttgcaacttgctattcgtggagatgaagaattggattctctcatcaaggctacaattgctggtggtggtgtcattccacacatccacaaatctctgattgggaagaaaggacaacagaagactgtctaaaggatgcctggattccttgttatctcaggactctaaatactctaacagctgtccagtgtgggtgattccagtggactgtatctctgtgaaaaacacaatttggcctttggtaatctatttgaggcaagtgggaagtttaattagttccaacaacaaattctgcattggagtttacatatttagtgttctggggtcaaggagctatgatctgagaggggttgattggctgcggtttcaacaccggtggtttactgtgggcgacgtttcggcccctggttggcgcctttctcgggggtcaaggcttccggaaaaaaaaaaatgggggccgaaaaaaggggggaaaatgcaaagtggggtaaagccgaagtggtaaca

SEQ ID NO: 9936 - DNA, 7974 bp, Homo sapiens
atgtgctgcaaggcgattaagttgggtaacgccagggttttcccagtcacgacgttgtaaaacgacggccagtgaattgtaatacgactcactatagggcgaattgggtaccgggccccccctcgagtttttttttttttttttttttaataaagacactgcttttatttagtttgatatgtttctttacagaatgcagaaaacacatcttaaaatcatatagaaggaaataaaaacacatcagtggttggtgaacacttgaatgtgagattggctctccatctcacagagtccaacgaccatcaccagcccagcgctcaggggagcaggctgcctgcaaaggcattgttgctgttgttattctgttcactgccccatcgcctccagttgctatggcaacaggccattctgggccagccacgtctctgcatggcagtgcccaatggtggagttgctaggggcgacggagctgtttggaaggcctttcaaagccctcacctggaacattgggaattgtttattttttgatgaggtcatcagaaataatctcaccaggtcagatcccacttgtgctcctgtctctggggcaccagggaaactctgacttggaggcatgagcccagtcaccagtggtccactgagcccgcatttacaggctcccccacaggggcactgctcactccagagtaccccctggggactggggcaggggagaggggctgggccctgtgggagaaggcgcaaggggaaatgccctctggagagcagtaggacagagacctctccccccctcctaccagccctcccctcctgaggcagcacacacaaatcctctgcaaaacagtcgatatggcttagaagtagctgctctgtgtgcaaagggagcctgggtccacccacccaccctcaatcagggaatggatacattattgcgaaaggcattcctccctaaaaagtacccaaaataacgcttcagacatcaagaaaagtcatgctcaaaatggtttcttccacaggaggagaatcgaagcagagtgggcgcccctgagtcatgggacagagatgcagatggacggacggatgttctgctaaaaaaggcaaaagaaccccagtgtaattccagaatttaaaccattaggaaaagtagggggaaaagaatcaaaacaagcaaagccgtcagttccatggaatcaacacttaagagctcgtacaaactgctgtaagcatcaccattttaaatcttttttttaataaaacaatttgaggctgtataaaaactttagtaaaaaattagctttgagagctaacagatttttattatgaactattgctggcactcctccccagccgccagaccttttccagtagttcaggcccaaggcctgggactggagtgccagagaaaagggatggggtgggtcggggcaggactgtggactgttaggacaaagcggccaaggtcaagtgaggaaagagcatcacatgacataaaaatattgcatcttcaccaaaatgtcccccactgagtgtttcaaaaaaccgtgatattccttttaggaggaaaaaaaaaaacaatgcacagaaaaagggtaaaacaaaataggttgatgtggtggagacctttgacctcccaggtgcccccacaagcagctggcccaccctggagcaccaaagttgggggccacagccaccactgcctcttggagtccctttttcatggaaatgaagaccccttggtcgtgggccactagtgtacatgggctggaagtggggatgtccatggcccaagagacccctccagcttccagcccctggcaacagcgggagagcaaacccagcaccagggacttggcgtgagccagggccgggaggcccccaatcaggctctggggtatcagagcaaccaagttgacgtagtgtgaaaaaatagtattcctttgataaaaaatactgtcccttggtcttctctaagtttgaaacaccctgggagcttatttttagcaaagcaattccccatacccacccaaaaattatacatacaagtttaggtaaacagcagattaaacgtaaaaacttaaccttaacttctgaaagtcctttgaatttaatctttagttactgttttccatgttacatcctgcagctagacacacgtgaatagaaaaaacagtacagttagtgttaaaggcaaaacgcagagagccagggggccgcccggcactgcctgcgagttcattcatggttcctcgctccctccacctccactccacatggtgctttcagagccagccatcaaaaatgaagcgaagaattctctatgaacaaaccaaaagctgttaggcaaaaaataaaaataaaaaagtccccaaagtctctccagctgctttggggtttgggaggaccagagagggcgggcttgtccaggcccctgtgtcagtgtgtgctaggtcaggtgtcggctcccggtgggcaatggtctgcaggccaccggtctccacagacaacaccatgtcgtctccaggcccctgccctaccctgcctccacccaggcgcttgcgggttaaggtgggacatagggaggaggtgaccggtatggggtcatgttcttgggacgggagcccttgccctccatgggtgctgtgaagggcggtgggggctggtagggaggcgcattgggatcctcatcccgcaggggcgtgtactctcccatggtgtcctggttcagaggagtggtctcgggcacactctggttggggtactcaggagggggtaggggagccttctcctcctgcagaatgagtggcatgctggaggagggtgggggcttggagtcgtccagttcgtctgcaaagatgataggcacccccttcttgatgaaggtggcctggtcctcaagggtaagcttgcccttccgcttcttgcggtagcagatcatggcaatgatgccagcaatgagcaggatggctgcgaccaccacggccggaatgactgtgtgcaggtagacatcatcctcactgctcttctcagggtccctgtcaggcacttctgtgggcggcgcctctgagggcactctcctgggtggtaccacagggataaactgtaggtgccgacaactgccagagcccgtcacagtgatgcttgtggccttaaagtcaggctctagggcgttggagaaggcaggccgaggttttccatcatcctcagcgatccggcggctcagcccagcgatctgctccttggggcagggctccaagggcagtgtgttgttggtccattccaccacgatggagccccgggtgatattctgcagggtgatggtgctacagtttcggtctccaaaggcgaaggccagtttctttaccaaggcaatcttcttgtggatgtcattcaacaccagtgccgggtcacccacaaacttggccttgaaccttgcaggagccctatccccttgggggcgcctgtggacgtggatctcgaaggcatccacagccgacaggccccccttgtctgtggcatgcatgaaatactcgtgtttgcccacgtggctgctgtcgggaaggccatacatgagctggctgttgctgttgaactgtacccaggacttctcgcccaccagctgctgctcccgcagtttcagggtcagcttcagcttgtcagtggtggtgtcctcatggtcatagaaagtgtctgacgggatcttcacctcaaagtaggtgccaacccaggcatctaccctgtcaatatggttcttgagctctgggcgctggttgggttctccgccacggggcactccactggtggtggtgcgaatacgagtaggcggtgaggcagtttccaatctggtgatggaaactttggtggtgacccggggcactggccggggtgtccgtggtttcttggttggcctgcgagtcgtggtggtggtggagtcagttgaaggcgttgctggttttggtgtggatactcgtggcttcttggtggtggttgtgggaggggtagcaactgcagtaggctccacatagccaggaatggtcatcgttgggcgaatctggccaggaactgtggtgccagcttctgacacccgagtaggctggatggggcctagggttggggtttgaataatggcgcctcgagtccggatggtgaccgtgggtttcccaggaacaggatccctgactggaggagccatggtctctgttggaggagcaatggctggagatgtgggggttggcacgatcctggatgggggctcctggatagccgtggttgggggcccaatggcagtgacaggtgtgggtgtagcatggatctgcctccggacgcgtttgggaagagggggcttcttattggcgatgtgccaacccaccacagggtagccaagctgagcagacattgcgccctccctggcaggggcctctacaccatgaatgtcaggcacactgttctggttcagggagcagcccagcttccaggagagaagggccccattctccaccaccttttttgcatttcccgggccagccatgaaggccgacatgtcaaatagtctgttattcaccaccggcactaatttcatgttgtgaagctctacttctgagaagctccgcatcctgtgcaggaggtcaatcctttgctttggggtcatcttggtgaggtcggcatccaaaatcaccgtcaaaacagtcacaggttcatccgcagcacaggcagatgataccacctcaccagggtctggggaggctgtcctcaccgactgcagctcactgtggtcttcagggtagacctcgatggagaacacactggaggtctgggggatgtggctcccgttggcccccagccgtgtagcgctcactgaaatgtaatgcacacccttatcagtgtcaagggggaggccctccagggtgtggctctgtgagtcccagtgcagccaagatggcaaagcctccttccctgccgctgataccttgatgatatctccactggaggcaatcaaatctgttggaatggtcactcgaaatgagcgcccgacgacagccgtgccatcaggaatgccaaccactgtgggaacagcctcgtggaggtctgagagcactgagtgcatggatgcctcaagctggttttcccagtccctgacagcctctgagggttcactgggccagtgggactgagccataaccacagagagcaggaggagaaaggtcctcccccagaggggcagcagcagcgagaggcccacagacatcctcatcccaggtccaagtttgctcaagtcgatagtcttgctaagtaaggaagcaagtgacttggtcccagagctgggttctcaccctctgcacacctgctccatcccggagcacacagagcctttttgcaattatctatacttcagtgtctcggctccaaacctcattcacagagacaagaaaaggaaggggctaggtgctgtgctcccgcctgtagtcccagcactatgggaggccgaggcaggtggatggatagcttgagctcaggagttcaagaccagcctgggcaacgtgtcgaaaccccgcctctacaaaaaaagtaccaaaaaaaaaaaaaaaattttgaccagccgtggtggctcacgcctgtattcccagcactttgggaggccgagatgggcagatcacgaggtcaggagattgagaccatcctggctaagatggcgaaaccccgtctctactaaaaataaaaaaaatagccgggcgtggtggcgggcaccaccagcaacttgggaggctgaggcacgagaatggcatgaacttgggaggcagagtttgcagtgagccaaagtcgcgccactgcactccagcctgggcaacaagagtgaaactccatctcaagaagggcattcctgacttccgagggaacacctataaaacatcaggaagccattaggagattattattggctgtacagaaacctaaagaggtggcagtcttacactgccggggtcatcagaaaggaaaggaaagggaaatagaagggaactgccaagcagatattgaagccaaaagagccgcaaggcaggaccctccattagaaatgcttatagaaggacccctagtatggggtaatcccctctgggaaaccaagccccagtactcagaagaagaaatagaatggggaacctcatgaggacatagtttcctcccctcaggatggctagccaccgaagaaggaaaaatacttttgcctgcagctaaccaatggaaattatttaaaaaccttcaccaaacctttcacttaggcattgataacacccatcagatggccaaattattatttactggaccaggccttttcaaaactatcaagcagatagtcagggcctgtaaagtgtgccaaagaaataatcccctgcactgcaggccatacatttcaatccctgtatctttaacctccttgttaagtttgtctcttccagaatcaaagctgtaaaactacaaatcgttcttcaaatggagccccagatgcagtccatgacttaagatctaccatggacccctggaccagcctgctagcccatgctctgatgttaatgacatcgaagacacccctccagaggaaatctcaactgcacaacccctactatgccctgattcagcaggaagtagttagagtggttgtcggccaacctccccaacagcacttgagttttcctgttgggaggggggactgagagacaggactagctgggatttccctagggccgacttaagaatcaccactaagcctagctgggaaggtgaccgcgtcccacctttaaacacggggcttgcaacttagctcacacccgaccaatcaggtagcaaagagagctcgttaaaatgataattaggcaaaaacaggaggtaaagaaatagccaatcatcttatcacctgagagcacaatgggaaggacaatgatcgggatataaacccaggcattccagttggcaactgctaccctctttgggtcccctccctttgtatggaagctctgttttcactctattaaatcttgcttctgcagtcttctggtccatatttgttacggctccagctgagcttttgctcgccgtccacccctgttgtttgccgctgtcgcagacccgccgctgacttccatccctccggatccagcagggtgtctgctgtgctcctgatgcagcgaggcgcccatttccactcctgatcggactgaaggcttgccattgttcctgcacggctaagagcctgggttcgtcctaatcgagctgaacactagtcactgggttccacggttctcttccgtgacccacggcttctaatagagctataacactcaccgcatggcccaagattccattccttggaatccgtgaggccaagaaccccaggtcagagaacacgaggcttgccaccgtcttggaagtggcctgccaccatcttggaagcggcctgccaccatcttgggagctctgggagcaaggaccccctggtaacagtgaaattctgaagataaatgacatacaagtgccaaatttacagttccaaaatgaagagttctgcattcaaaaaaaggatgagaaaggatgttatttgagctagaccttcaagcacaacaggaattccgataagtacgaggcactggaaaattattatagtcaaggataatggcaaaagcagagaataaaggcaggaaggggcatgtagtgatcagaagccaaaacaaaaatcagtgggcagatacattctttagaacaactcattattatcgtcattatatacacaagaaaacagagttcatcagataggttcagcagattgttcaaggtcacatagcaaaagatggagactcttggattttatcccagccagaccaactctaaccaccatcctgtgcagcctgagaccaattgttaaagttacatgtattggtatgaccatttccacctgacagcaaatgcaagggaaccataaataccaca

SEQ ID NO: 9937 - DNA, 791 bp, Homo sapiens
tcgacccacgcgtccgggagacccccgcagccacggaagagggggcagcctccgagctgccgggttttgagtctgaagctggggccccgtcaatcggtctcctgggcggcaggagctgcgggcgcctcagactttttgggttccccttcctccttgctgggagacccccgcagccacggaagcgcctagatgcacacccaaggcccagggccccgcagcctctgcagaagagcccaagccggaggaggccccggcagctaattccgaccaaaccgtaaccgtgaaagagtgacaaggacagcctataggaaaaccaataccacttaaaacaatctcctctctctctctctctctctctctatctctctctctatctcctctctctctcctctgttcctatctctcctctctctctctcctatactaactggtgtcaaactggaagtaatgatatgtattgcccacggaggatttttgtggggaaatatctaatataccttcagtcaactttaccacgaggtcctgggttcccacgatccgcgtctgaaagtgcgcgacaccgtttgcccctgaaactgccgccacatgcactcctccaccgctgagagttgaatagcttttcttctgcaatgggagttgggagtgatgcgtttgattctgcccacagggcctgtgccaaggcaatcagatctttatgagagcagtattttctgtgttttctttttaatttaccttcagtcaactttaccaagaagtcctggatttccaagatccgcgtctgaaagtgcagt

SEQ ID NO: 9938 - DNA, 3110 bp, Homo sapiens
  misc_feature 3009, 3010, 3011, 3012, 3013, 3014, 3015, 3016, 3017, 3018,3019, 3020, 3021, 3022, 3023, 3024, 3025, 3026, 3027, 3028,3029, 3030, 3031, 3032, 3033, 3034, 3035, 3036, 3037, 3038,3039, 3040, 3041, 3042, 3043, 3044, 3045, 3046, 3047: n = A,T,C or G
  misc_feature 3048, 3049, 3050, 3051, 3052, 3053, 3106, 3107, 3108, 3109,3110: n = A,T,C or G
gggtggtggttgtcagccttgtggggtgagtggactgagaaggagaatgtgtgagacatcccacagtgtacttctagtgaaatataaaagtgttaagcagacttttaattgatagtcccattttttaattttttgaaataaaattaatgataagcatagattcagagtacatatacgggatatatacataccattttgtaaaagcagtaaatatcaatctaatttttttttttccagaaaccgagcatagttaccacgtggaagagacagtttcacaagactgtaatcaggatatggaagagatgatgtctgagcaggaaaatccagattccagtgaaccatgttgtagaagatgaaagattgcaccatgatacagatgatgtaacataccaagtctatgaggaacaagcagtatatgaacctctagaaaatgaagggatagaaatcacagaagtaactgctccccctgaggataatcctgtagaagattcacaggtaattgtagaagaagtaagcatttttcctgtgggaagaacagcaggaagtaccaccagggtcgattcgactgaccgatgatccagaactaaaagcaaaaggacttaaagagagatctacttcagagccagcagtcccgccagaagaggctgagccacacactgagcccgaggagcaggttcctgtggaggcagaaccccagaatatcgaagatgaagcaaaagaacaaattcagtcccttctccatgaaatggtacacgcagaacatgttgagggagaagacttgcaacaagaagatggacccacaggagaaccacaacaagaggatgatgagtttcttatggcgactgatgtagatgatagatttgagaccctggaacctgaagtatctcatgaagaaaccgagcatagttaccacgtggaagagacagtttcacaagactgtaatcaggatatggaagagatgatgtctgagcaggaaaatccagattccagtgaaccagtagtagaagatgaaagattgcaccatgatacagatgatgtaacataccaagtctatgaggaacaagcagtatatgaacctctagaaaatgaagggatagaaatcacagaagtaactgctccccctgaggataatcctgtagaagattcacaggtaattgtagaagaagtaagcatttttcctgtggaagaacagcaggaagtaccaccagatacttaaagcttcaaaaagactgcccctaccaccacaggaggaccagcctaaccatacgctccaaaagatggctgtgatagatcttgtgaagcaattactgagcagatcaagatctttgggaaggaacactaaagatgttttgaatgaattatagtccactggcattttagtgtatttttttttctttttagaaacacacatttctaaaaatgtcatgttacattcctgcatgtcccttttgatagcattagtggatccattggatttcttttttctttttgtgagacagcttttagtcttacctgaatttatgtgtgtttttccgacagtggttaataattatattggtgatgtagcagcaattgtgttggcagggttttcatatattattagtaattaacactaactgttggactgacttgtgtacactgtgttaaacatgatttaaaagctattaagagtactttgtgttagcactcttaaaaacgctaacagagatcatcattagctgtgaagatttgagttgtatatacctgcactgatattcttatcaaaaatttctacattagctttaagtgttcagattaacacttttgaaatttttgtagcttttagctgattaattagaaaaattaatatttcagtgaaagttttaaattatcatttatttatttttttaaatgagaggggaaagctgaaattccttgttaagacacaaggaaaaagaatggccctactattatcatgcaaaaatgctttgttggcacctcagattaatcatataatagctatagtctcttcagcatttgtttaaattttagaaaacctgtataaattactggtgcataacttaaagattattctgcctttggctaattgagtaattcccctccagcactagagaccgctcagtgctcttactagatgaactcagtaacgccttgagctgggttgattgaggatgtgtgaaaagctcacagagcccgatgcctgctgctatttcacggcaatgagcctttttctttctacactgaagattttcttcttatttaatgtggtttattttgggctcagaaataattgctctgttgaaaataatcctttgtcagaaaagaaggtagctaccacatcattttgaaaggaccatgagcaactataagcaaagccataagaagtggtttgatcgatatattaggggtagctcttgattttgttaacattaagataaggtgactttttccccctgcttttaggattaaaatcaaagatacttctatatttttatcactatagatcatagttattatacaatgtagtgagtcctgcatgggtactcgatgtgtaatgaaacctgaaataataagataataagaaaagcaataattttctaaagctgtgctgtcggtgatacagagatgatactcaaattataataaaactcttcattttgtgaattatagaagctactttttataaagccatatttttttagggaaactaaggagtgacatagaactgatgaatgagcaaaagtaagttttgctggatttttgtagaactctggacgttgaggattcattatgctgtggttaactttaaatatttttgaattccaaatatctgaattaatgagccttgtctttacaaatatgtgccattgtgcaacatcggtggattttctaaaaataatgtaaatgtcttctattaaatgttgagtgcaataaaatacagaagaattctctctaaaggcatagattaggagaaaaggtagataagtgtaaataaaacaaagcagtaannnnnnnnnnnnnnnnnnnnnnnnnnnnnnnnnnnnnnnnnnnnntttttgagaaaaaaaatgtaacccaaaacctcttaaacctaacccattaaacnnnnn

SEQ ID NO: 9939 - DNA, 3087 bp, Homo sapiens
  misc_feature 1, 2, 3047, 3082, 3083, 3084, 3085, 3086, 3087: n = A,T,C or G
nngccaggattttaccacctctcgcccatttatttacttctcggtcaccgctttcgggggacagataaacaccacagatgcccatcaaaggggcgcacgggtctggaggcgcagctcaggtttttgcgttggtcaccctgccctccgcacgtggagagggcaggcataaagcaccttgaaaggaaggtgctgtcaatgctatccgacgacctgtcgccgggcaccgcagcatcctcgctcgctccgatgggacgagggacgccggccccagggtaacaggaggcgcctcgccggccgcgcgctggatgctgtgatccaggaatcagtttagacttgaaattcagtttttcctgaaactgatcagaagttagtgacaccttgattggatccgtttttctgtcaggagctcattttgcagctctcaagcttttatagcatgctgtaaacaattgtcaaagttgtttatcaagaaacagatagagttgcaacttgtttctagtaatagaaacttttacactgcattcaatgcctaacgttgcagaaacagaaaggtcaaatgattctggaaatggtgagcacaaatctgagagaaagtcacctgaagagaatctacaaggtgctgtaaaatctttctgcacaagtgcctcaggagcacccttgggtcccaaaggagatggtcattatccatggagttgtccagtgactcatacacgggaaaaaatttatgccatctgttcggactatgcctttctcaaccaggcgacctcaatctataaaactccaaatccatcccgctctccttgcctccctgatagtacctctttatctgctggaaataattcatcaagatacattggtatcccgactagtacatcggaaattatctacaatgaagaaaatagcttggaaaacttatccaacagcctgggcaagctacctctcgcatgggaaattgataaatctgaatttgatggggtgaccacaaattcgaaacacaaatcaggcaatgcaaagaaacaagtttccaagagaaaaacttcagataaaaagggaagatatcagaaggaatgtcctcagcattctcctcttgaagatattaaacagcggaaagtattagacctcagacgatggtactgcataagccgaccacagtataagacttcttgtggcatctcttcattaatttcttgttggaatttcttatacagcacaatgggagctggaaaccttccacctattacccaagaagaagctttacatattctgggctttcaacctccatttgaagatattaggtttggtcctttcacggggaatacaacacttatgaggtggtttagacaaattaatgaccacttccatgtaaaaggatgctcttatgttctatataagcctcatgggaagaataaaacagcaggagaaactgcttcaggggccctgtcaaagttaacccgtggattgaaagatgaatcgctggcttatatctatcattgccaaaatcattatttttgtccaattggcttcgaagcaacccctgttaaagctaataaagcattcagcaggggacctctctcaccacaggaagttgaatattggatcttaattggagaatcaagtagaaaacatcctgccattcactgtaaaaaatgggcagatattgttactgatctaaacactcaaaatccagaatacctggatatccggcacttagagaggggactgcagtatagaaaaacaaagaaggttgggggaaatttgcattgcatcatagcattccagagacttaactggcaaagatttggcctttggaactttccatttggaaccattagacaagaatcacaacctccaacacatgcccagggaattgccaaatctgagagtgaagacaatatttccaagaagcagcatgggcgtctgggccggtctttcagtgctagtttccatcaggactcggcatggaaaaagatgtctagtatccatgagagaaggaacagtggttaccagggttacagtgattacgatgggaatgattgactatgcttgctactgaacagctggcattatatatgaaactgctatatacaggactgtataaagacagtagaagattttagtaagcctacattaaataggagcagatcttgtggtataaaaaataaccttgtagttctccagatactaagcttgtatatgattatggtgggtgatttcagatatataagcagataagcacagattattgtcctttcaagttaagagtatataatctggacagaaaatttcacaaaattcaataaaattacaactgttgtctaaataagtgaaacacaaattcacttaatagcatcaagatttgaaatacttaagcatgaagtgacttttataatgactcgatccctagacatttgttacagatagttttatgcctaagaccaagatgtaaagtaccatctgcccttaaaaaaaaattggggctgtcaatttctagttttcactcatggttaacacgcatttaaaattatttcatgagtctagtagttctttgatttatagcaggatcttgcttgcctcatttgtttcctggttatgttcttaggattctgactaagaggcaaaagagaaaagactcaagaaactgatcctggagatcgagaccatcctggctaacatggtgaaaccccgtctctactaaacatacaaaaaattagccgggtgtagtggtgggcacctgtagtcctagctactcgagaggctgaggcaggagaatggcgtgaacccgggaggtggagcttgcagtgagcggagatcgcgccactgcactccagcctgggcaacagggcaagactctgtccaaaacaacagacaaaggggtccttgtcggggaaggctgagcaagcataaacaatgacaaatctctgtcggccacaaccatgaagacacaaccgcgactaacgcaaaccgcgcaggcaaaacaaaggctaatctacagacgaaagacccgagaggtcacacatcaacaacccacacacgacaaagcagcggcnaaaagcgcaccagtccccacatctctcacactacnnnnnn

SEQ ID NO: 9940 - DNA, 1601 bp, Homo sapiens
caggtggatcacctgaggtcagagttcgagaccagcctggccaacatgatgaaaccccgtctctactaaaaatacaaaaattagccgggcgtggtggcacgcgcctgtaatcccagttactagggaggctgagacaggagaattgcttgaacccaggaggtggaggttgcagtgagccccagcctgggtgacaatagcgaaactctgtctcaaaaaaaaaaaaaaaaaaaaaaaacctcgtgccgaattcggcacgaggactttggaagtccgtagtgtctcattgcagataatttttagcttagggcctggtggctaggtcggttctctcctttccagtcggagacctctgccgcaaacatgctccgccagatcatcggtcaggccaagaagcatccgagcttgatccccctctttgtatttattggaactggagctactggagcaacactgtatctcttgcgtctggcattgttcaatccagatgtttgttgggacagaaataacccagagccctggaacaaactgggtcccaatgatcaatacaagttctactcagtgaatgtggattacagcaagctgaagaaggaacgtccagatttctaaatgaaatgtttcactataacgctgctttagaatgaaggtcttccagaagccacatccgcacaattttccacttaaccaggaaatatttctcctctaaatgcatgaaatcatgttggagatctctattgtaatctctattggagattacaatgattaaatcaataaataactgaagcaaaaaagagaaagacacggccgaccgcagcaggcaaggaggcatagaaaacgcggcaggacaaaacacacgagagggagcacaacttcgaatcaagccaccggagcacacacaccacgagcagcacacggacccccaagaatgaaaggacaaaaaacacaaagaagaaaggccgaacaaaacgcccgcaacatgacgcaacgcaacgggctccccgctccccacctcaaaaaacgagaacaacgaaataacgcacacgagaaaagaggagaaacgacagacatatcgaggatcgacgaggccaaaacaaaacccagctgtccgccctgctgactacaacaaacaaacagacaaaaaaaaaaaaacaagaacaacaaaaaaaaaccacaaaagcaaaaacaaccgaacaaaagaaagaaaacaggcgaaaacagcagggaaaacaaggggacagaaggagaagagggacgcagaggcacgacggaaggagagcggaagggggcagggggagaggggggacacaggaagacggaggggggaggaggagagagaggcaagcgaaagaaaaaaggaggagaggggagggcggacggcaggcgggagagagcaggggcatacgagagaggacgggcaggaagcaacggaaggggcaggaggcggaggagagaggaagagaaaggggacgaaaggaagaagaaagcacaggaccaggagcgagacggacaggcacagaaggggaggagggaaaagagaagcaaggaggacgagaaagcgagacgcagagcacgaccgcgaggaggcgagaagaacggggagagcc

SEQ ID NO: 9941 - DNA, 375 bp, Homo sapiens
  misc_feature 1, 2, 3, 373, 374, 375: n = A,T,C or G
nnngaggatacaggagagaatctagcgtatagtctttgatctcaacgaatccgcattgtagaaagtagaaaatgtcagagatgtacacattaattagatcatgcccttccactacctaaaatactgcagtggctccaccttacgcatataaaaactccacattccagcccacgccttcacggattgctgcgatcaggcccccagcacttgaccctcaccacacaccatcacctcacctattatattacattccaccagcccttctgggcttaaacacatgatcccagcacaccttacgtcccttacagccagcggtccttgggctgtgacacacttttctgagacttccaccccacctggagtgactctctannn

SEQ ID NO: 9942 - DNA, 1466 bp, Homo sapiens
  misc_feature 1, 2, 3, 4, 5, 6, 7, 8, 9, 10, 11, 12, 13, 14, 15, 16, 17,18, 19, 20, 21, 22, 23, 24, 25, 26, 27, 28, 29, 30, 31,32, 33, 34, 35, 36, 37, 38, 39: n = A,T,C or G
nnnnnnnnnnnnnnnnnnnnnnnnnnnnnnnnnnnnnnnactgtggcattgtttttaatagcaaaaaaattgggaacaacaaattaattaggaaatggttcaataaaactattatgttccatattatggaataatatgtagcagttaaaaagaggtaggtgtacatatatactaatatggaaaaattaccaagatacactcagtgaaaaaaggccaacttacagaataatacataatgtacaatctcattttcataaaaacaaaagaaaatcattatggacatgtgtgtgtaaaaatgctttttggaaggactagaaactagatcaaccagctaaacagaagttccttctgtagcatggcagcgggtttccattttttattagtttcctagttttttaaatataaaaagaatgtttttacaaagaaaatagttgtttattatgcctacaaaaattaatatttatatttattgtgtatatatataaaaccttacaaacacttaaagtttatacatatacacactagatatggcctgtgaattgtacatcaaccataagaaaatcatttaaacagtgtttatctaaatggtgtgagcattaagtgttatgatgtgtgaatctgaaaatatagtttcatttggatgtacaacagcatggaggcacagtctaagaatcaattttagaaaagactattccgattagcaaatttagtaaaagtttcattatggaaattcccagaggcaagctctggcatttaatgattagaaaagtaacaagaaagtattgcctacaaagtgaatcaatagaaaagtaaatttcacggtctaatataaaataacctttatgttaagcaaaaaatatagttagaggaggtatattatataagtgttttcaatgtgtacagtataagactatatggtgtgatgattaagaaacaaacagataaatacaagtggagaattcctttgcctcttaaaattcagaatgaatcatagtaagatacataaacaattttacaaaatttagcaagactgtttccttttgttgccctctgcaaccattactatatcaaactgaagcaaatgatcaagtcaatggataaaggccagtcaaatctaagtgtgtttcactaagtacataaaacgatggcttcaatgaattgcacaagaattccaggtgtccactgcagtttccaggttcagtcctataacccactttactgaagtttcccttatggtggtggctctaatgggaaaggcctgtcagtcaacagaacaattaacttgagcagaaacaaattaaaacatgagttatattaagaattaacaccgaagttcactgaaggtaaaggatgtgatttttctatcaccaccagtagggtctattcctgaatcacttgatgtttttcttctatgatgatgggaaggtccaaaatgattctctctgctgcacaccgtacatgcggac

SEQ ID NO: 9943 - DNA, 572 bp, Homo sapiens
gagtcgacccacgcgtccggacggctcctccccgctgcatgtcgccgccctgcacggccgggcggacctcatccgcctcctgctgaagcacggggccaacgcaggtgccaggaacgcagaccaagccgtcccgctccacctggcctgccagcagggccactttcaggtggtgaagtgtctgttagattcgaatgcaaaacccaataagaaggacctcagtggaaacacgcccctcatttacgcctgctccggtggccatcacgagcttgtggcactgctgctacagcacggggcctccattaacgcttctaacaataagggcaacacagcgctgcacgaggctgtgattgaaaagcacgtcttcgtggtagagctgcttctgctccacggagcgtcagttcaggtgctgaacaagcggcagcgcacggctgtagactgtgctgaacagaattcaaaaataatggaattgcttcaggtggtacctcggccgaggtctcctccttatgactccattcaaatctacggttatgaaagcaggggctcagtggccgggtccctgagctccctagagt

SEQ ID NO: 9944 - DNA, 481 bp, Homo sapiens
  misc_feature 481: n = A,T,C or G
actaaaaacacaaaagcacttatcagacaccctatggcatttgttgctgaaatgtctaccggctggagattagccttgagccgaagcagcctcagagccaacactggcttcctcctgtaaatcatctccagcagaggactctgactcagccggagaattttcttcttctagttcagcatattcatcagaggtttcgttctttgttgtatctttatcattatcgatggtgacagcttcatccagggcagcatttgtaacctctggggttgtttcagggtttactttccgtggtttccctcgccgctgcatctgtgacctctggcccggtttcagcactgactggctgtggtctccggagcagcctcccacgtgacctggacaggcagatgcctcttttatgaccacaactgtagtacctgcccgggcggccgcttagactagggggatcccccgggctgcggaattcgatacaagcttatcn

SEQ ID NO: 9945 - DNA, 3215 bp, Homo sapiens
cccacgcgtccgcggacgcgtggggttctgaaacagtttctttctgaaacagagaaaatgtcccctgaagacagagcaaaatgctttgaaaagaatgaggccatacaggcagcccatgatgccgtggcacaggaaggccaatgtcgggtagatgacaaggtgaatttccattttattctgtttaacaacgtggatggccacctctatgaacttgatggacgaatgccttttccggtgaaccatggcgccagttcagaggacaccctgctgaaggacgctgccaaggtctgcagagaattcaccgagcgtgagcaaggagaagtccgcttctctgccgtggctctctgcaaggcagcctaatgctctgtgggagggactttgctgatttcccctcttcccttcaacatgaaaatatatacccccccatgcagtctaaaatgcttcagtacttgtgaaacacagctgttcttctgttctgcagacacgccttcccctcagccacacccaggcacttaagcacaagcagagtgcacagctgtccactgggccattgtggtgtgagcttcagatggtgaagcattctccccagtgtatgtcttgtatccgatatctaacgctttaaatggctactttggtttctgtctgtaagttaagaccttggatgtggtttaattgtttgtcctcaaaaggaataaaacttttctgctgataaaaaaaaaaaaaaaaaaaaaaacaactcgagtttttttttttttttttttattaaagtaaaagtatctttactattaatatacaaatggtgaagtgtgacaagtttgatatactgtaagccatactttcaatgtctctcataaatacaaaacttcaacatttgcagtataatttttacagtttagacatatatatacagcatttcattgggacataccatattgaaacaataagaaaacgttgtgggtagctaacttaagaatatagaatttgaatggaatatataaattaaagaaaataaaagatagtatgtttcagtacatactgagcacagcatacagttcacataccaaaaaagctttttttaaaaaaaacctttatttctaacttcacatatttctaacagggtttagaggcaaatgctaaaccatgaatatttctttaagagttggaacaagtaggtttgttcttaatagtatcatttcttttatagtatgcatgttgttctctaaaaaaactatttgcaaaattaaatcatagattctatctctgttaactttctcctctgtgttacactgttttctccttcgcatcagtgtaatcggccataatttttatctaagcaacgttcctagtccctggtctagcacttctcaaagtcaggtccttcttagctattccaaatatagcaattcagtttgcctttctagatccactcatttctttgtttctctactctcctatgtcgggttgtgatttgaaattctccaacagtgatggttttgcttactgtcttccatgggaggctaaaaacagatgccaaaagattcatgttttcatttcagaaaagaaaaaaaataagtagcaatatttaaatttacatgagcaataattctgaatgttgtgtggccagaatctcaaaaattgtataaaatgaaaatttaaagaggtaataacaaataatatatttatgttatagataaaatcctaaagtaataaactatttttctaagaatattgtgttatcaaataaatatttagcattatatataatataaaattctttgcctttatatgagaagatataattaatctattcgcattcttgtataattgtaaatagctgcatctacatgggtaaattcaatttttcaaaaaggaaggatgggagctggaagaaaattatgtttgttcagcaactactatatgtgggtctttttataaatttctcatttggacataaaattgtttcatcttaagacattattaagtccatgaataaaatactttcttgaaaattttaccttctaagatgaagtatttcatttctgcgacatccataatttaattttagccctatgttgatacatccatatgcaatttcaatgtgagtgactaagtattaatgcttcaaagggtaaataaacagatgcaaatattttctctctaaagataaataaataatgctaacaaacttattgttaaaaatatatccagatacaaagtttgttgaataagcacattatgtgataatgattatgagtatgagcatgaaaaaacttcatgggggatttaagttgaatgtttaccttattttctgtgaaaaacaacattgggaacctcataaataattataatatgctattccaatatttcctaaattaactaatggaaaatattatttctacttcttgaactgtacatattttcgtcagtgataatcttattgccaaaaataaaggttgatttattattcgaaataaaaaatatatataaatggaataatgaagacccaagaaacaccatagtaatttgcttgattttcaaaagttatctgttgtctttgtcttacaactggcaaaatttaatttcaacaatatctagaatgtatttattgtttagaaaaacaatacagaacagattaagaatatttcatgtgtgtgtataaaaagaattgttttgacatgaattaaagtaaattatacagtatagtttattatatttagattttatattcaaggtaaaatagtttgaattgaacttaattactgactgtaaataagacagcatcatttgagtatctcaaatctaagcaaaatatactagtaatgatgttaattgtagtttttttcttttaataaagcagactgtcatgctaattaaaaggcacagatacatcttaattatttaaaataagaagcataaacaaagatatgatcataaagttacaattaattgttggcacacaaataaataatttgattaataaaatctatttatataaatatttaattcaaagactaagatccatatgaagtgtgctggatcaaatagcctttgaaaaatgcttttatagttattaatattaaaaataaaagaaaacaagaaacattaatgttagacattagtatcaatagaatggcaatgtcttagcccacaaaaataataaataaatcgttaaaaatacaattcttaaattcccggacgcgtgggtcgactccgta

SEQ ID NO: 9946 - DNA, 3952 bp, Homo sapiens
  misc_feature 1, 2, 3, 4, 5, 6, 7, 8, 9, 17, 47, 54, 60, 81, 87, 116, 153,164, 3951, 3952: n = A,T,C or G
nnnnnnnnnccaggaanagatccagctgcaggttagggcctttgaanaatctgnaaatgntctcccaaaagttgatcccanaccatncatccacgaagaacttgggcttccatctnctctcaagagcttgcaaccccaagaacaaagctgaanatgcctcagtnaactttggatgctgatcctactcaaatgggaggcctgagtatgctgctgttagctggagaacatgctcttggcacaccagaggtatcctctggcacatgcaggcctgatgtttcagaatctcctgaattacgtcagaagtcaccattgtttcagtttgccgagatatcttcaagtacgtcccactctgatgcttctacaaagcagtgtcaaacatctgccttgtttcagtttgcagagatttcttcaaacacttcgcagttgggtggtgctgagcctgtaaaacgctgtggaaagtctgcactctttcaactggcagagatgtgcctggcatcagaagggatgaaaatggaagaatcaaagctaataaaagcaaaagaatccgatggtggaagaattaaagaattagagaagggaaaggaagaaaaagaaattaaaatggagaaaacagatgaaactaggttacagaaggaagcagaatttgaaaaatcggctaaggaaaatttaagagattctaaggaattgagaaattttgaggcattgcaaatagatgacataatggctataaaaatggaagatcccaaagaaattagaaaggaagagttagaagaagatcacaaatgtagtcattttcctgatttttcttattctgccagtagcaagataataattagtgatgttcccagtagaaaggatcatatgtgccatcctcatggaattatgatcattgaggatcccgcagcattaaacaagccagaaaagctaaaaaagaaaaagaagaaaagcaaaatggatcgacatggaaatgataaatccacacccaagaagacttgcaaaaagaggcagtcttcggaatctgacattgagagcgtcatatataccattgaagccgtcgcaaaaggagactggggcatagagaaacttggagatacccctcgcaagaaggtccgcacatcctcaagtggcaagggaagcattttggatgccaagccaccaaagaaaaaagtgaaatcaagagagaagaaaatgtcaaaggagaaatcctcagacaccaccaaagagtcaagacctccagatttcattagtatttctgctagcaagaacatttctggtgagacaccagagggtataaaagcagaaccattgacccctatggaagatgcactaccacccagcctatcaggacaggccaagcctgaggacagtgactgtcacagaaaaatagaaacttgtggttccaggaaatccgagaggtcttgcaaaggtgctctttataaaaccctggtgtctgagggcatgctcacctctctgcgagctaatgttgacagaggaaaacgaagctcaggaaaaggaaactcctctgatcatgaagggtgtggaatgaagaaagctggacatttagtcagagtgggaccagtgggagcaagaagttcaagaagacaaagccaaaagaagactgtctccttggctccgcaaagctggatgaagaatttgaaaaaaaattcaacagcctccctcaatatagtcctgttacatttgaccggaaatgtgtacctgtcccaagaaaaaagaagaagactggaaatgtgtcctcagaaccgactaaaaccagcaaaggaagtggggataaatggtcaaacaagcaactcttcttggatgccattcaccctacagaagccatattttcagaagacagaaacaccatggagcctgttcataaggttaaaaatatcccatccattttcaacactccagagccaacaacaacgcaagaacctttggtgggcagccaaaagagaaaagcaaggaaaaccaagattacacaccttgtcaggacagcagatggccgggtatcaccagcaggaggtactttggatgacaaaccaaaggaacaactgcagaggagtctccctaaagcaactgagacagactgcaatgacaaatgctcacacaacaccgaggtcggggagacgcggagcagtactccagaaatgcctgccgtgtctgcgttctttagcctcgctgcgctggctgaagtggcagccatggaaaatgtgcacagaggtcagaggtcaactccgctcacccatgatggacagccaaaagaaatgccgcaggctcctgtacttatttcctgcgctgaccagtgaagcgccctttcattgtaaaacattgtgctttacctactaccctagccttgtctttaccgagggatgctagtgagtccaagtggtggaaaatatagactgcaaacaagtgcttgttgccccacacggcccagattcacttgaagcagaagttagcatcctgggccagtttgttctctcagaacccagaatctttgagggtaaggttatctgtctgatactgagcagaaacagaatgatcctggagctttgctttctattgaaggcttttgacggtaataggtggtaacttggtaaaaggctgcctttactgtagctcacccagcatctcttttaccaaccagagagtgtgaaactagtttcatatattacctagttattctttccaaacaacagaaaaacaaatggggccggccctttaaaaacaccaccttattagatattcttagtcttttttgtacatggagatttaagtttaagatggtttatataataggttatacctacatttatattgtagaataaatattaaaaagcctgttccagagactcccaagcagcctgggcaggcagatgtaccattgttagtggtgtatgctcggcctcgtggtccatatattctgcacttttatatttgccaccagaatggtagtttgctggcaaaaaaaaaaaaaagagagagagaaaaaattacaactcttacaatctgaatttttttcttagccttgagtgaccaagaagaatttgcttgaggcaaattgtggcaaatattttcccagacaggggaagagtcctgcagattacagattactggtgttttcatgccttgaggattcttttatttttacataggggtctaagtgaccaatggattgttcatacaaacaaaaaaaaagacaaaaatattattcagaagtgaccttagtattacttcactattctaaacacattgaagacactcacttcatgtggacttggagctacagaccttttacatccatcacagattggctggacgggttgcaattgctatgcacagcctgattggcactgcaggtttttagagccattttgagtttgtgttgtttaggaggtactgagtcaatgatgagggaggtatgcctgaccagagtgggactctcagtcatagatccacctgcaagtctctgtttcctttttgtgttttgttgcttttgaacataaaaccaaccatacataagcagcgccaagtggattaactggcttagaacattcaacatattgacttaaccacctgacattcacagtgtcttgtttcctagcaacagatgcaaagtgataaatcaaaattagtctgaggctacagattttacagggtatttgttctatagcacaaagtatttccccactcttgcgtcacagcacaaactaccaaattttaattattggatcccagcacatattttaaggtttccactgcggcatctgacagctaattcaatttgagccttgaataaattctaaggggaacgcactggcacagcgccttttactggccgaaggagagcccacaagtggggagcacccaaagaactccacaggcgggagataacggggaataacacgaaaaaagttcttccagagacactaactccgggaagann

SEQ ID NO: 9947 - DNA, 1701 bp, Homo sapiens
  misc_feature 1, 2, 10, 1688, 1689, 1690, 1691, 1692, 1693, 1694, 1695,1696, 1697, 1698, 1699, 1700, 1701: n = A,T,C or G
nncgtccggnatgagaacgcagacaagttacttaagagtgaaaagcaaatgaagaaagtctgagaaaaagagcaagcaagagaaagagaagagcaagaagaaaaaaggaggtaaaacagaacaggatggctatcagaaacccaccaacaaacacttcacgcagagtcccaagaagtcagtggccgacctgctggggtcctttgaaggcaaacgaagactccttctgatcactgctcccaaggctgagaacaatatgtatgtgcaacaacgtgatgaatatctggaaagtttctgcaagatggctaccaggaaaatctctgtgatcaccatcttcggccctgtcaacaacagcaccatgaaaatcgaccactttcagctagataatgagaagcccatgcgagtggtggatgatgaagacttggtagaccagcgtctcatcagcgagctgaggaaagagtacggaatgacctacaatgacttcttcatggtgctaacagatgtggatctgagagtcaagcaatactatgaggtaccaataacaatgaagtctgtgtttgatctgatcgatactttccagtcccgaatcaaagatatggagaagcagaagaaggagggcattgtttgcaaagaggacaaaaagcagtccctggagaacttcctatccaggttccggtggaggaggaggttgctggtgatctctgctcctaacgatgaagactgggcctattcacagcagctctctgccctcagtggtcaggcgtgcaattttggtctgcgccacataaccattctgaagcttttaggcgttggagaggaagttgggggagtgttagaactgttcccaattaatgggagctctgttgttgagcgagaagacgtaccagcccatttggtgaaagacattcgtaactattttcaagtgagcccggagtacttctccatgcttctagtcggaaaagacggaaatgtcaaatcctggtatccttccccaatgtggtccatggtgattgtgtacgatttaattgattcgatgcaacttcggagacaggaaatggcgattcagcagtcactggggatgcgctgcccagaagatgagtatgcaggctatggttaccatagttaccaccaaggataccaggatggttaccaggatgactaccgtcatcatgagagttatcaccatggatacccttactgagcagaaatatgtaaccttagactcagccagtttcctctgcagctgctaaaactacatgtggccagctccattcttccacactgcgtactacatttcctgcctttttctttcagtgtttttctaagactaaataaatagcaaactttcacctattcatgagttattattgaaacctcaaatcataaagacatttaaaagaatcgtttttctaactggaggggctctagtgctaaataatagtactgaaaattgatattattttcgctttgtcttatatggaaggacccttatttggcatatacacattttattaaaataaaaaaaaaaaaaaagagaaaaaagaggacagagaagagaggcaaaaagaggagaacgaggcgaaggggaagcaaaggaaaagaaaaaaaaagaggggggggggcaaaaaaaaacgcgggggcgcgaaagagaggcaccgtttttgagaagggcgccaaggggaggaaaaaannnnnnnnnnnnnn

SEQ ID NO: 9948 - DNA, 1750 bp, Homo sapiens
  misc_feature 1, 1739, 1740, 1741, 1742, 1743, 1744, 1745, 1746, 1747,1748, 1749, 1750: n = A,T,C or G
ncccacgcgtccgctgcggcccaggcccatgatcaccctcctctcagcccacggacaggaagtcgctccccagctgccccgccccgctccccagcgccccggaagtgatctgtggcggctgctgcagagccgccaggaggagggtggatctccccagagcaaagcgtcggagtcctcctcctccttctcctcctcctcctcctcctcctccagccgcccaggctcccccgccacccgtcagactcctccttcgaccgctcccggcgcggggccttccaggcgacaaggaccgagtaccctccggccggagccacgcagccgcggcttccggagccctcggggcggcggactggctcgcggtgcagattcttcttaatcctttggtgaaaactgagacacaaaatggctgcaaataagcccaagggtcagaattctttggctttacacaaagtcatcatggtgggcagtggtggcgtgggcaagtcagctctgactctacagttcatgtacgatgagtttgtggaggactatgagcctaccaaagcagacagctatcggaagaaggtagtgctagatggggaggaagtccagatcgatatcttagatacagctgggcaggaggactacgctgcaattagagacaactacttccgaagtggggaggggttcctctgtgttttctctattacagaaatggaatcctttgcagctacagctgacttcagggagcagattttaagagtaaaagaagatgagaatgttccatttctactggttggtaacaaatcagatttagaagataaaagacaggtttctgtagaagaggcaaaaaacagagctgagcagtggaatgttaactacgtggaaacatctgctaaaacacgagctaatgttgacaaggtattttttgatttaatgagagaaattcgagcgagaaagatggaagacagcaaagaaaagaatggaaaaaagaagaggaaaagtttagccaagagaatcagagaaagatgctgcattttataatcaaagcccaaactcctttcttatcttgaccatactaataaatataatttataagcattgccattgaaggcttaattgactgaaattactttaacattttggaaattgttgtatatcactaaaagcatgaattggaactgcaatgaaagtcaaatttactttaaaaagaaattaatatggcttcaccaagaagcaaagttcaacttatttcataattgcctacatttatcatggtcctgaatgtagcgtgtaagcttgtgtttcttgggcagtctttcttgaaattgaagaggtgaaatgggggtggggagtgggaggaaaggtgacttcctctggtgtttattataaagcttaaattttatatcattttaaaatgtcttggtcttctactgccttgaaaaatgacaattgtgaacatgatagttaactaccactttttttaaccattattatgcaaaatttagaagaaaagtgatggcatggttgtggcatatagttaaactgagagtaattcatctgtggaatctgcttttaattaactggtgaataattagaaaagtggtgtaaggttgtcatggatttggatatgcttaatctggaatggaaaatatcggtgatatcaacccgggggggcttggacccaggggcgtgccagtgtcgtggaaatttcgcggcattggtgaattgtgagacgggaaatggaataaaggcttggnnnnnnnnnnnn

SEQ ID NO: 9949 - DNA, 8664 bp, Homo sapiens
ccacgcgtccggttttatgacgggcccggtgctgaagggcagggaacaacttgatggtgctactttgaactgcttttcttttctcctttttgcacaaagaagtctcatgtctgatatttagacatgatgagctttgtgcaaaaggggagctggctacttctcgctctgcttcatcccactattattttggcacaacaggaagctgttgaaggaggatgttcccatcttggtcagtcctatgcggatagagatgtctggaagccagaaccatgccaaatatgtgtctgtgactcaggatccgttctctgcgatgacataatatgtgacgatcaagaattagactgccccaacccagaaattccatttggagaatgttgtgcagtttgcccacagcctccaactgctcctactcgccctcctaatggtcaaggacctcaaggccccaagggagatccaggccctcctggtattcctgggagaaatggtgaccctggtattccaggacaaccagggtcccctggttctcctggcccccctggaatctgtgaatcatgccctactggtcctcagaactattctccccagtatgattcatatgatgtcaagtctggagtagcagtaggaggactcgcaggctatcctggaccagctggccccccaggccctcccggtccccctggtacatctggtcatcctggttcccctggatctccaggataccaaggaccccctggtgaacctgggcaagctggtccttcaggccctccaggacctcctggtgctataggtccatctggtcctgctggaaaagatggagaatcaggtagacccggacgacctggagagcgaggattgcctggacctccaggtatcaaaggtccagctgggatacctggattccctggtatgaaaggacacagaggcttcgatggacgaaatggagaaaagggtgaaacaggtgctcctggattaaagggtgaaaatggtcttccaggcgaaaatggagctcctggacccatgggtccaagaggggctcctggtgagcgaggacggccaggacttcctggggctgcaggtgctcggggtaatgacggtgctcgaggcagtgatggtcaaccaggccctcctggtcctcctggaactgccggattccctggatcccctggtgctaagggtgaagttggacctgcagggtctcctggttcaaatggtgcccctggacaaagaggagaacctggacctcagggacacgctggtgctcaaggtcctcctggccctcctgggattaatggtagtcctggtggtaaaggcgaaatgggtcccgctggcattcctggagctcctggactgatgggagcccggggtcctccaggaccagctggtgctaatggtgctcctggactgcgaggtggtgcaggtgagcctggtaagaatggtgccaaaggagagcccggaccacgtggtgaacgcggtgaggctggtattccaggtgttccaggagctaaaggcgaagatggcaaggatggatcacctggagaacctggtgcaaatgggcttccaggagctgcaggagaaaggggtgcccctgggttccgaggacctgctggaccaaatggcatcccaggagaaaagggtcctgctggagagcgtggtgctccaggccctgcagggcccagaggagctgctggagaacctggcagagatggcgtccctggaggtccaggaatgaggggcatgcccggaagtccaggaggaccaggaagtgatgggaaaccagggcctcccggaagtcaaggagaaagtggtcgaccaggtcctcctgggccatctggtccccgaggtcagcctggtgtcatgggcttccccggtcctaaaggaaatgatggtgctcctggtaagaatggagaacgaggtggccctggaggacctggccctcagggtcctcctggaaagaatggtgaaactggacctcaaggacccccagggcctactgggcctggtggtgacaaaggagacacaggaccccctggtccacaaggattacaaggcttgcctggtacaggtggtcctccaggagaaaatggaaaacctggggaaccaggtccaaagggtgatgccggtgcacctggagctccaggaggcaagggtgatgctggtgcccctggtgaacgtggacctcctggattggcaggggccccaggacttagaggtggagctggtccccctggtcccgaaggaggaaagggtgctgctggtcctcctgggccacctggtgctgctggtactcctggtctgcaaggaatgcctggagaaagaggaggtcttggaagtcctggtccaaagggtgacaagggtgaaccaggcggcccaggtgctgatggtgtcccagggaaagatggcccaaggggtcctactggtcctattggtcctcctggcccagctggccagcctggagataagggtgaaggtggtgcccccggacttccaggtatagctggacctcgtggtagccctggtgagagaggtgaaactggccctccaggacctgctggtttccctggtgctcctggacagaatggtgaacctggtggtaaaggagaaagaggggctccgggtgagaaaggtgaaggaggccctcctggagttgcaggaccccctggaggttctggacctgctggtcctcctggtccccaaggtgtcaaaggtgaacgtggcagtcctggtggacctggtgctgctggcttccctggtgctcgtggtcttcctggtcctcctggtagtaatggtaacccaggacccccaggtcccagcggttctccaggcaaggatgggcccccaggtcctgcgggtaacactggtgctcctggcagccctggagtgtctggaccaaaaggtgatgctggccaaccaggagagaagggatcgcctggtgcccagggcccaccaggagctccaggcccacttgggattgctgggatcactggagcacggggtcttgcaggaccaccaggcatgccaggtcctaggggaagccctggccctcagggtgtcaagggtgaaagtgggaaaccaggagctaacggtctcagtggagaacgtggtccccctggaccccagggtcttcctggtctggctggtacagctggtgaacctggaagagatggaaaccctggatcagatggtcttccaggccgagatggatctcctggtggcaagggtgatcgtggtgaaaatggctctcctggtgcccctggcgctcctggtcatccaggcccacctggtcctgtcggtccagctggaaagagtggtgacagaggagaaagtggccctgctggccctgctggtgctcccggtcctgctggttcccgaggtgctcctggtcctcaaggcccacgtggtgacaaaggtgaaacaggtgaacgtggagctgctggcatcaaaggacatcgaggattccctggtaatccagggtgccccaggttctccagggccctgctggtcagcagggtgcaatcggcagtccaggacctgcaggccccagaggacctgttggacccagtggacctcctggcaaagatggaaccagtggacatccaggtcccattggaccaccagggcctcgaggtaacagaggtgaaagaggatctgagggctccccaggccacccagggcaaccaggccctcctggacctcctggtgcccctggtccttgctgtggtggtgttggagccgctgccattgctgggattggaggtgaaaaagctggcggttttgccccgtattatggagatgaaccaatggatttcaaaatcaacaccgatgagattatgacttcactcaagtctgttaatggacaaatagaaagcctcattagtcctgatggttctcgtaaaaaccccgctagaaactgcagagacctgaaattctgccatcctgaactcaagagtggagaatactgggttgaccctaaccaaggatgcaaattggatgctatcaaggtattctgtaatatggaaactggggaaacatgcataagtgccaatcctttgaatgttccacggaaacactggtggacagattctagtgctgagaagaaacacgtttggtttggagagtccatggatggtggttttcagtttagctacggcaatcctgaacttcctgaagatgtccttgatgtgcagctggcattccttcgacttctctccagccgagcttcccagaacatcacatatcactgcaaaaatagcattgcatacatggatcaggccagtggaaatgtaaagaaggccctgaagctgatggggtcaaatgaaggtgaattcaaggctgaaggaaatagcaaattcacctacacagttctggaggatggttgcacgaaacacactggggaatggagcaaaacagtctttgaatatcgaacacgcaaggctgtgagactacctattgtagatattgcaccctatgacattggtggtcctgatcaagaatttggtgtggacgttggccctgtttgctttttataaaccaaactctatctgaaatcccaacaaaaaaaatttaactccatatgtgttcctcttgttctaatcttgtcaaccagtgcaagtgaccgacaaaattccagttatttatttccaaaatgtttggaaacagtataatttgacaaagaaaaatgatacttctctttttttgctgttccaccaaatacaattcaaatgctttttgttttatttttttaccaattccaatttcaaaatgtctcaatggtgctataataaataaacttcaacactctttatgataacaacactgtgttatattctttgaatcctagcccatctgcagagcaatgactgtgctcaccagtaaaagataacctttctttctgaaatagtcaaatacgaaattagaaaagccctccctattttaactacctcaactggtcagaaacacagattgtattctatgagtcccagaagatgaaaaaaattttatacgttgataaaacttataaatttcattgattaatctcctggaagattggtttaaaaagaaaagtgtaatgcaagaatttaaagaaatatttttaaagccacaattattttaatattggatatcaactgcttgtaaaggtgctcctcttttttcttgtcattgctggtcaagattactaatatttgggaaggctttaaagacgcatgttatggtgctaatgtactttcacttttaaactctagatcagaattgttgacttgcattcagaacataaatgcacaaaatctgtacatgtctcccatcagaaagattcattggcatgccacaggggattctcctccttcatcctgtaaaggtcaacaataaaaaccaaattatggggctgcttttgtcacactagcatagagaatgtgttgaaatttaactttgtaagcttgtatgtggttgttgatcttttttttccttacagacacccataataaaatatcaacaaccacatacaagcttacaaagttaaatttcaacacattctctatgctagtgtgacaaaagcagccccataatttggtttttattgttgacctttacaggatgaaggaggagaatcccctgtggcatgccaatgaatctttctgatgggagacatgtacagattttgtgcatttatgttctgaatgcaagtcaacaattctgatctagagtttaaaagtgaaagtacattagcaccataacatgcgtctttaaagccttcccaaatattagtaatcttgaccagcaatgacaagaaaaaagaggagcacctttacaagcagttgatatccaatattaaaataattgtggctttaaaaatatttctttaaattcttgcattacacttttctttttaaaccaatcttccaggagattaatcaatgaaatttataagttttatcaacgtataaaatttttttcatcttctgggactcatagaatacaatctgtgtttctgaccagttgaggtagttaaaatagggagggcttttctaatttcgtatttgactatttcagaaagaaaggttatcttttactggtgagcacagtcattgctctgcagatgggctaggattcaaagaatataacacagtgttgttatcataaagagtgttgaagtttatttattatagcaccattgagacattttgaaattggaattggtaaaaaaataaaacaaaaagcatttgaattgtatttggtggaacagcaaaaaaagagaagtatcatttttctttgtcaaattatactgtttccaaacattttggaaataaataactggaattttgtcggtcacttgcactggttgacaagattagaacaagaggaacacatatggagttaaattttttttgttgggatttcagatagagtttggtttataaaaagcaaacagggccaacgtccacaccaaattcttgatcaggaccaccaatgtcatagggtgcaatatctacaataggtagtctcacagccttgcgtgttcgatattcaaagactgttttgctccattccccagtgtgtttcgtgcaaccatcctccagaactgtgtaggtgaatttgctatttccttcagccttgaattcaccttcatttgaccccatcagcttcagggccttctttacatttccactggcctgatccatgtatgcaatgctatttttgcagtgatatgtgatgttctgggaagctcggctggagagaagtcgaaggaatgccagctgcacatcaaggacatcttcaggaagttcaggattgccgtagctaaactgaaaaccaccatccatggactctccaaaccaaacgtgtttcttctcagcactagaatctgtccaccagtgtttccgtggaacattcaaaggattggcacttatgcatgtttccccagtttccatattacagaataccttgatagcatccaatttgcatccttggttagggtcaacccagtattctccactcttgagttcaggatggcagaatttcaggtctctgcagtttctagcggggtttttacgagaaccatcaggactaatgaggctttctatttgtccattaacagacttgagtgaagtcataatctcatcggtgttgattttgaaatccattggttcatctccataatacggggcaaaaccgccagcttttgtcacctccaatcccagcaatggcagcggctccaacaccaccacagcaagaccaggggcaccaggaggtccaggagggcctggttgccctgggtggcctgggaagccctcagatcctctttcacctctgttacctcgaggccctggtggtccaatgggacctggatgtccactggttccatctttgccaggaggtccaggagcacctcgggaaccagcaggaccgggagcaccagcagggccagcagggccactttctcctctgtcaccactctttccagctggaccgacaggaccaggtgggccttgaggaccaggagcaccagggaaaccagcaggtcctggagggccagtttcacctctctcaccagggctaccacgaggtccagctatacctggaagtccgggggcaccaccttcacccttatctccaggctggccagctgggccaggaggaccaataggaccagtaggaccccttgggccatctttccctgggacaccatcagcacctgggccgcctggttcacccttgtcaccctttggaccaggacttccaagacctcctctttctccaggcattccttgcagaccaggagtaccagcagcaccaggtggcccaggaggaccagcagcaccctttcctccttcgggaccagggggaccagctccacctctaagtcctggggcccctgccaatccaggaggtccacgttcaccaggggcaccagcatcacccttgcctcctgaagctccaggtgcaccggcatcaccctttggacctggttccccaggttttccattttctcctggaggaccacctgtaccaggcaagccttgtaatccttgtggaccagggggtcctgtgtctcctttgtcaccaccaggcccagtaggccctgggggtccctgaggtccagtttcaccattctttccaggaggaccctgagggccaggtcctccagggccacctcgttctccattcttaccaggagcaccatcatttcctttaggaccggggaagcccatgacaccaggctgacctcggggaccagatggcccaggaggacctggtcgaccactttctccttgacttccgggaggccctggtttcccatcacttcctggtcctcctggacttccgggcatgcccctcattcctggacctccagggacgccatctctgccaggttctccagcagctcctctgggccctgcagggcctggagcaccacgctctccagcaggacccttttctcctgggatgccatttggtccagcaggtcctcggaacccaggggcacccctttctcctgcagctcctggaagcccatttgcaccaggttctccaggtgatccatccttgccatcttcgcctttagctcctggaacacctggaataccagcctcaccgcgttcaccacgtggtccgggctctcctttggcaccattcttaccaggctccggacgcgtgggtcgactccctata

SEQ ID NO: 9950 - DNA, 1136 bp, Homo sapiens
  misc_feature 1, 1134, 1135, 1136: n = A,T,C or G
nactttgaccattagcagcagtgacactgtgagaggggaagaaggtgcaggtgggtgaagtgggcaagggtctgcaacacgagacgctctcaggagctggcccagccagggcctggcccagggttcacagtgactttgctctgctccgccctcttccctgggaaaaccaatctaagtatcaagcatgatcttccttcttcgtcctggagtacctgcccgggcggccgaggtacgtgtccctggctttgggaagaccttctcactggagttcctggaccccagcaaaagcagcgtgggttcctatttccacaccatggtggagagccttgtgggctggggctacacacggggtgaggatgtccgaggggctccctatgactggcgccgagccccaaatgaaaacgggccctacttcctggccctccgcgagatgatcgaggagatgtaccagctgtatgggggccctgtggtgctggttgcccacagtatgggcaacatgtacacgctctactttctgcagcggcagccgcaggcctggaaggacaagtatatccgggccttcgtgtcactgggtgcgccctgggggggcgtggccaagaccctgcgcgtcctggcttcaggagacaacaaccggatcccagtcatcgggcccctgaagatccgggagcagcagcggtcagctgtctccaccagctggctgctgccctacaactacacatggtcacctgagaaggtgttcgtgcagacacccacaatcaactacacactgcgggactaccgcaagttcttccaggacatcggctttgaagatggctggctcatgcggcaggacacagaagggctggtggaagccacgatgccacctggcgtgcagctgcactgctctatggtactgggtccccaaccagactccttctactatgagagcttccctgaccgtgaccctaaaatctgcttggtgacgggatggtactgtgaacttgaagaagttgcctgcggtgcaaggactgggagagcgcaggagcccaagtgttgctgccgagctgcaggacggagacatgaaatgtggcaagcacaccttggctattgaaggtggtctggggcggacctggcagatctgggtgggcggcccgnnn

SEQ ID NO: 9951 - DNA, 1689 bp, Homo sapiens
  misc_feature 1687, 1688, 1689: n = A,T,C or G
gtgacaagctgcacgctccagccccggccccccggttgatgccggcccaggatggatcagacctgtgaactacccagaagaaattgtctgctgcccttttccaatccagtgaatttagatgcccctgaagacaaggacagccctttcggatgatccagattccagtaccagtacattaggaaacatgctagaattacctggaacttcatcatcatctacttcacaggaattgccattttgtcaacctaagaaaaagtctacgccactgaagtatgaagttggagatctcatctgggcaaaattcaagagacgcccatggtggccctgcaggatttgttctgatccgttgattaacacacattcaaaaatgaaagtttccaaccggaggccctatcggcagtactacgtggaggcttttggagatccttctgagagagcctgggtggctggaaaagcaatcgtcatgtttgaaggcagacatcaattcgaagagctacctgtccttaggagaagagggaaacagaaagaaaaaggatataggcataaggttcctcagaaaattttgagtaaatgggaagccagtgttggacttgcagaacagtatgatgttcccaaggggtcaaagaaccgaaaatgtattcctggttcaatcaagttggacagtgaagaagatatgccatttgaagactgcacaaatgatcctgagtcagaacatgacctgttgcttaatggctgtttgaaatcactggcttttgattctgaacattctgcagatgagaaggaaaagccttgcgctaaatctcgagccagaaagagctctgataatccaaaaaggactagtgtgaaaaagggccacatacaatttgaagcacataaagatgaacggaggggaaagattccagagaaccttggcctaaactttatctctggggatatatctgatacgcaggcctctaatgaactttccaggatagcaaatagcctcacagggtccaacactgccccaggaagttttctgttttcttcctgtggaaaaaacactgcaaagaaagaatttgagacttcaaatggtgactctttattgggcttgcctgagggtgctttgatctcaaagtgttctcgagagaagaataaaccccaacgaagcctggtgtgtggttcaaaagtgaagctctgctatattggagcaggtgatgaggaaaagcgaagtgattccattagtatctgtaccacttctgatgatggaagcagtgacctggatcccatagaacacagctcagagtctgataacagtgtccttgaaattccagatgctttcgatagaacagagaacatgttatctatgcaggaaaattgaaaagataaagtattcttaggtttgctgccacaaacactagggtaaaagcaaaacagaagcctctcattagtaactcacatacagaccacttaatgggttgtactaagagtgcagagcctggaaccgagacgtctcaggttaatctctctgatctgaaggcatctactcttgttcacaaaccccagtcagattttacaaatgatgctctctctccaaaattcaacctgtcatcaagcatatccagtgagaactcgttaataaagggtggggcagcaaatcaagctctattacattcgaaaagcaaacagcccaagttccgaagtataaagnnn

SEQ ID NO: 9952 - DNA, 1489 bp, Homo sapiens
  misc_feature 1, 2, 3, 4, 5, 6, 1487, 1488, 1489: n = A,T,C or G
nnnnnncaccattttaatcaggttattgtgataagaccaaaaacattccacaaagtgcatacctcattttgacttctctattaaatttaaacttgagttaaaatgttaataatttggctttaattgaagagagagttcattcagagaattacagagttcgaattgggatgaatccccagagtttatttaatctggtaccctcattaattggaagaatgtgaggctcaaaaatgaaatgaccacaagagccatgactagaatctcttcgttactcagtccagtgctctatcataccagctactttcactcttctaacccacagtttaccgtattttctaatacatgctagtatattgcctagtacacaacatcctttcaaatattctttctttattctccaattcacttttcaggagaatagataacctcaatcatattgattctcagcctaatggtctcccttacataaattataatgacataagcattttgtatcactttattgttaccatcgacctcctacagtttgggggaacccaatcattctttaaaacattagaatgacaactccagttgatttggcatattgtataggtgagtgggaaagacttgtcaaatcccagaaaggggcgtggcaccagcaccacccaaccagaagaaaaatctctctttggtgctagtgtcatagctccctatctgttccgctaacccattaaatgatgtggtggaagaggatcctttcacaatctttgttcatttttttacagagcaaatggaagtcatacataaccttttacaaaattcattttttgttttaatttttttccaggtatgtgatatttgtgagacatcagaaaatcaatttatatttttttcctctgttaaaccaagccccacaaattgaaacctgacaggttagaataagttcttaaatatccacccagcctttgaattcttttgcttctagtgttggccaaaactgtctaaatagtacagcttcttctctaaggtagatggaagagattatcacaacagctcaacccactaaaagcatttgtattttataaataccagtcagcaaagacaaaaattaagatattcattttttcaatgatcaaagaaatgtgaccagctctgatgggcaacccaaactcaagaagtgtaacttttctgcagaacccttcagaacttaaaagatcactgatgtaaggtcactagctggcacctcttcttataattacaattaaatgggcaataacttacccttacataatgacaactactattaaagagaaatcatggcatttgagaacaatgacataagattaaatcaaggcaccatggctaactattcaggagactatataacaggttaaaaaaaaattcaaggccaggcacgcgtggctcacgcctttaatcccagcactttgggaggccgaggtgggtgtatcaccaggtcaggagatcgagaccaccctggctaacannn

SEQ ID NO: 9953 - DNA, 4171 bp, Homo sapiens
ctgtgcctaacgtgtttctaaactttaggagtaaatgaacatttgaaatccattttgataaacctgctgttaatggtctttccccccttgtgaatgttttctaactttgtcttggtaattgcaatttaactaggtgcggtggctactaaagttcgaaggcacgatatgcgtgtccatccttaccaaaggattgtgaccgcagaccgaggttagtttagttctgcagttcttgtctataagaaatgcgttgggtgtccataaaatttgcaacaccacacctgatggaaaaatgtaattgcttacctgcacacagttttttttccttttctaaatttgtttgtgatcattgacagatttaagggttgggttttttgttttggtttggttttttctcccttcatattttaacttattaaatcttctattattatgtactatgatttattcctactaaaacataaattagtcaatttggggagctattaaattttgatgttgcctcagttattttcattaataacttttgctaaaatttaccttttaaaagttctgaaatttggggttggtattgcaaaatgaattgaacggatggtgctttaatgagagaagtaaaggaatatatgcctcctgtgtacttttggagaaaactgaagatttagtttccatttttctttataataaaatatttgagccactgtataaacatgagggtgcacatgtcaagtacttagctaaaatcaacaaagtgaggactgtgaagataactttcatgtagttggatttttttatataaattagagcgtcaattcccttttattcttacattctcttgccaaaatggatcctttgatttttgtcatttgctgctaaaatatattatctgaaggtaaactgtctcttgaagttctgtggtggtatgagatccagctgtgtgaatataatttttgactaacctgtgactggaaaataagtcttcatttttctcctttacaacttttataatttgtgtcctgtatatgcccttggacccttttataaattatttttgcttattgaggaatggtattttcggtttattgacattgaattgttttctaagtttttccatcacaagataggaatatcaagcatggtagtaaaaaaggattttttacaagtttctattatggcacatttgtttcctacaaattaaattgatcaaagtctcaaatattagtggaggaaaaagtgctggatttgtacttcaattgtacatcttctatgaatttatgaaggacctacctgctttatgtgattaccttgagtactgatgataaatactagacacagctgttgtccacatcagaaataacatgcctttcccaaagacattgttaatatttgtttagcataatccataaagaacgttgaagacttttaaactaatgtattcatcactaacagtgattgttcagtgaacaaaatagaccccagctccgtggtcgtctatgaggatggtattccttgtaagtgttctgtatgagcacgtctcatagggatggggaagttttttggaaagtcacttgagttttaaagaaactggacaattccatgaataatttgaggttttattcatattgctaatgtctacaattgttctaaagagtattttaaagtagtttttttcccccagctaatctttccctatgtatgcccccttttaggagatttctcaccattttgctttaacacaataattattggcctacttaatactccagtgccttgagatagttggacatattttaggaagattttattgtatttggaaaattacgacacattccatgcatggatcttttgtagttacgtgttttgattagtcctgtcactgtttttatttaaaatgcagtgtcagcaaaccgaaatgctcatttcttttttagtaacagagtactcgtatacttatcactgtatgcactcattgggtctaagggagatgtctgaagtccttcacttaaattattttatgatactactgttttctctatttttgaggttaaaattattttaaaaaaatattttgaagagaagtttattagtataagcattcatttaatgcaaaaaaactcagcccttggacatataaccatgtaattctatatgaacgtttagagtactacatggttgaccaatatctagttctttactaaaagtaaactcacctctttatatatatttcaaaactgaatttgaagcctattagagaccaactgaccttttagttgtaatgaactgtatggtcttgcatggtgacacacctgtgtaggaggccaagacttggcagaggatgtagtctaggtgtcctggtatatataaatggtcactcacttcgtttatatattccacactcagaaaagaagtcagagttttttctgagtaatacaaaaaccatcacttacataatttgtataagaaactttaaacagttttaatcaaaactatgagtaacatcaaaaatgctttaagattctatattttggaatacctgtgaagtagtatgactacatcatgttaaatatttattttcttctatgattttggagcagcaatttttattttaaataaaattccacttttaagaaattcagggaagatttggtcacattgaagatacagtatttttgtagtatttataaactgttctaaatgatagactatagaaaacatttttgtcatatgaaggtaaatcagtccattattttggatcatttaaactgaacattacaccttctgggctttgatttatgaagtggcacagaatctaactttgcactgaatatcttttcattcacatctcctctgccttagtcacaatggcaacagtacagaaaattctatcaaacctcagaatatagtagaaataattaagctgttgaatgagtcttaaaaattatactactgttaagtggaccaagtttggtgaagcagaatgtgacaaaggttgattaaggaaggaacaactcaaggacattgggaatgataacttttccacttgagaactactttatgttttactgtaatttttaaagtttttttgtcctttttgttattttgcaaaagaaaatagtatttacaggtggcttcttttaaaatataaaaatataaagcaggaatgtatatgaaatgtcagattttattgtatttgcagagtattagctttgaaattgaataaagaaagctgtttgtagttttaaaatgccttattggtatcaattagaaatttcttctattttttgatgtacttagagctttttgagtgtagaattttaaatggcaggattttacagtgtttacatgcaagtgcattttataagtgttctatatgtgtaaaatagtattttcaactggaaagtgttggctagtgcaaaaggcctggccattttctggttcccatgatgttgcctacactgctagactacagtttagtatcgctttgtatcatgaggccaagaaattccatgttgtttgtaaatagaataattgaaaaagcaataaacatttattgaacaaaagaaaccttgtttggcccagagtttatgttgaaccaaatggttcatagaattttgaatttctttagattcatttctgttaatcatcagttattaataatcacatccatcattaatagttgctttaatgcttgcatcttagagaatactaatgcttaatagcagtcagatactgataactgcactgactgtttaaaaattctgtataccaaacctattcattgttgtttttcaatttccttcattgactgctactaactattagttgttagttgtattttatttctattttttcttgttaaccagtttgtttctcgttcaatggggggaagggctcttcttcattggtcccacttcttgtgatacgaaattgtcacggatcacaatggattcctgtagatgttgtccactcagttttggcaacattgaacattgctttttcacaataacgggagaacaggttcaaggtggcaataaagcgggataagttggaactaatccttctcaaacatgctcatctttcggcgggttctcttgggttaacacccccgcgcccggggagaacttgactttgaccgagatttaccaatgaatggcagctgcggggtcacaagggaacc

SEQ ID NO: 9954 - DNA, 439 bp, Homo sapiens
acatcagcaccctcaaaacagagttcacccagggcatgatcttacctacaatgaatgaagagcggacgcgacagggctggcagcggtactactttgagggcattaaacagacctttggctatggcgcacgcttattttagggccagcggcaggggactccagcctgctggacacttcagtccagctctctcctgactggggcttgcgactcacaggattgcatcgtcccagctgctaacttggggccggggcccctcccttccacatataccttgggtttgtgcatgttttctgctgggtgggttcagagggcaggggactccagcctgctggacacttcagtccagctctctcctgactggggcttgcgactcacaggattgcatcgtcccagctgctaacttggggccggagcccctgccttccacatataccttgg

SEQ ID NO: 9955 - DNA, 2167 bp, Homo sapiens
  misc_feature 1, 2, 3, 12, 2145, 2146, 2147, 2148, 2149, 2150, 2151, 2152,2153, 2154, 2155, 2156, 2157, 2158, 2159, 2160, 2161, 2162,2163, 2164, 2165, 2166, 2167: n = A,T,C or G
nnncgtccgganattttttggttgatccccttgtactatgactacttcaagtgcaactttaagcatgaaagtattcaagttgtgccttcatatcctagagggaaagttggttggatactaggaagtttgctaactagaagtctagcagaaattgtgaagaaggatgactttgttcttgattcagagtatctcgtcacattactggtagtagttcccaagttaaaccacaacgactggattaagcagtatgaaacactagccgaaatggtagttccaaggtctagcaatgttctttcagaggaccaagacagttacctgtgtaatgtcaccttgtttaggaaggcagttgatgacttcagacacaaagccagagaaaacaaattcattgttcgtgacttccagtataatgaagaggagatgaaagcagataaagaagaaatgaacaggctttctactgataagaaaaaacaatttggaccacttgtacggtggctgaaagtgaattttagtgaagcatttattgcatggattcacgtgaaagcattacgggttttcgttgagtctgttttaaggtatggcttgccagtgaacttccaagcaatgctacttcagcccaataagaaaactttgaagaaactgagagaagtattacatgaattgtataaacatctagacagcagtgcagcagctattattgatgctcctatggatattccaggtttaaacctgagtcaacaagaatactacccctatgtgtactacaagattgattgcaacttgctggaattcaagtgaaaatgggctcctcccccgacaatcctgtccttgtgtttgtgtgtgctaacagaaataagttgcagtatggtcgtacttttaactctagtatcctttgcttgcttcttacgccctttcctaggtgaattctcccacagtggtctgtatctcaacattttctttttaaaggaaaaaatatatatatatagtttctttttattgatcaggtctgtaaatgtgtactaaaaaaatcagagtttatttataaacaaaatagtttatttaaagagaaggtctcttccttattgatatcatggtatgcattaattccatttgttactattgtgcacaaaagccctgttcacaggggaatggtgtaaacatttatactgttttgttcactgtatttagtagacataactgtatttagtagacataactgttgaatagttactgaatcatgatgtaaagaatatgtgaccatcttcaggtatgggatttctgaacgtttcaaatttcaatcaatgagcactgtcaacacccacaggagagaataaaattacctgtgcaaaggtgtattgtggtgtgtgtaacttaagattacagttctgtttgagagttaaatgatgtcatagctcacttgctatgctgcttccaggattttgttatatgctgaggtgtaaccatttgtgttgtctgactttcgtatgatttaattgagccaaatttgggtcagaacacaaatttgaagatgacttttcagtatatgatgggtatttacatttgaacactagaattttaggtctctcaaataattaagaatagagccagttttgaataaagtctagcagaactatgcagctttagtcatttgttttgtctaagtctgtattttatgtgttgtcttcttaagatctataattttggcatttatgtcatttgtgacatagtctgaaaatagagacattgttggcctttaaaatctcagaaatgaatgacttaatttagtgtcctgaaagagcttttaaaagaggattttgtggcaatgtttctcttactacgtactcacaggtttgcaaatgggaaaaaagtttacatttcagtttaggggcatatctaagctatgctattccctttagaaaattagcctccaaaatcttttgtttcaaaatattatattatttcataaataatttcaagcaaatacagacatccacaatgtagaacatgagagaccccctccctcaatttccacctcccaagggaagtttatgtatttttctaggcccttttctatgtctttacatctctgtctcacacacacacacgtatacacacacccagtttattcctaataaaataggattatannnnnnnnnnnnnnnnnnnnnnn

SEQ ID NO: 9956 - DNA, 1432 bp, Homo sapiens
  misc_feature 1, 2, 3, 1429, 1430, 1431, 1432: n = A,T,C or G
nnnacgggaggaagacagaggagacgaacgtcgctaatcatgtcttcgtatggtgtgccccgctgtctcgctagacgcttagtgtgcggatcctgcttatgcttccgtgctctcttttttctgctctactactgtggccctatctgcagttgatcacttggacagccgatattgtgggctgtgttctcctatgctgttgcacccgctattgggctgttctcaatcgtacactgaggttggagagggtgtgtcttcagcgacagttgagcccagatgtgggaaattcgttgtaaataattcttcctggggttgattcctttttgaggggaagtttttaacctttccttagtagttacttttaatgaactgaagaagaattaaagcatcaaaggcctagtgtatgatttgactccgaagtgaccctctcttctactttgataaagtcaagataccttattggccataggagattcctccttttggggctacccccatacctggaaattccaagagtgtgagggctatatttgggcccagaggaaaatcaaggaaccccatatccagctgctaaagcccttgggcccaaggagtgtaccactgaatccaaggctctcttgggtagcctatgtgcctcttggatggtatgtgaacaaggtagggatgaaactgcagatgtctgaaaagagcttaagcatcctgacagcttgcattttttttttaatttttttttcctcaccgtattccacatacctgtggctggggaaggtaatgttacctctgcaaacagatgctctggtaagagaagaaagacacagggaaggcagagagagcaagacagagggctcaatcacaaagctgggacaaggagagcagctgtttttcacacattcctgctcctctctcagctgggctcatgttcactccgtttcattccaatcatcagggtggagatttcagaggtgactatccctaatccagtagagaacatgagccctgggagcacagctgcctggagtcctcccaagggtctcctccccttttccagactcagcatcattgaagccctaacgggtccttgtaaattaatgtttcatattatcgaaggactgtcagtttagtttggtacagtttattgtagcctaagaggtccagcaagatttcaagagaggagagatgattgcattacttgattacaatgaatacaatctttaggatactctttactttttgtacaataacgatatgaaaggaattttttattctacctatacacagctcaaaataaaggtataacttctggaactgagaaactgatgtcgacgcggccgcgatttctttcactgaatgttgatacgctttgataagtgtatacatcaagggcatatacatatacacccaacacccctctctctttgttctgattaactcnnnn

SEQ ID NO: 9957 - DNA, 2353 bp, Homo sapiens
  misc_feature 1, 2, 2343, 2344, 2345, 2346, 2347, 2348, 2349, 2350, 2351,2352, 2353: n = A,T,C or G
nncgggagctgcccggcggccccggaccgaggcagccctcccctttaaaagaagcggaggacaggattgggatccttgaaacccgacccacgcgtcctcgacgcgtgggcggagcggaaaccagaggggaaaccttgaactcctccagacaattgcttccggggagttgcgagggagcgagggggaataaaggacccgcgaggaagggcccgcggatggcgcgtccctgagggtcgtggcgagttcgcggagcgtgggaaggagcggaccctgctctccccgggctgcgggccatggccacggcggagcggagagccctcggcatcggcttccagtggctctctttggccactctggtgctcatctgcgccgggcaagggggacgcagggaggatgggggtccagcctgctacggcggatttgacctgtacttcattttggacaaatcaggaagtgtgctgcaccactggaatgaaatctattactttgtggaacagttggctcacaaattcatcagcccacagttgagaatgtcctttattgttttctccacccgaggaacaaccttaatgaaactgacagaagacagagaacaaatccgtcaaggcctagaagaactccagaaagttctgccaggaggagacacttacatgcatgaaggatttgaaagggccagtgagcagatttattatgaaaacagacaagggtacaggacagccagcgtcatcattgctttgactgatggagaactccatgaagatctctttttctattcagagagggaggctaataggtctcgagatcttggtgcaattgtttactgtgttggtgtgaaagatttcaatgagacacagctggcccggattgcggacagtaaggatcatgtgtttcccgtgaatgacggctttcaggctctgcaaggcatcatccactcaattttgaagaagtcctgcatcgaaattctagcagctgaaccatccaccatatgtgcaggagagtcatttcaagttgtcgtgagaggaaacggcttccgacatgcccgcaacgtggacagggtcctctgcagcttcaagatcaatgactcggtcacactcaatgagaagcccttttctgtggaagatacttatttactgtgtccagcgcctatcttaaaagaagttggcatgaaagctgcactccaggtcagcatgaacgatggcctctcttttatctccagttctgtcatcatcaccaccacacactgtagcctccacaaaattgcatcaggccccacaacagctgcttgcatggaatagcagagaataccgcctgctccctccggacagcacactcctgaaaacggggagagaggagccaaacatgctcggtttacactttccttatttactgaatgagtggagggcagagacaggcctggagttacgcacactgagtgccccaacatggaaagaaacatcaggagggacaggaaacgttccctccttaaccaacagttttcaagaccttactggaggcactttattggctacataatcactccatgcggtgggcatcaggcagaatcctggtgcagacccaactttgaggtggaggatttcacagtttctttattttgaacttcccccaggctcccactaattcctctccattctatcctcctccctttcccacaaaagaaaacagaaaggagcagcagtgtttgataccgtatcatccagaggcctggttctctcccattatagggcaaacaagccctggcaagatatttcactcccgccccatgccatgcattaaaaatccaaaattgcctatattccacctgccaagcaagagatgctttcattattgaagttccaaatgtatacctttgagaacagtgccttctcgtcttaaaagagaggtcctcattttgtgagttgggagcagagggaattaaagaaagccatgatgcagggatttggccattcaagccgggcagccttcagagaatgtcatccctaatgacacatgcccgaatgaaggagcggggctgagcttgtcctgccttcgtattgaatgttgcctgtctgcctccttaatagcgggcctctgtgtgagcatttgacaagacttaaaactattcattgaagaaaatggatgatcccccaacaggaagatgcaaccccatgggctgcctgcttgaccacagaagtgcttccagctccagttgctcatctgagaactccccccaccacttgctgttaaaattgttaaaattaaaggccatgttgattgattttttaaaaaaaaaaaaaaaaaaaaaaaaaaaaaaaaaaaaaaaaaaaaaaaaaaaaaaaaaaaaannnnnnnnnnn

SEQ ID NO: 9958 - DNA, 191 bp, Homo sapiens
  misc_feature 190, 191: n = A,T,C or G
acggtgtgctgtcgatgagcacgatgcaattcttcaccagggtcttggtaccagtgccccttttcagacagattttgattcgctctagacttttttttttttttaatagggaaaaaatttgataattttcttttttctacatgcacttaagactaaaacacaggtttggattaattttattctgcttccnn

SEQ ID NO: 9959 - DNA, 911 bp, Homo sapiens
cgcgtccgcggacgcgtccggctgccggatccttcagcgtctgcatctcggcgtcgccccgcgtaccgtcgcccggctctccgccgctctcccggggtttcggggcacttgggtcccacagtctggtcctgcttcaccttcccctgacctgagtagtcgccatggcacaggttctcagaggcactgtgactgacttccctggatttgatgagcgggctgatgcagaaactcttcggaaggctatgaaaggcttgggcacagatgaggagagcatcctgactctgttgacatcccgaagtaatgctcagcgccaggaaatctctgcagcttttaagactctgtttggcagggatcttctggatgacctgaaatcagaactaactggaaaatttgaaaaattaattgtggctctgatgaaaccctctcggctttatgatgcttatgaactgaaacatgccttgaagggagctggaacaaatgaaaaagtactgacagaaattattgcttcaaggacacctgaagaactgagagccatcaaacaagtttatgaagaagaatatgggtccaagcctgggaacgatgaacgtggtgggggacactatcagggtcaccaccagcggatgtgggggtcccaccttcaggctaacagagaaccgggatgctgggatgaagaagcgccagttggaccaagatgctcaggctttaatttcaggctggaaacctccaaatggggccgctgacgaaaagttatccccatcgttggaaccgacgggggtctcttcgagaacggtgtcgccagtcacgactttccggttccaatggggaactggccggaaccttggatgcgcaatacttgcggggaaccccgaataccggcactgaagacctcattgcaaaggcggcaatttacc

SEQ ID NO: 9960 - DNA, 1621 bp, Homo sapiens
  misc_feature 1620, 1621: n = A,T,C or G
tatagggagtcgacccacgcgtccggccccacccctcggcgtgccctccccttcacttcccccaccccctgtcccctcccttccctcccttcccccccgtggcgaggcagcagcgacggcggcggcggcagcggcggtcgcggctgaggctgaggaggaggcggcggcggcgggcggggctcggctcgggctccgcgggcgggcgggcggacatggcggccaacatgtaccgggtcggagattatgtctactttgagaattcctccagcaacccatacctaataagaaggatagaagaactcaacaagactgcaagtggcaacgtggaagcaaaagtagtatgcttttatagacgacgtgatatttccaacacacttataatgctcgcagataagcatgctaaagaaattgaggaagaatctgaaacaacagttgaggctgacttgaccgataagcagaaacatcagttgaaacatagggaactctttttgtcacgccagtatgaatctctgcccgcaacacatatcaggggaaagtgcagtgttgcccttctgaatgagacagaatcagtattgtcatatcttgataaggaggataccttcttctactcattggtctatgacccctcattgaaaacactattagctgacaaaggtgaaatcagagtgggacctagatatcaagcagacattccagaaatgctgttagaaggagaatcagatgagagggaacaatcaaaattggaagttaaagtttgggatccaaatagcccacttacggatcgacagattgaccagtttttagttgtagcacgtgctgttgggacattcgccagagccctggattgcagcagttctgtgaggcagcctagtttgcatatgagtgctgctgcagcttcccgagacatcaccttgtttcacgctatggatacattgtatagacacagctatgatttgagcagtgccattagtgtcttagtaccactcggaggacctgttttatgcagagatgaaatggaggaatggtcagcctctgaagctagcttatttgaagaggcactggaaaaatatggcaaagacttcaatgacatacggcaagattttcttccttggaaatcattgactagcatcattgaatattattacatgtggaaaactactgacagatatgtgcaacagaaacgtctaaaagcagcagaagctgagagtaaactgaaacaagtatatatcccaacctacacaaaccaaatcccaaccaaatatccactagtaatgggaagcctggtgctgtgaatggagctgtggggaccacgttccagcctcagaatcctctcttagggagagcctgtgagagctgctatgctacacagtctcaccagtggtattcttggggcccacctaatatgcagtgtagattatgtgcattgttggttattggaaaaattggggggttgaatgcaccagttgaaaagagtttttcctgccacttagaccctgtttaaaatttccgcggcggaatcgtcacatggggcaactcggaggaccgtttcttataaaagggggggaccccggggaagggggtatcggaagaaacatgggtcttggtgaagagccaccatgnn

SEQ ID NO: 9961 - DNA, 1754 bp, Homo sapiens
  misc_feature 1, 2, 3, 10, 1752, 1753, 1754: n = A,T,C or G
nnnacgcgtncgggcacaaggatctgatgaagatgagctgcagaattctgacgatgatgagaaaatgcagaacacagatgatgaggagaggcctcagctttccgagggtgagagacaacagctatctgaggaggaaaaggctaattctgatgatgaacggccggtagcttctgataatgatgatgagaaacagaattctgatgatgaagaacaaccacagctgtctgatgaagagaaaatgcaaaattctgatgatgaaaggccacaggcctcagatgaagaacacaggcattcagatgatgaagaggaacaggatcataaatcagaatctgcaagaggcagtgatagtgaagatgaagttttacgaatgaaacgcaagaatgcgattgcatctgattcagaagcggatagtgacactgaggtgccaaaagataatagtggaaccatggatttatttggaggtgcagatgatatctcttcagggagtgatggagaagacaaaccacctactccaggacagcctgttgatgaaaatggattgcctcaggatcaacaggaagaggagccaattcctgagaccagaatagaagtagaaatacccaaagtaaacactgatttaggaaacgacttatattttgttaaactgcccaactttctcagtgtagagcccagaccttttgatcctcagtattatgaagatgaatttgaagatgaagaaatgctggatgaagaaggtagaaccaggttaaaattaaaggtagaaaatactataagatggaggatacgccgagatgaagaaggaaatgaaattaaagaaagcaatgctcggatagtcaagtggtcagatggaagcatgtccctgcatttaggcaatgaagtgtttgatgtgtacaaagccccactgcagggcgaccacaatcatctttttataagacaaggtactggtctacagggacaagcagtctttaaaacgaaactcaccttcagacctcactctacggacagtgccacacatagaaagatgactctgtcacttgcagataggtgttcaaagacacagaagattagaatcttgccaatggctggtcgtgatcctgaatgccaacgcacagaaatgattaagaaagaagaagaacgtttgagggcttccatacgtagggaatctcagcagcgccgaatgagagagaaacagcaccagcgggggctgagcgccagttacctggaacctgatcgatacgatgaggaggaggaaggcgaggagtccatcagcttggctgccattaaaaaccgatataaagggggcattcgagaggaacgagccagaatctattcatcagacagtgatgagggatcagaagaagataaagctcaaagattactcaaagcaaagaaacttaccagtgatgaggaaggtgaaccttccggaaagagaaaagcagaagatgatgataaagcaaataaaaagcataagaagtatgtgaccacaaacaaacaaaacaaacaaaaactagacgcgcagcatggcagagaagtataagaccaccggtgggccgggcccatagaatgccagtgcaacgtgtcccacgaccccgagatcaggtgggtccacaaaaaacccgcgaccgcggtacacacgtgacgagtcaaggcaacaaacagccggaaaagccacggtggagagaacaacgtatcagacatcacagaaccgagacacaataggaaaaaagaaggagataacggacacaccaacannn

SEQ ID NO: 9962 - DNA, 558 bp, Homo sapiens
  misc_feature 1, 2: n = A,T,C or G
nnaaagtgaaaatttttcaatgtcgttatttttaatatacttcatagtaattttattgcaattaaagcacctgttttctaaattatctcagttttgttcaagagagaaaaaaaaatattgaaacaaaggtgatggagttgagatcccaaaacagagtttgcctatggtctgtcttcctatgcggaaagtaagtacctgcccggtcggccgcccgggcaggtaccagatgggctgcgagtgcaagatcacgcgctgccccatgatcccgtgctacatctcctccccggacgagtgcctctggatggactgggtcacagagaagaacatcaacgggcaccaggccaagttcttcgcctgcatcaagagaagtgacggctcctgtgcgtggtacactgccatgggggacgctatctagtctaaaattacagagtcgaaaagatagtgatgatggtcccatcatgtgggttcgtccaggagaacaaatgatccctgtggctgatatgccaaagtcacctttcaaaaggaaaagaactaccaatgaaataaaaaatcttcagt

SEQ ID NO: 9963 - DNA, 499 bp, Homo sapiens
tgcttagctactttggaagcacaaaagttacccctttccatccttggcccttccctggttggtactggataccatttatcattctgcaaaatgttgtctacatctttcaggtgctggtcattcttagattagcttcttagctgttctgttgataaacagaagacttcaattttcaggatggatgattccaacatcttccacaagctttcactttcactaaattattttgttataaatttgatctccttcaaaagtgccttgaagtcaattttggttgtaatgtatttgtctctgacgtattcttcaaattctctttgttttttttcctgtcattggagaactgcacccagaatcttatttttactacttccatgtgaatgttaaggtacctgcccgggcggccgaggtacatcaaagaagctattccatagctcagttacagctcaacaaaagctctgtctgtattgtctactggtaagcttgtgccctggtggctaag

SEQ ID NO: 9964 - DNA, 428 bp, Homo sapiens
acctggacctgctgtcccagccctgccgcgctgtttacatctttgccaagaagaacgacattcccttcgagctgcgcatcgtggatctgattaaaggtcagcacttaagcgatgcctttgcccaggtgaaccccctcaagaaggtgccagccttgaaggacggggacttcaccttgacggagagtgtggccatcctgctctacctgacgcgcaaatataaggtccctgactactggtgcggcgcacccttcagggtcttgagattgagctgcagtcacagctgagcatgaaagctgccttggaagacacactggcagaaacggaggcgcgctttggagcccagctggcgcatatccaggcgctgatcagcggtattgaagcccagctgggcgatgtgcgagctgatagtgagcggcagaatcaggagt

SEQ ID NO: 9965 - DNA, 3830 bp, Homo sapiens
  misc_feature 1, 2, 3, 4, 5, 6, 7, 8, 9, 10, 11, 12, 13, 14, 15, 16, 17,18, 3828, 3829, 3830: n = A,T,C or G
nnnnnnnnnnnnnnnnnnctatatagagacgaggtctcactgtgttgcccagcctggtatcgaacctctgggctcaagcgatcctcccgcttcggcctcccgaagtactgggattacaagcgtgagccaccgcgccctgcccagtggaatactttcaacggggcttctgcattgacttcccatcttccaacccatccacaaactgcagccaaaatgatgttactacagtaacaacttggagaaagcagtgtggtttaatctggaaggagcagaagctgtggagtccaaaggacccgtgttcctatccttgttgtgccacttgacacgtttagcacaagggtccccacagtgttagttcaccgtctccagcaatcacgatgactccctgaagggctgtcaaacgaaacaaaggcgcaaactgagacaattccattgtttacgtaactttcgccaaatcggctctttcctacgaaatatccagctcatagagcaggctgagatgctttgttgctttaattctctttaagagtcacagctgtccattttccacgtgcggctgaagaatggatttcagagcgctctccctccggccgtgttcacctagtaaccccagcttcgggataaggacctgcagcccgggcgcgacccggaaagggaatccgcccttttcgcctccttcgcgccaatcgcctggagttggcgtttccgcagccgggacacagcccaccctctaagagccgcggagtcgggaacggtagaaggggccgcgcgtgcgcagtggcgtccgctgtgcttccggtgcgccgggcgcggacgcgggcacgcacacacgcaagcacgcctccacttaactcgcgccgccgcggcagctcgagtccaccagcagcgccgtccgcttgaccgagatgctgcgggcctgtcagttatcgggtgtgaccgccgccgcccagagttgtctctgtgggaagtttgtcctccgtccattgcgaccatgccgcagatactctacttcaggcagctctgggttgactactggcaaaattgctggagctggccttttgtttgttggtggaggtattggtggcactatcctatatgccaaatgggattcccatttccgggaaagtgtagagaaaaccataccttactcagacaaactcttcgagatggttcttggtcctgcagcttataatgttccattgccaaagaaatcgattcagtcgggtccactaaaaatctctagtgtatcagaagtaatgaaagaatctaaacagcctgcctcacaactccaaaaacaaaagggagatactccagcttcagcaacagcacctacagaagcggctcaaattatttctgcagcaggtgataccctgtcggtcccagcccctgcagttcagcctgaggaatctttaaaaactgatcaccctgaaattggtgaaggaaaacccacacctgcactttcagaagaagcatcctcatcttctataagggagcgaccacctgaagaagttgcagctcgccttgcacaacaggaaaaacaagaacaagttaaaattgagtctctagccaagagcttagaagatgctctgaggcaaactgcaagtgtcactctgcaggctattgcagctcagaatgctgcggtccaggctgtcaatgcacactccaacatattgaaagccgccatggacaattctgagattgcaggcgagaagaaatctgctcagtggcgcacagtggagggtgcattgaaggaacgcagaaaggcagtagatgaagctgccgatgcccttctcaaagccaaagaagagttagagaagatgaaaagtgtgattgaaaatgcaaagaaaaaagaggttgctggggccaagcctcatataactgctgcagagggtaaacttcacaacatgatagttgatctggataatgtggtcaaaaaggtccaagcagctcagtctgaggctaaggttgtatctcagtatcatgagctggtggtccaagctcgggatgactttaaacgagagctggacagtattactccagaagtccttcctgggtggaaaggaatgagtgtttcagacttagctgacaagctctctactgatgatctgaactccctcattgctcatgcacatcgtcgtattgatcagctgaacagagagctggcagaacagaaggccaccgaaaagcagcacatcacgttagccttggagaaacaaaagctggaagaaaagcgggcatttgactctgcagtagcaaaagcattagaacatcacagaagtgaaatacaggctgaacaggacagaaagatagaagaagtcagagatgccatggaaaatgaaatgagaacccagcttcgccgacaggcagctgcccacactgatcacttgcgagatgtccttagggtacaagaacaggaattgaagtctgaatttgagcagaacctgtctgagaaactctctgaacaagaattacaatttcgtcgtctcagtcaagagcaagttgacaactttactctggatataaatactgcctatgccagactcagaggaatcgaacaggctgttcagagccatgcagttgctgaagaggaagccagaaaagcccaccaactctggctttcagtggaggcattaaagtacagcatgaagacctcatctgcagaaacacctactatcccgctgggtagtgcggttgaggccatcaaagccaactgttctgataatgaattcacccaagctttaaccgcagctatccctccagagtccctgacccgtggggtgtacagtgaagagacccttagagcccgtttctatgctgttcaaaaactggcccgaagggtagcaatgattgatgaaaccagaaatagcttgtaccagtacttcctctcctacctacagtccctgctcctattcccacctcagcaactgaagccgcccccagagctctgccctgaggatataaacacatttaaattactgtcatatgcttcctattgcattgagcatggtgatctggagctagcagcaaagtttgtcaatcagctgaagggggaatccagacgagtggcacaggactggctgaaggaagcccgaatgaccctagaaacgaaacagatagtggaaatcctgacagcatatgccagcgccgtaggaataggaaccactcaggtgcagccagagtgaggtttaggaagattttcataaagtcatatttcatgtcaaaggaaatcagcagtgatagatgaagggttcgcagcgagagtcccggacttgtctagaaatgagcaggtttacaagtactgttctaaatgttaacacctgttgcatttatattctttccatttgctatcatgtcagtgaacgccaggagtgctttctttgcaacttgtgtaacattttctgttttttcaggttttactgatgaggcttgtgaggccaatcaaaataatgtttgtgatctctactactgttgattttgccctcggagcaaactgaataaagcaacaagatgaaaacaaaaaaaaaaaaaaaaaaaaaaaaaaaatgaggcggcctgggccccaaaagagttttagagaccccaatcgcgtggggggcggcgagggcccccagtagaggtcaagttgcacaaatggggccatagcgtggttcccagagaagacaactcgcgggcgaggcacatcgtggcgtgcgcttccttccaccaaataagaacaagcccccggggggccaccggaccggtttgacaaaaacacgaaggcgggtcgggaggccatacaggggatctcacacggggtccacagcgagtcgaaatcaattcgccggcacnnn

SEQ ID NO: 9966 - DNA, 1524 bp, Homo sapiens
  misc_feature 1, 2, 3, 4, 5, 6, 7, 8, 13, 1523, 1524: n = A,T,C or G
nnnnnnnnctggnaaaaaaaaaataaaaaaaatagtacatttgaaaacaaatgaattctcaactcctacggttatgcggcctacttaatgctgtgaattacatttttcaaatgtttaattttttaaagaaaattaatattctatttttgttaggcttctctagaaatgcagcttttatttattaccccatttctttcaagtccttggaaaataacatattaagggtacaagaaattaacacatgatggaaaagtcattgtgacgccaatgaatttcattgagtataaactcatctacttcaaatttattttataagacaacctaagatactcaagataattatttaatggttagctcttaagttgaattggtctacataatgcgtgggaagaaaaccagatttttagccttcttgccaaatccagacctctggttgatttttctttgacagaagatgcaagttattttccaatttcacaattaaatgtatttaacatgaacattattttgctttaaaaactataaacattgtaggagaattatagccagtcttcagttataaccactccaccctcctcactttctctctctctctctcttttttttttttttttttttgctatgggatttaatgggaaaaatatgtaaaaactgtcactagtcagctggctctttttcctatgaaatctatcagtacctttctccatccgttgttctcaataatgaccacagagcctgagtataccaagaaaaccaatattcgcattacaggttgctcctgtccttccagacacctttcctgcctgtgtgactaacctaattttgctagttccataaatacacgattagtttagtaacagccatcacaatgtaccatgtacattcatggtgagagctaaagatcgacacagacttctaggagctttgttcatactgattacttaatccaattgtatagattgaatatttgagtggaaggaatttacactctgtttaaatgatgggattctatcgagatagcactcatgatcatgacctttttggtagtattcttaaacaaaattctacagagactaaatgttagcgatgatcctccattttcaattttaaccaattctgtcccctttctcaaaaccctgagccctgtgcatgctttctcagtcttgtggtgggactggatacaatgactaacttcccctcctcccctctttaaacaccattttccatggagttcaaaaaaattttttttcttaacgttacatatcatagtgaatggtttccccagtgtatatgaatgttttaagtgtctccaatagcttatgcagtctaagagctttccaatactcatttaattaagatttaatcatttgctaatgggaatcttaccacctttcattttccctctgttaccaaatttcagctcttaggagctgctctacaattctgaattggctttcttgcccctctttaaacaccggacgaggcgcccagatggggccggaaacccttgggccttaaaaacnn

SEQ ID NO: 9967 - DNA, 984 bp, Homo sapiens
  misc_feature 980, 981, 982, 983, 984: n = A,T,C or G
acttcgaggtcttcggcgagatcgaggaggcggtggtcatcaccgaccggcagaacgggcaagtcccggggctatggatttgtcaccatggctgaccgggctgctgccgaaagggcctgcaaggatcccaatcccatcattgatggcagaaaggccaacgtgaacctggcatacttaggagcaaaaccaaggatcatgcaaccaggttttgcctttggtgttcaacaacttcatccagcccttatacaaagacctttcgggatacctgcccactatgtctatccgcaggctttgtgcagccgggagtggtcattccacacgtccagccgacagcagctgccgcctccaccaccccttacattgattacactggagctgcatacgcacaatactcagcagctgctgctgctgccgccgccgctgctgcctatgaccagtacccctatgcagcctctccagctgctgcaggatatgttactgctgggggctatggctacgcagtccagcagccaatcaccgcagcggcacctgggacagctgccgccgccgctgcagcagctgctgccgctgcagcatttggccagtaccagcctcagcagctgcagacagaccgaatgcaatagaccagccatctgatcaaagttgaatcgttttctctttccctcccaattttccaatttttagtagctaataagagagttaacatgacttaacagctttaaaaagaaaaagacagcagtgctatggtgaagcagagttattcattttggttttatactcccaggtagtgtccacgacatgcgacacaggtaaagactgagggcggacatggcccctctctggatattcatcccaaaaggcctggagtaattaaagggcgcttacaaatgagccggagtaacacggaccttccctttgtacgggatccaaattcgggccttaatagatcggaagcaacgcgttacagtcaaagaggtgannnnn

SEQ ID NO: 9968 - DNA, 1662 bp, Homo sapiens
accgagtggcggctgcagcagcgactcctctgagctgagtttgaggcctcggtttcctaagaaaggacagcttaatgcagatgagattagcctgaggcctgctcagtcgttcctaatgaataaaaatcaagtgccaaagcttcagccccagataactatgattcctcctagtgcacaaccaccacgcactcaaacaccacctctgggacagacgcctcagcttggtctcaaaactaatccaccacttatccaggaaaagcctgccaagaccagcaaaaagccaccaccgtcaaaggaagaactccttaaactaactgaaactgttgtgactgaatatctaaatagtggaaatgcaaatgaggctgtcaatggtgtaagagaaatgagggctcctaaacactttcttcctgagatgttaagcaaagtaatcatcctgtcactagatagaagcgatgaagataaagaaaaagcaagttctttgatcagtttactcaaacaggaagggatagccacaagtgacaacttcatgcaggctttcctgaatgtattggaccagtgtcccaaactggaggttgacatccctttggtgaaatcctatttagcacagtttgcagctcgtgccatcatttcagagctggtgagcatttcagaactagctcaaccactagaaagtggcacccattttcctctcttcctactttgtcttcagcagttagctaaattacaagatcgagaatggttaacagaactttttcaacaaagcaaggtcaatatgcagaaaatgctcccaggtaagagaatgctgacttgtttgttttgtttttttaatattatatctagagatttcaggtaccttgagtggatttatgtaggtcagacagtctgattgtcctgctcagataatgataaacattaccacagatctcacctataaagagagatttataatttaactactttcatttgatccgtatgttgagtttttttcatttgctgggttggttctctattctgctacatggatcttacatacttggggacatcatttgtgaagctctgctctctggacaggacaacttggtaaaatgaactattagatgatgcaggtggctttgtctcttcagaaattgatcagaataaggaccgcatgttggagattttggaaggaaagggactgagtttcttattcccactcctcaaattggagaaggaactgttgaagcaaataaagttggatccatccccccaaaccatatataaatggattaaagataacatctctcccaaacttcatgtagataaaggatttgtgaacatcttaatgactagcttcttacagtacatttctagtgaagtaaacccccccagcgatgaaacagattcatcctctgctccttccaaagaacagttagagcaggaaaaacaactactactatctttcaagccagtgaatgcagaaatttcttcatgatcacgttgatctacaagtcagtgccctgtatgctctccaggtgcactggtataacagcaagcttcccaaaaggcatgtcacttcgctctattagtgcacttctatgacatggaaattatagaagaagaagctttcttggccttggacaagaagatataacccaagagtctccgggagaaggcgaggcttcg

SEQ ID NO: 9969 - DNA, 2992 bp, Homo sapiens
aaaaaaaaaaaaaaaaaattagctgggcacggtggtgtggctatagtctgagctactcaggaggctgatgtatgaggatcacctgagtccaggaggtcgaggctgcagtgagccaagatggcgccactgcactccagcctgggtgagagagtgagacactgtcccaaggaaaaaaaaaagtgttggggggtagttcttaagcgttgaagatttcctttttggaaagtatttaaaggtagaaatattaataatttttcctaaaacatctccctaagaagtcactgataattataattagtttaaatttattcttacactacttaagaaaaatttcatttagaaaaggctaccatgagatcttttgactatatggagtagactgcatacagatctctttatttctattatgaatattttagcgattataatcagctattccactgagtattagatttggtcactaagtaactcatgtttttctttagtcaatcattcattcattcactaaaacatttgttgagagttggctaaactctagattctgtgccaggcactgtacagggtgatggagatcactcataagaaggcctcttgctcttagccagatcatatgtaatactaaatttaaattttttgcattaaaaggctaaaaaatcatttgtttttgttaattatatactggttgatttatagatgtaattagcacatattcataagagacaaatatatacaatgagttactatacatatacaaagtgattttagctgtataaagtgatattgcaaaaaactacagctaatgtttcttgctgggtaattattagcataaatatcaggttcttagaggtctttaagagaatactttagagctaccaaaattagcagcagtgatgtaatatcaccctgaaataccaggagcagaggtgccccagagtgcttcacagctatgatcaggaaacttgacctgccccattgctacagcaacggcataaggactaggaaggtccactagctggggaggtcttggaaccctccgagccagaaagaagcattccagcatgattcctcagatgcaatgaggaaggtttacagaattttcacagggcaacagagatcaagtggtatgaaaaggtaggagttttaagctcaagtctcaaagataacctacctttacattctcagtcagaatttgacccagaaagaggaagtttcttcaggaacagaccgtacgttgatgaagtagaagtcatttcagtaaaaacggagtacagaacttggtcataatatcttgcattttatagatttattaaagattagtttcaagttcacattcgctattcagttgtaaaccgaatggatgggaggggagaaaatacaagctctccacacaggtatgctcctctcttttctgagagagaaggcatgggattttcagcataaattccatgttatgtgagtgctgtttgagttctgaagttcctatcaatatctgttcctgcaagtgatctctgtaagaccaccttacatgctggtcttagttattgttaaaattgcaaggtttcttcacaccctctttgataagaagtgtttagctggcagagctttcccttgacttctgagtctagtgtgggttggcccatgacagtgggaagaaatccaacatgttacatggagaccttgtatgtaaacaaactctgtagcctttgaaagtggaactgctttttacagttaaagggctgctaaatggcttgcagatgagatcttctggctcaccttgatcttcacatgaacccattgtgacctatctggatttcctaggacctgtagtttccatttgggttatattagtgcctcaggaatgtgtcactactggtcaagcaatactcagaaattcaggctgagaggggttagattagaggaaagtaatttaggtgagctatccagagctttcaacctcagggtttataggaaaaaaaaaacaaaatacaaaaacccttaggacttctcatactctagccctgaccttgcagtctcctctgaggggcctcctaagacccttaaaataatattacaataggactttgagtgtgcatttcacagtggaaatagcctctggctagcattacttccaaatgctagttccagctaaaaacaagtactttttattagtttcttgtctttcaacattctgccatcaaaatatattcattttattaacttaccgattattgggaacctgcaaaaaaaaaaaaaaaaaaacacacccctgttgtgtgtttggcgcgccccgggtggggcaactttgggaaacgtaaggcagacactttttaactccacggttggtcgggtcaacagaaagtcgagaaatttcggggcaaaagggggcctttcaaaaatagggggggcccggcactttttatagagaaggccccaattccatagggttaaagggggcttggttggccattacatttacggccaggttggtaccggattctcggaattatgaacaaggagtccttttattccggggaaggcccgggtggtcacaacttctctttccttttccttaggggtgggacgcacgtttttggccacatgtgtgtcccattattagggaggtagggttccaggaagttgttaactagctttctcggacacacagtgtctggtgtcttggagggggggaattggcttggtcccatcaccattggaaggatggggcgagtttggtccttgcggggagcggcttctcaaagaggtctggagattgttttacatgtgggtttttcaaaggggggaatccacctggtggctttaagttggatgcctttttttattatcagagatttcaaaggagaagggggcttggagaaatgggtttggcatgttactttggggagatctgaaggagacgggggatatactgggcggttcgttagcatctgggaacacttttggggggtatatgaaagtatcccggtggagagta

SEQ ID NO: 9970 - DNA, 859 bp, Homo sapiens
  misc_feature 859: n = A,T,C or G
aggtacaaatgtgaagaaagctttgtgaaaattcctggcgagaaggactcagtgatctgccttaagggcagtcaatggtcagatattgaagagttctgcaatcgtagctgcgaggtgccaacaaggctaaattctgcatccctcaaacagccttatatcactcagaattattttccagtcggtacctcggccgcccgggcaggtacccaagggatgtttccaagcttcttgatctttaatcttttagcaaccttctgatactggatttaccttcctaggtgtggtgccctccttctggaatttagatctctggggcaaaccctgtcaggatgtgcctctgtgtagttaacactgccccagacagcagctctgatttcagtcacagttctgctgagaagcctgtctgcccctggcaggggtgaggggagggttgttggtggcagatgtagtcagaggcagaggagaccaatggcagacagggtggacctgcaggaaggtagccagaaggaaagaccttgggttttacccaaggtcaaggtggctgtgatagaagagcgaaaggcaaaagtaactaactgaatttcagaattcagaagtaaaagagaaaggaggaggatccctggaccagggactttcacaggaaccaaacatgattcatgaaaaaaaaaaaaaaaaagcaagcttatctgactgatcaagaagacattcttcagaatatactggcaactaaataattttcacaccaaaaatacagacactaaatgagtgtttccttactgggattaatcacattttgataattcattagctctgtatcttctaggttgcttaattcatttagcaaatccacagcttaggn

SEQ ID NO: 9971 - DNA, 326 bp, Homo sapiens
aatgtaaaacaagaatacaggatattggcaatgctaatattcaaaatgggtttaccccagttcataattcctctgctcccctcctacctaaaatctaagaaagtattcattataaattggaagtacaaattgtatcagaagttatttttagaaatgataggtaaccaggtccaatcagtaaaaataagctgcttataactggaaatggccattgagctgtttcctcacaattggcgagatcccatggatgagtaaactgtttctcaggcacttgaggctttcagtgatatctttctcattaccagtgactaattttgccacagggt

SEQ ID NO: 9972 - DNA, 5621 bp, Homo sapiens
  misc_feature 1, 2, 3, 5621: n = A,T,C or G
nnngagctcggacccagggacagcgcttcgggcccccgtcgtgctgccgggattttggagccgggcccgcgctgagggcgccagctgaagaaatttggctattggcgatgagaggtgtgaacagtgaccatactggtatacaacactatgggacctggcatttttctgcatgtgcacccacccccactaataatgtaggaagctgtctggtccattggaaacactaatctgatctcagaagtggctgatcgtggcaggatgtgtcgacgatgatgatggcaagaaagcaagatgtccgaattcccacctacaacatcagtgtggtgggattattctgggaccgagaaggaaaagggccagtgtgggattggaaagtcttgtttgtgcaaccgcttcgtgcgcccgagtgctgacgagtttcacttggaccatacctccgtcctcagcaccagtgactttggagggcgagtggtcaataatgaccactttctctactggggagaagttagccgctccctggaggattgtgtggaatgtaagatgcacattgtggagcagactgaatttattgatgatcagacttttcaacctcatcgaagcacggccctgcagccctatatcaagagagctgctgcgaccaagcttgcatcagctgaaaaactcatgtacttttgcactgaccagctggggctggagcaggactttgagcagaaacaaatgccagacggaaagctgctggttgatggttttcttcttggtattgatgttagcaggggcatgaataggaactttgatgaccagctcaagtttgtctcctatctctacaatcagcttgcaaaaacaaaaaagcccatagtggtggtcctgactaagtgtgacgaaggtgttgagcggtaccttagagatgcacatacttttgccttaagcaaaaagaacctccaggttgtggagacctcagcgagatccaatgtaaacgtggacttggctttcagcaccttagtgcaactcattgataaaagtcggggaaagacaaaaatcattccttattttgaagctctcaagcagcagagtcagcagatagctacagcaaaagacaagtatgagtggctggtgagtcgcattgtgaaaaaccacaatgagaactggctgagtgtcagccgaaagatgcaggcctctccagaataccaggactatgtctacctggaagggactcagaaagccaagaagctgtttctacagcacatccaccgcctcaagcatgagcatatcgagcgtaggagaaagctgtacctggcagccctgccattagcttttgaagctcttatacctaatctagatgaaatagaccacctaagctgcataaaagccaaaaagctcttagaaaccaagccagaattcttgaagtggtttgttgtgcttgaagagaccccatggatgccaccagtcacattgacaacatggaaaacgaacggattccctttgatttaatggataccgtccctgcagagcagctatacgaggcccacttagagaagctgaggaacgaaaggaaaagagttgagatgcgaagggcgtttaaagaaaacctggagacttctcctttcataactcccggaaagccttgggaagaggcccgtagttttattatgaatgaggatttctaccagtggctggaggaatctgtatacatggatatttatggcaaacaccaaaagcaaattatagataaagcaaaggaagaatttcaggagttgcttttggaatattcagaattgttttatgaactggagctggatgctaagcccagcaaggagaagatgggtgttattcaggatgttctgggagaggaacagcgatttaaagccatttacaaaagctccaagcagagcgttgatgcccttattctgaaacacattcattttgtgtaccacccaacaaaggagacatgccccagctgcccagcttgtgtggacgctaagattgagcacttgattagttctcggtttatccggccgtctgaccggaatcagaaaaattcactctctgaccctaacattgatagaatcaacttggttatattgggcaaagacgccttgcccgagagttggccaatggagattagagctctttgtacaaatgatgacaagtatgtgatagatggtaaaatgtatgagctttccctgaggccaatagaggggaatgtcaggcttcctgtgaactctttccagacgccaacatttcagccccacggctgtctctgcctttacaattcaaaggaatcgctatcctatgtagtggaaagtatagagaagagtagagagtccacgctgggccggcgggataatcatttagtccatctcccccttacattaattttggttaacaagagaggagacaccagtggagagactctgcatagcttaatacagcaaggtcaacaaattgctagcaaacttcagtgtgtctttctcgaccctgcttctgctggcattggttacggacgcaacattaatgaaaagcaaatcagtcaagttttgaagggactcctggactctaagcgtaacttaaacctggtcagttctactgctagcatcaaagatttggctgatgttgatctgcgaattgttatgtgtctgatgtgtggagatccttttagtgcagatgacatactttttcctgtccttcagtcccaaacctgtaaatcttcccattgtggaagcaacaactctgttttacttgaactaccaatcggactgcacaagaagcggattgaactgtctgttctttcataccattcctcctttagcatcagaaagagccggttggttcatgggtacattgttttttattcagccaaacgtaaggcctctttggctatgttacgtgcctttctttgtgaagtgcaggatattatccctattcagcttgtagcactcactgatggcgctgtagatgtcctggacaatgacttaagtagggaacagctaactgagggggaggagattgctcaagaaattgacggaaggttcacaagcatcccctgtagccaaccccagcataaacttgagatctttcacccattttttaaagatgtggtggaaaaaaagaacataatcgaggctactcatatgtacgataatgctgccgaggcctgtagcaccaccgaagaggtgtttaactccccccgggcaggatcaccgctctgcaactcaaacctgcaggattcagaagaagatatcgagccatcttacagcctgtttcgagaagacacatcactgccttctctgtccaaagaccattctaagctctctatggaactggagggaaatgatgggctgtctttcattatgagcaattttgagagtaaactgaacaacaaagtacctccgccagtcaaaccaaagcctcctgtccattttgaaattacaaagggggatctatcttatttagaccaaggccatagggatggacagaggaagtctgtgtcttctagcccctggctgcctcaggatgggtttgatccttctgactatgctgaacccatggatgctgtggtgaagccaaggaatgaagaagaaaacatatactccgtgccccatgacagcacccaaggcaaaatcatcaccattcggaatatcaacaaagcccagtccaacggcagcgggaatggttctgacagtgaaatggacaccagctctctagagcgagggcgcaaggtttccatcgtgagcaagccagtgctgtacaggacgagatgcacccggctggggcggtttgctagttaccggaccagcttcagcgtggggagtgatgatgagctggggcccatccggaagaaagaggaggatcaggcatcccagggttataaaggggacaatgctgtcattccatacgaaacagacgaagacccgcggaggaggaatattcttcgcagcctaaggaggaacactaagaaaccaaagcccaaaccccggccatccatcacaaaggcaacctgggagagtaactattttggggtgcccttaacaactgtcgtgactccagagaagccgatccccatttttattgaaagatgtattgagtacattgaagccacaggactgagcacggaaggcatctaccgggtcagcgggaacaagtctgagatggagagtctgcagagacagtttgatcaagaccacaacctggacctggcagagaaagactttacggtgaataccgtggctggtgccatgaagagctttttctcagaactgcctgaccccctggtcccgtataacatgcagatcgacttggtggaagcacacaaaatcaacgaccgggagcagaagttgcatgcccttaaggaggtattaaagaaatttccaaaggaaaaccacgaagtcttcaagtatgtcatctctcacctaaacaaggtcagccacaacaacaaggtgaatctcatgaccagcgagaacctctccatctgcttctggcccaccttgatgagacctgatttcagcactatggacgccctcacagccacgcgcacctaccagacaatcattgaactctttatccagcagtgccccttcttcttctacaatcggcccatcaccgagccccccggcgccaggcccagctccccctctgccgtggcttccaccgtccccttcctcacttccacgcctgtcacaagtcagccgtcgcccccacagtcgcctccacccaccccccagtccccaatgcagccactgcttccctcccagcttcaagccgaacacacgctgtgagccaccaagacctggggcgacaggagaaccggtcctctctctgacggggtggcatttggccttgaacaaaaccaagtccactggggacagaggcaggggcaagtggctctccccattaccttctcaagacctcagtgggagcaccagccaatggtaccatcggctgggctgccaggtaccctgggcctggcgctgcagacctgagctggcttggacccatttgaggactgaactaggcaggcaatggctccagtgccctccctctgttccctggaccaccaccccacgtagctgctcacaccagcctccgggtgcctccctctgcttgtacagagcccatggtcgggacagtgccctggcctttgccggggaggaggatgctctgagattcagggtggggctggcaacccctgaagagaacacttcctgttggtctgtctcttcccaccttccatctgcacacacccccaaggtaagggtacagcccggctggcggcctccttgggaacgtgtaggccacggctctgccaccactaggtacctgctgagggcgctggctctgcagatcagaacaacggaggatagctttgtgcctggacccagagagtgtgggactccccgcttcatccccaccgtcccactccacagccttcccgaaacattccctggcaaacaaaggaacactaggagaaaaaatggaaaaacccttccagtaattaaaaaggaagaaaccacagaaagaaaactacagacctcaagattccactctgtgcccgcctctgccggggggaggggaggcacacaagtggagctgaccctcgtctttgtggcagcaaaaccaggatgccn

SEQ ID NO: 9973 - DNA, 1786 bp, Homo sapiens
aaccaggccggagcggtgggctggagccgagctgcggggagcctgctccgtggtgcccccaccccctgcgcgcctcagtggtgcctggccgagggcagggctcgcggttgcggtggctcgcgccgctgtcagtgcggcggggcgcgcgagcggcgccagctcggggcagcggaacccagagaagctgagggggcggtagcggcggcgacggcgacgacgacgactcccgcgcgtgtgcccagcctcttcccgccgcagccgcccttttcctccctcccttacgtccccgagtgcggcagtaccgcctccttcccagccgcgcggcttcctccagacctctcggcgcgggtgagccctattcccagaggcaggtggtgctgaccctgtaacccaaaggaggaaacagctggctaagctcatcattgttactggttcccagagagggggcttcttgaaaagcaagtagagcagaagactggtgagcacggtgtttcccagcatctccacagtgccagcacagaggaggacactcaagaaatgtttgttaagtgggcaccatgtccttgaagcttcaggcaagcaatgtaaccaacaagaatgaccccaagtccatcaactctcgagtcttcattggaaacctcaacacagctctggtgaagaaatcagatgtggagaccatcttctctaagtatggccgtgtggccggctgttctgtgcacaagggctatgcctttgttcagtactccaatgagcgccatgcccgggcagctgtgctgggagagaatgggcgggtgctggccgggcagaccctggacatcaacatggctggagagcctaagcctgacagacccaaggggctaaagagagcagcatctgccatatacagtggctacatctttgactatgattactaccgggacgacttctacgacaggctcttcgactaccggggccgtctgtcgcccgtgccagtgcccagggcggtccctgtgaagcgaccccgggtcacagtccctttggtccggcgtgtcaaaactaacgtacctgtcaagctctttgcccgctccacagctgtcaccaccagctcagccaagatcaagttaaagagcagtgagctgcaggccatcaagacggagctgacacagatcaagtccaatatcgatgccctgctgagccgcttggagcagatcgctgcggagcaaaaggccaatccagatggcaagaagaagggtgatggaggtggcgccggcggcggcggcgcgtggtggtggcagcggtggcggtggcagtggtggtgcgcggtggcggctggcagcagccggccaccagccccccaagagaacacaacttctgagggcaggcctgccccaggggcaagcacgggacccgagacgacggcgatgagcgaagggctcctgacacacagcgaggaagagctggaacacagccaggacacagacgcgatgatgcgcgcctggcagtaaagcagctgacaggagcatggcaccaggcaggtgaagggcatcgctgcccagggctcaagccgggcacccaacgctgggatgccaccccccaagcggttaccacgaggaaggtgaagagggcctcttccccaaagctccagcaatgccagtctctggaagggggtcaggccaatcttcccatagactccgatgatggccagcaaggttaatgcacgggtttcccttaaacctcccagaagacagaggggactaagaagaggggggccaggggccgccacaaaaggtccaaagaggggggatca

SEQ ID NO: 9974 - DNA, 2400 bp, Homo sapiens
accacgcgtccgcccatgcgtccgaaagtacttaaatttttaaataagggcttatgtgatacaagatacggaaacaaaagtttttggatttttatgcagtagtttgcaggaaagcaaatacatagtagatcgtatgccacttaggtatgttcaggtcatgccagtttattcttgttgggccacacacacatgtatgtgtgtgtaaaaggaatttttagtattgaagcaaacaaattgtcagtttaataattttctcttacatagcacaagatggcagataccacctactgtacaacaatctaataatccctaccttagttcccctgagttatagaagatgctaaagatttagttgtaaagggaagtaacatgatttttttttttctaaaaagctgttttaagctaactattattttgctactggaaaattatattttaaaacttacagatatttaaagtatgctagaaaatttgaacctgataacaactgaaccttttgtcttgaataaatttctcaaatagaactgtgcaaaccctagcactttatgtgttgctgcctccccatacctaggtatgctctgtaataagctcccatttaatggagagatgtgtggaggcactgagaagttaatgaagaaaaatcaaccctaagaaatccttattgtcacatagtgtcttttaaaaaataactgtagagactgtgttaattcgagtgcctttcttacttttttgggagcaagattatatttaatgtttaagaaaacaggatggaagttttatcaaacagttgattgtggcccattgttttatttattcccatcgctaggcatggccccgtagggtattttatccttcagtgagagactgatataagcaggcaggatgctttgattattccattagttatcattttaagcaccctaccaagatttagttctttctttctggcaactaacgttttgggggttggaggcatcccatttagaggatggtgtgtgcacaaatagattagcctgaaacctgcgtccaaagggaaacagtggcactctgccctaaaataaaggccagaacgttgtcctaaatgaatcctttgccttactttaggaccttccttccctctcaaattcaggcataatgtaatatagttgaaagggggaagcggcggcaggcgccatgtccggccgcgaaggtggcaagaagaagccactgaaacagcccaagaagcaggccaaggagatggacgaggaagataaggctttcaagcagaaacaaaaagaggagcagaagaaactcgaggagctaaaagcgaaggccgcggggaagggggcccttggccacaggtggaattaagaaatctggcaaaaagtaagctgttccttgtgcctgaggagatggtgaccctttatttcatctgtatttaaacctctctattccctgccataacatcttttgccacgtatagctggaattaagtgttgtcttggagctgttgtacatttaagaataaacttttgtaaaaaaagaaaaatcttacagtggctcatcatctctttagttgtattcactaagtcgttcctaccataactgtgaatttaaagtaaaaccagctcagaatcttgccagagtctgttctttggtccttgttctaccctaaactttgtatcacctgaaattaaaccaactcatttgaacaaacaaaaacaaaaacaacacaaaaaaaaaacaaaaacaaacaaaacaaaacagggggtgggcgcccacaaaaaatacacccagagaaagggcccacaattatagcgagctacccgagatatgttgtgaacaaggaggtggccccatatagggagggcgcgaatataaaacgaatgccgcagcggcgagagaggtacaacaagagcgaggatgagcggggaaacaacacgtacagaaggggaaacctctgggaggagagcaaacccccaccacgccgcgcgggggcacacacaattgagggagaccaccacacctcagacaaggcaacataacagcgcccgcacgagcacaaatacacaccgcagcgcgcaactagtgagggatcaaccacagcgaatcatatacgcaggacgagaacagactggaccatgagggtggaataaaacatcaggcgcacgagagagaaggaaacagcagcacacgtacagatgacaaggaccaggagcggacgcgagccaccagcgcagcaaggcgcgcgatgaccacatgtggtaaccccgcgaagcacagaccaacaacgcagataccagaaagcaggaaggcaccaaccgagccagctcacaccacgcccgacgccgcgacacagcagggcagaccagcgccgactacagccgctaacaccgacgccatcgaaccacacacgcgcag

SEQ ID NO: 9975 - DNA, 1252 bp, Homo sapiens
  misc_feature 1, 1249, 1250, 1251, 1252: n = A,T,C or G
nagacgcagcctaggttcccatggacttgtcataagacaaaagaggacagctgtgctgagggggcaggttctgcagcctcctattcacagcatctcagacgcagcctaggccgcaccaggatgtcggacaccgaggagcaggaatatgaggaggagcagccggaagaggaggctgcggaggaggaggaggaagaagaggaacgccccaaaccaagccgccccgtggtgcctcctttgatcccgccaaagatcccagaaggggagcgcgttgacttcgatgacatccaccgcaagcgcatggagaaagacctgctggagctgcagacactcatcgatgtacatttcgagcagcggaagaaggaggaagaggagctggttgccttgaaggagcgcattgagcggcgccggtcagagagagccgagcaacagcgcttcagaactgagaaggaacgcgaacgtcaggctaagctggcggaggagaagatgaggaaggaagaggaagaggccaagaagcgggcagaggatgatgccaagaaaaagaaggtgctgtccaacatgggggcccattttggcggctacctggtcaaggcagaacagaagcgtggtaagcggcagacggggcgggagatgaaggtgcgcatcctctccgagcgtaagaagcctctggacattgactacatgggggaggaacagctccgggagaaagcccaggagctgtcggactggatccaccagctggagtctgagaagttcgacctgatggcgaagctgaaacagcagaaatatgagatcaacgtgctgtacaaccgcatcagccacgcccagaagttccggaagggggcagggaagggccgcgttggaggccgctggaagtgaggatgccgccccggacagtggcacctgggaagcctgggagtgtttgtcccatcggtagcttgaaataaacgctcccctcagacacccgctgggttctctgatgttattatggttgagatgcaccggctcgctccagcgcccacaaaacagcctacaaagaacaacgctaaagggcgacgcagcggcaccaaagactacagacgcaacggcgcacagcgctggcacagaaggagagaccggagccgacgcaaagggcgcggaaccgaccaaaaaaaaagcccggcgggaacgcgcagcctgagaaacaccaaaaggaaccagagggccagaggggatccacaagaggcgacaagagcgatataatcccccgacnnnn

SEQ ID NO: 9976 - DNA, 741 bp, Homo sapiens
  misc_feature 1, 2, 3, 4, 5: n = A,T,C or G
nnnnncactacagatgcaagcatctgattttatttcaaatattttgcatccaagtttgcttacatacacagatattaaacctacagatacaaaaagctgagtgtacttacaaattaataactgtacacaggcagcataaaattctctttgtacatgccaaaaacattccgtgtccacccagggtgaacacagccacttcacaaacagggtgtaaataaggaggttcactaagtacaggaaagttacaagaccatattggcattttaacagccattcctgagaaagagaatgggaaagggcttaagagtcagaggagaggaaaagaggaaaacagatgacctccaacatcagaatggtaacatgttaccattttatatgtgaaactcaggaagttcttgattttttaagagctgtattccttaatctggttacaggctataaaggagataatcatttacatgatcatattctcaaacagatggtcaccaaatggaatcaaaggactgatttgatgtagccggtagtatgataatttgtagttaaatgaaaatacagatagatccagaaaaataagtaatttcccagtagccagttaataaattacagacctagaataagcaatttaacaagattagaaaagcaactctgatacaaatgtgttgataacaagtacctcggccgcccgggcaggtcaaaagcacacaaaactcgccaagctcgccttctggctcctggcggttc

SEQ ID NO: 9977 - DNA, 6118 bp, Homo sapiens
  misc_feature 6118: n = A,T,C or G
agtcgacccacgcgtccgccctatttcccggggtgggaacgccgggaggcgggaggaattccggctgccaggggcgtccggttacatccccgccttcctctgtcctggccgcgggaccgggtttgcgggaccgcagttcgggaacatgttggcctcgagcagccggatccgggctgcgtggacgcgggcgctgctgctgccgctgctgctggcggggcctgtgggctgcctgagccgccaggagctctttcccttcggccccggacagggggacctggagctggaggacggggatgacttcgtctctcctgccctggagctgagtggggcgctccgcttctacgacagatccgacatcgacgcagtctacgtcaccacaaatggcatcattgctacgagtgaacccccggccaaagaatcccatcccgggctcttcccaccaacattcggtgcagtcgcccctttcctggcggacttggacacgaccgatggcctggggaaggtttattatcgagaagacttatccccctccatcactcagcgagcagcagagtgtgtccacagagggttcccggagatctctttccagcctagtagcgcggtggttgtcacttgggaatccgtggccccctaccaagggcccagcagggacccagaccagaaaggcaagagaaacacgttccaggctgttctagcctcctctgattccagctcctatgccattttcctttatcctgaggatggtctgcagttccatacgacattctcaaagaaggaaaacaaccaagttcctgccgtggttgcattcagtcaaggttcagtgggattcttatggaagagcaacggagcttataacatatttgctaatgacagggaatcaattgaaaatttggccaagagtagtaactctgggcagcagggtgtctgggtgtttgagattgggagtccagccaccaccaatggcgtggtgcctgcagacgtgatcctcggaactgaagatggggcagagtatgatgatgaggatgaagattatgacctggcgaccactcgtctgggcctggaggatgtgggcaccacgcccttctcctacaaggctctgagaaggggaggtgctgacacatacagtgtgcccagcgtcctctccccgcgccgggcagctaccgaaaggccccttggacctcccacagagagaaccaggtctttccagttggcagtggagacttttcaccagcagcaccctcaggtcatagatgtggatgaagttgaggaaacaggagttgttttcagctataacacggattcccgccagacgtgtgctaacaacagacaccagtgctcggtgcacgcagagtgcagggactacgccacgggcttctgctgcagctgtgtcgctggctatacgggcaatggcaggcaatgtgttgcagaaggttccccccagcgagtcaatggcaaggtgaaaggaaggatctttgtggggagcagccaggtccccattgtctttgagaacactgacctccactcttacgtagtaatgaaccacgggcgctcctacacagccatcagcaccattcccgagaccgttggatattctctgcttccactggccccagttggaggcatcattggatggatgtttgcagtggagcaggacggattcaagaatgggttcagcatcaccgggggtgagttcactcgccaggctgaggtgaccttcgtggggcacccgggcaatctggtcattaagcagcggttcagcggcatcgatgagcatgggcacctgaccatcgacacggagctggagggccgcgtgccgcagattccgttcggctcctccgtgcacattgagccctacacggagctgtaccactactccacctcagtgatcacttcctcctccacccgggagtacacggtgactgagcccgagcgagatggggcatctccttcacgcatctacacttaccagtggcgccagaccatcaccttccaggaatgcgtccacgatgactcccggccagccctgcccagcacccagcagctctcggtggacagcgtgttcgtcctgtacaaccaggaggagaagatcttgcgctatgctctcagcaactccattgggcctgtgagggaaggctcccctgatgctcttcagaatccctgctacatcggcactcatgggtgtgacaccaacgcggcctgtcgccctggtcccaggacacagttcacctgcgagtgctccatcggcttccgaggagacgggcgaacctgctatgatattgatgaatgttcagaacaaccctcagtgtgtgggagccacacaatctgcaataatcacccaggaaccttccgctgcgagtgtgtggagggctaccagttttcagatgagggaacgtgtgtggctgtcgtggaccagcgccccatcaactactgtgaaactggccttcataactgcgacataccccagcgggcccagtgtatctacacaggaggctcctcctacacctgttcctgcttgccaggcttttctggggatggccaagcctgccaagatgtggatgaatgccagccaagccgatgtcaccctgacgccttctgctacaacactccaggctctttcacgtgccagtgcaaacctggttatcagggagacggcttccgttgcgtgcccggagaggtggagaaaacccggtgccagcacgagcgagaacacattctcggggcagcgggggcgacagacccacagcgacccattcctccggggctgttcgttcctgagtgcgatgcgcacgggcactacgcgcccacccagtgccacggcagcaccggctactgctggtgcgtggatcgcgacggccgcgaggtggagggcaccaggaccaggcccgggatgacgcccccgtgtctgagtacagtggctcccccgattcaccaaggacctgcggtgcctaccgccgtgatccccttgcctcctgggacccatttactctttgcccagactgggaagattgagcgcctgcccctggagggaaataccatgaggaagacagaagcaaaggcgttccttcatgtcccggctaaagtcatcattggactggcctttgactgcgtggacaagatggtttactggacggacatcactgagccttccattgggagagctagtctacatggtggagagccaaccaccatcattagacaagatcttggaagtccagaaggtatcgctgttgatcaccttggccgcaacatcttctggacagactctaacctggatcgaatagaagtggcgaagctggacggcacgcagcgccgggtgctctttgagactgacctggtgaatcccagaggcattgtaacggattccgtgagagggaacctttactggacagactggaacagagataaccccaagattgaaacttcctacatggacggcacgaaccggaggatccttgtgcaggatgacctgggcttgcccaatggactgaccttcgatgcgttctcatctcagctctgctgggtggatgcaggcaccaatcgggcggaatgcctgaaccccagtcagcccagcagacgcaaggctctcgaagggctccagtatccttttgctgtgacgagctacgggaagaatctgtatttcacagactggaagatgaattccgtggttgctctcgatcttgcaatttccaaggagacggatgctttccaaccccacaagcagacccggctgtatggcatcaccacggccctgtctcagtgtccgcaaggccataactactgctcagtgaacaatggcggctgcacccacctatgcttggccaccccagggagcaggacctgccgttgccctgacaacaccttgggagttgactgtatcgaacagaaatgaagacaagagtgccttatttcctttccaagtatttcacagcaacactctacttgaagcaacttggtccagattgaaaagtgtcctctggctgagtggccactaggcccagacccagcccagcctgagccccaacaacttttccctcactgttccccaaaacatgcaccctggacttctctaatagaaaagtctccacccctacacaaggacagaaccctccacccctacccccaaccctcagacagacttatacacccctgagtgaggattacatgcccatcccagtgtcctaggaccttttcccaatactagccccccagtggtgaacagaacctcccaaatttgagttgcacccttccctgtggccttatgagctcagcctcgctttgaggtacccaccgtcctgtcagctccttgacctatgagccggggcctgactaggaaaagttgggagttaaggaggaaattagcattccttaatgttttgttttggtgctctgaatttcttctttattatagtcctatagttttactcctcagttcctcaccatcatcatcttgtctaagacccccattataatattcatgcgctgctttttcatcaaaacctaccctgtcctagagatctatgggcatttggtggatgataatgagcagcccctcccagatagaatgtcaatatttgagcagtaggatattggcatttgttagttaaaggcttaaatcaaaagaatgtccaatggtaggaatttcaaggtgtaggtcagatatttgagaataggggatttttttgatgtgccttaaattataccaaagattactaattattcctctttgcccaaaatacttgcatccaaggttctagtctctgttgctgtgctggtctttagccccactgcttgcactgatgtccctccttttcacggagacctatctgaggtacaggatggggctggcaccagatgatgtcccaccacagtccctcacctccggcctccacatgacagaaccaatttacactcaaccatgacctcacccctccttggtttctccctcgatctgtggccctttttggatgtattcttatctaacaacacaatccggaaagactgaattgaatatttatactaatggttcatatcctttattgctcaatgatctaattaaagggatcattgccacatttcatgtttatatttctacaatttgtttagaaaacatctcctgaccatatcagtagctcgtgttatctttttatcaactgcttcccagagtcctaaaacaatagaaattttggattgaaaagttcagcataaggagtttgagtcagtaaaggatgggataaaggagtcgagatgattcaatgaaaagtatcacaaaaaagagattgatcaacaagagaaataaaaaagcccaagaggaagtggtaggggaaggaatttaagaacagcaataagtaaaactcttaagtaactccaaaaagaaaatggtacattttgccaaagaccacttatacttgagaacatggaagaatttgcctgatactctctttggggaaaagagtctctcctcttttcctcaaaccccagtacactcagcctctctgccccaccttctcctgactttgtcctcacttgcttctgcagtacattggaacctgaattgaaagaaagtcttccttgaataattggagtttgtcttgagaggcaaatatagccccaagaatcacaagattcgaggaccatgtaggtcttttacgtagcccaaatccataaattagtctcactttttgtatttatcgtttcatattaaaccctctatatcaaatgttcatcatgattttgtatgatttttataactattttattcattttattagatttattctaaaattttttaatggtaaattcttaaactgtggaaaccactgaaggtgcttattaactgttctcccagatttgtacaagtattggatgattccttgagtttacagctgtacaaatagtgtggaaaataaactttttttaaaagaaaaaaaaacgccacgaaaaaaaagggagctcaaaacaggcccgaaaccgccaggcatgaagccacaaaccagaggaggcgcaaccgaagaaaacgaccacaaacgggacccaaaacgacgaagacgcagaacatacagggaggaccactcagcgaatgaccaaaacaagaccaaaacacacacgccgacacaaacan

SEQ ID NO: 9978 - DNA, 606 bp, Homo sapiens
  misc_feature 601, 602, 603, 604, 605, 606: n = A,T,C or G
gctttttttttttttttttttttttttttttttcccaaaattagcattttattcaaaacgctggggtcagaggtgtatcatttatattctggtaggaattgtatttaccttttataattattattagggggggtatggctaatgagttctgattcacccacgaaggttacatttatgctgaatacatttgtaaatactcagttttatactgtatgtatatgatggctactctaaaggtttggatatatgtattgtaattagaattgttggcatgatgacatttcatttgtgccaaaaatattaaaaatgcctttttggagggactaacagaaagcacctgatttgcacttgaaccagattatagatttaaaagtttatgacatgtattttgtttttaaaactagaatagccagtatttatgttttttataaaactgtgcaataccaattatgcaatcacaatacatttgtagctcccgagtgtcctaaagggagtgcacttctttgaagctggtgtgttaatactatgtaataaatggttaactttcaaatgatgctgctgccaaaattatattaatagtgagtttcaggcccctgggcannnnnn

SEQ ID NO: 9979 - DNA, 4772 bp, Homo sapiens
  misc_feature 4771, 4772: n = A,T,C or G
tacgcggggacacacacacacaagcacacacgcgctcacacacagagagaaaatccttctgcctgttgatttatggaaacaattatgattctgctggagaacttttcagctgagaaatagtttgtagctacagtagaaaggctcaagttgcaccaggcagacaacagacatggaattcttatatatccagctgttagcaacaaaacaaaagtcaaatagcaaacagcgtcacagcaactgaacttactacgaactgtttttatgaggatttatcaacagagttatttaaggaggaatcctgtgttgttatcaggaactaaaaggataaggctaacaatttggaaagagcaactactctttcttaaatcaatctacaattcacagataggaagaggtcaatgacctaggagtaacaatcaactcaagattcattttcattatgttattcatgaacacccggagcactacactataatgcacaaatggatactgacatggatcctgccaactttgctctacagatcatgctttcacattatctgtctagtgggtactatatctttagcttgcaatgacatgactccagagcaaatggctacaaatgtgaactgttccagccctgagcgacacacaagaagttatgattacatggaaggaggggatataagagtgagaagactcttctgtcgaacacagtggtacctgaggatcgataaaagaggcaaagtaaaagggacccaagagatgaagaataattacaatatcatggaaatcaggacagtggcagttggaattgtggcaatcaaaggggtggaaagtgaattctatcttgcaatgaacaaggaaggaaaactctatgcaaagaaagaatgcaatgaagattgtaacttcaaagaactaattctggaaaaccattacaacacatatgcatcagctaaatggacacacaacggaggggaaatgtttgttgccttaaatcaaaaggggattcctgtaagaggaaaaaaaacgaagaaagaacaaaaaacagcccactttcttcctatggcaataacttaattgcatatggtatataaagaaccagttccagcagggagatttctttaagtggactgttttctttcttctcaaaattttctttccttttattttttagtaatcaagaaaggctggaaaactactgaaaaactgatcaagctggacttgtgcatttatgtttgttttaagacactgcattaaagaaagatttgaaaagtatacacaaaaatcagatttagtaactaaaggttgtaaaaaattgtaaaactggttgtacaatcatgatgttagtaacagtaatttttttcttaaattaatttacccttaagagtatgttagatttgattatctgataatgattatttaaatattcctatctgcttataaaatggctgctataataataataatacagatgttgttatataaggtatatcagacctacaggcttctggcaggatttgtcagataatcaagccacactaactatggaaaatgagcagcattttaaatgctttctagtgaaaaattataatctacttaaactctaatcagaaaaaaaattctcaaaaaaactattatgaaagtcaataaaatagataatttaacaaaagtacaggattagaacatgcttatacctataaataagaacaaaatttctaatgctgctcaagtggaaagggtattgctaaaaggatgtttccaaaaatcttgtatataagatagcaacagtgattgatgataatactgtacttcatcttacttgccacaaaataacattttataaatcctcaaagtaaaattgagaaatctttaagtttttttcaagtaacataatctatctttgtataattcatatttgggaatatggcttttaataatgttcttcccacaaataatcatgcttttttcctatggttacagcattaaactctattttaagttgtttttgaactttattgttttgttatttaagtttatgttatttataaaaaaaaaaccttaataagctgtatctgtttcatatgcttttaattttaaaggaataacaaaactgtctggctcaacggcaagtttccctcccttttctgactgacactaagtctagcacacagcacttgggccagcaaatcctggaagcagacaaaaatgagagcctgaagcaatgcttacaatagatgtctcacacagaacaatacaaacatgtaaaaaatctttcaccacatattcttgccaattaattggatcatataagtaaaatcattacaaatataagtatttacaggattttaaagttagaatatatttgaatgcatgggtagaaaagtatcatattttaaaactatgtatatttaaatttagtaattttctaatctctagaaatctctgctgttcaaaaggtggcagcactgaaagttgttttcctgttagatggcaagagcacaatgcccaaaatagaagatgcagttaagaataaggggccctgaatgtcatgaaggcttgaggtcagcctacagataacaggattattacaaggatgaatttccacttcaaaagtctttcattggcagatcttggtagcactttatatgttcaccaatgggaggtcaatatttatctaatttaaaaggtatgctaaccactgtggttttaatttcaaaatatttgtcattcaagtccctttacataaatagtatttggtaatacatttatagatgagagttatatgaaaaggctaggtcaacaaaaacaatagattcatttaattttcctgtggttgacctatacgaccaggatgtagaaaactagaaagaactgcccttcctcagatatactcttgggagagagcatgaatggtattctgaactatcacctgattcaaggactttgctagctaggttttgaggtcaggcttcagtaactgtagtcttgtgagcatattgagggcagaggaggacttagtttttcatatgtgtttccttagtgcctagcagactatctgttcataatcagttttcagtgtgaattcactgaatgtttatagacaaaagaaaatacacactaaaactaatcttcattttaaaagggtaaaacatgactatacagaaatttaaatagaaatagtgtatatacatataaaatacaagctatgttaggaccaaatgctctttgtctatggagttatacttccatcaaattacatagcaatgctgaattaggcaaaaccaacatttagtggtaaatccattcctggtagtataagtcacctaaaaaagacttctagaaatatgtactttaattatttgtttttctcctatttttaaatttattatgcaaattttagaaaataaaatttgctctagttacacacctttagaattctagaatattaaaactgtaaggggcctccatccctcttactcatttgtagtctaggaaattgagattttgatacacctaaggtcacgcagctgggtagatatacagctgtcacaagagtctagatcagttagcacatgctttctactcttcgattattagtattattagctaatggtctttggcatgtttttgttttttatttctgttgagatatagcctttacatttgtacacaaatgtgactatgtcttggcaatgcacttcatacacaatgactaatctatactgtgatgatttgactcaaaaggagaaaagaaattatgtagttttcaattctgattcctattcaccttttgtttatgaatggaaagctttgtgcaaaatatacatataagcagagtaagccttttaaaaaatgttctttgaaagataaaatacatgagtttctaacaattagaaaggaaaaaattaaaatatgaaataacaaaagtaaacaaaagatactttcaaagcagtgaacaaaacattttgacataagccataatataaattataatataaaaacataaaaaccatagtataaattgtcagtctttgagttggccacaaattcaatttaatgaaagaagagaagggatgctggaggtaaataaattcttagagtttctatctcatagagtttgctcttctggttctctagactgccaaagaacataaagatgtacaaggggacctagctgtagtaaaagcatacctataacaacaaaaactctaaaacggtgcccctcatgattttctactgaaatttctctaatagtagaggtataaaataagaagttagagaataatacaaaaggggcccaccatagaaagcacatttcttttctcttaagactcatgtgattttgcatcttactccataatgtattagtggttgcattaatatgacaatgtctgcaattaaacaccagtaagcaaaattgatacatcagaatgacttgcagggcttatcacgcaagttcatttacatcctaccccactgcattaattgagcgtgatgacacacgagaaaattcctgcttcataatgcatttacacttaatacaccagttaagaaaccgaattcaattccctgctctgggtgttacacaaattcacagccgtaggggatccggcatccaatatcacgttatcaaaggtggcgccctggcaactgtggttttctgaacccaaacgagggaaatctaagcccggctgatccacgttcatgaacccacctctctccaaaaagggctactcgacaccctagacatttacagccggatctcccccacatcatattatacttcccnn

SEQ ID NO: 9980 - DNA, 310 bp, Homo sapiens
gtggtcgcggccgaggtacccctttattgctcaaagaaagcaagccacaaacaataatgaagcaaaaaatggaatctaagaatctttttgtatggaatattacttctatcagaagatgatcaagatgtttcagtccagtgcacatcagcattgctgacattttatggattctaaacttgtgttgtttcttttttaaatcaactttttaaaaaaataaagtgtaaattaaccgactagagtactgtcctggcaatgggactgatggtgccattttcttttagtatatttccacagattggacagatacagt

SEQ ID NO: 9981 - DNA, 1077 bp, Homo sapiens
actatagggagtcgacccacgcgtccgccctagcgccgctgggcctgcaggtctctgtcgagcagcggacgccggtctctgttccgcaggatggggtttgttaaagttgttaagaataaggcctactttaagagataccaagtgaaatttagaagacgacgagagggtaaaactgattattatgctcggaaacgcttggtgatacaagataaaaataaatacaacacacccaaatacaggatgatagttcgtgtgacaaacagagatatcatttgtcagattgcttatgcccgtatagagggggatatgatagtctgcgcagcgtatgcacacgaactgccaaaatatggtgtgaaggttggcctgacaaattatgctgcagcatattgtactggcctgctgctggcccgcaggcttctcaataggtttggcatggacaagatctatgaaggccaagtggaggtgactggtgatgaatacaatgtggaaagcattgatggtcagccaggtgccttcacctgctatttggatgcaggccttgccagaactaccactggcaataaagtttttggtgccctgaagggagctgtggatggaggcttgtctatccctcacagtaccaaacgattccctggttatgattctgaaagcaaggcaatttaatgccagaaagtacatcgggaagcacatcatgggcccagaaatgttgcagaattacatgcgctacttaatgggaagaagatgaaagatgcttacaagaaaacagttctctcaatacataaagaacaggggtaactcccagaacatgatggacggagatgtataagaaagctcatgctgctatacgagagaatccagtctatgaaaagaagcccaagcaaagaagttaaaaaaaagaggtggaaccgtcccaaaatgtcccttgctcagaagaaggatcgggtagctcaaaagaaggcaagcttcctcagagctcaggagcgggctgctgagagctaaacccagcaattttctatgattttttcagatatagataataaacttatgaacagcaactaaaaaaaaaaaaaaaaaaaa

SEQ ID NO: 9982 - DNA, 1765 bp, Homo sapiens
  misc_feature 1, 2, 1762, 1763, 1764, 1765: n = A,T,C or G
nnggctttttaccttgttcatacatatttttatgtggagctgtggttagtttccattaccgtatggtatttcactgcatgaatataccagttatgtatccaaaaaaaaaaaaaaaaaaaaaaaacagaagctgggattacaggctcatgccaccatgcccagctaatttttgtattattattattgttttttagtagagacggggtttcaccatgttggccaggctagtcacgaactcctaacctcaggtgatccacccacctctgcctcccaaagtgctgggattacaggcatgagctaccacacctggtttggagagtcttaattaaggaaatttccctaatgttcatttattttctaaatccagaccgtgtttcagaataatccttacttgagagtagccattttcttgcctgtacttgtcagaactagaggaaatagccaagactaatgaaaaagattactctaacccttaaaagacttttaaattcactactagagtggtcattttaaaaatacatccatgttttaacttatttgagccttctttatgagtaaatgattcctccttgttctgtctttcaaaccagctaaatatttgtcacaaaagtgcttttttctcactgttgcctattttcatatatcaggttttaaatagttttaattttttaataaaattttctctacgttctatatgcaattgttatatatctatttgaatagctgaaggactaaaatacttttttaagagataacttcaggaaaccattatattttactatctgcatgctgttaactgtggtacactgtgaaatatgttgattacaaacccattcattacatagtataaggaattcacagtatattgactatatagtgtctaatgatcttgggcagatactgtcaaacttacaatatctatatagatgtaggtctttttaaatttacctagtcattcttctatcatgtatattgatgctgaaagaggaactggtcagctcctctggacaacaaattcttagtctataatattaggagacatcttctgttttgcaaatgtctgtgaatctgagcaacctggcattctgcttactggccagaaagctggcgggtgacatttgtaacatttcctctttgagactctgagttcacctagagaagtctaagcataacagctttctttcccagcacgagcctttatagctctctttagctcaaccactctgtccatccagccaatggatgtcccttcccctgtaccccaatttcaagcttattttaggaagccttgaactaccatgtatcctggctcctagctgagtttattagaggtatggagcagtgcaacttaaactcaagttgcacttacattttgaattttaaaatgatggttttatctgttgtgtgaagtggttcacccttgaggaccaggagcctccatatcctgactgaaaaccttttctgagacttagagtaacagtacttttggttccttgagttctcctgtctccagataccaaatgaccttgacttttctgccttgtgaattcgtagtccaatcagctgaaattaaatcacttgggagggacgcatagaaggagctctaggaacacagtgccagtgcagaagtttctccaggtggcctccctttccaacaatgtacataataaagtgtatgcactttcactaaaaaaaaaaaaaaaaaaaaaaaaaaaaaaaaaaaccctcgggggggggggccgcgggacccaaatttggcccnnnn

SEQ ID NO: 9983 - DNA, 3311 bp, Homo sapiens
  misc_feature 1, 2, 3, 3302, 3303, 3304, 3305, 3306, 3307, 3308, 3309,3310, 3311: n = A,T,C or G
nnnccggtaagactccagagaacgctctgcactatggctggtcccgtgagcttgcgagaccttctaatgggagcgtcagcctggatgggctctgaaagtcccggagggtcccctactgagggcggagggagcgcggctggcggaccggagcctccatggcgggaggatgagatctgcgttgtgggaatcttcggcaagacggctctacgcctgaattccgagaagttctctcttgtgaatacggtgtgcgaccgacaggtctttcctctctttcgccaccaagatcctggggatccaggacctggaatcagaactgaggctggcgccgtgggtgaggccggtggagccgaggaccctggggctgcagccgggggttcagttcggggaagtggagctgtcgcggaaggtaaccgaactgaggcaggctcccaggactacagccttctgcaggcctactacagtcaggaaagcaaagttctgtatcttctcctcacctccatctgtgacaattcacagcttctccgggcttgtcgggctcttcagagcggggaagctggaggtggactctctttacctcatgcagaagcacacgagttctggaagcatcaagagaagctgcagtgcctcagtctcctttacctattctctgtctgtcatatcttgcttctggtccatcccacttgttcctttgatatcacttatgatcgagtattcagagccctggatgggctgagacagaaggtcctgccgctccttaaaacagccattaaggattgtccagttggcaaagactggaagctaaactgccgaccttgcccacctagactccttttcctctttcaactcaatggagccctcaaggtagaacctcctcggaaccaagacccagctcatccagacaagcccaagaaacattctcccaaaaggaggctgcagcatgccctggaggaccagatctatagaatcttccggaagagtcgtgtcttgactaatcagagcatcaactgcctctttactgtgcctgccaaccaagctttcgtgtacatagtaccgggaagccaggaggaggacccagtaggtatgttgctggaccaacttaggagtcattgtactgtgaaggacccggaatctttgctggtgcctgcacccctttctgggcctaggcgataccaggtgatgaggcagcacagccgacaacaactttcctttcacattgacagcagcagttccagttcttcaggccagctagtggatttcactcttcgggaattcctatggcagcatgtggagctagttctaagcaagaaaggtttcgatgacagtgtgggcaggaacccacagccttcccattttgaacttcctacttatcagaagtggatctcagcagcttcaaaactgtatgaggtggctattgatgggaaagaagaggacttggggtcacccactggagagctaacatctaagattttaagcagtattaaagtcttggaaggatttttggatattgacacaaaattctcagaaaaccgatgccaaaaagctttacccatggcccacagtgcctaccagtcaaatttgcctcataattacacaatgactgtccataagaatcagcttgcccaggctcttcgagtgtacagtcaacatgctagaggtccagcatttcacaaatacgccatgcagttacatgaggactgctacaaattttggagcaatggccatcagctctgtgaggagaggagtttaactgatcaacactgtgtgcacaaatttcactcattacctaaatcaggagaaaaaccagaggctgatagaaatccgcctgtgctatatcacaatagccgagctcgatctactggtgcttgcaactgtggaaggaaacaagcacctcgagatgatccctttgatatcaaagcagccaattatgacttctatcagcttctggaagaaaagtgttgtggaaaattggatcatatcaatttcccagtatttgaaccaagtactccagatcctgctcctgctaaaaatgaatcctctcctgctcctccagattcggatgctgataaacttaaagaaaaagaacctcaaacccaaggagagagcacgagcctgagtttagctttgagtttgggccaatccacagatagcttaggtacctatccagctgatccacaagcaggaggagataatccagaagttcatggtcaagtagaagtgaaaactgagaagaggccaaacttcgttgatcgacaggcatccacagttgagtatctcccaggcatgctacattcaaattgccctaaaggtctcctacccaaattctccagctggtctttggttaaactaggccctgctaagtcttataactttcatacaggtttggaccaacagggctttattccaggaacaaattatcttatgccttgggacattgtcatcaggactagagctgaagatgaaggagacttagacacaaactcttggcctgctccaaataaagctattcctggaaagagaagtgcggttgtaatgggaagaggaagacggcgagatgacatagctcgagcttttgtgggctttgaatatgaagactctcgaggtcggagattcatgtgctctgggcctgacaaagtaatgaaagtaatgggaagtgggccaaaggaatcagctttaaaagccctaaatagtgacatgcccttatatattctgtcatcctctcaaggtagagggctgaaacctcattatgctcaacttatgaggctttttgttgtggttcctgatgctcctttgcagataatactaatgcctcaggttcagccaggcccaccaccatgtccggtattctacccagaaaaacaagaaatcacccttccacctgatggcctttgggttttgagatttccttatgcatatgtgactgagagaggaccttgtttcccccctaaggaaaatgtgcagttaatgagctacaaggtgctccgtggggttcttaaggcagtaacacaataagtgttttccagccagttcaatcctatacttgagctggtttttgtttttggtatttgtggctgtgtttttggtatgtgtttactgtgttttcccaaatccaaaatgtgttttggttacaggagttcagtatttggaaactaatttgttctactttttcattatattgttgatatttattgtaaacgtgactacaactttctaataaagattggttgttctagaaaagaatataaaatacatggatgatacctgttttttctcgtttctgttttactctccataattaaacatgnnnnnnnnnn

SEQ ID NO: 9984 - DNA, 1854 bp, Homo sapiens
gaagtccccaatctgagttccttagtatccaatttcgatcagcagcagctcgctaatttctgccggattctggctgtcaccatttcagagatggatacagggaatgatgacaagcacacgcttcttgccaaaaatgctcaacagaagaagagcttgagtttggggccttctgcagctgaaatcaatcaagcggcccttctcagcattcctggctttgttgagcggctttgcaaactggcgactcgaaaggtgtcagagtcaacgggcacagccagcttccttcaagaactggaggagtggtacctgaagctgctgggcaagggcactttcggcaaggtgatcctggtgaaggagaaggccacaggccgctactacgccatgaagatcctcaagaaggaagtcatcgtggccaaggacgaggtggcccacacactcaccgagaaccgcgtcctgcagaactccaggcaccccttcctcacagccctgaagtactctttccagacccacgaccgcctctgctttgtcatggagtacgccaacgggggcgagctgttcttccacctgtcccgggagcgtgtgttctccgaggaccgggcccgcttctatggcgctgagattgtgtcagccctggactacctgcactcggagaagaacgtggtgtaccgggacctcaagctggagaacctcatgctggacaaggacgggcacattaagatcacagacttcgggctgtgcaaggaggggatcaaggacggtgccaccatgaagaccttttgcggcacacctgagtacctggcccccgaggtgctggaggacaatgactacggccgtgcagtggactggtgggggctgggcgtggtcatgtacgagatgatgtgcggtcgcctgcccttctacaaccaggaccatgagaagctttttgagctcatcctcatggaggagatccgcttcccgcgcacgcttggtcccgaggccaagtccttgctttcagggctgctcaagaaggaccccaagcagaggcttggcgggggctccgaggacgccaaggagatcatgcagcatcgcttctttgccggtatcgtgtggcagcacgtgtacgagaagaagctcagcccacccttcaagccccaggtcacgtcggagactgacaccaggtattttgatgaggagttcacggcccagatgatcaccatcacaccacctgaccaagatgacagcatggagtgtgtggacagcgagcgcaggccccacttcccccagttctcctactcgggacagcggcacggcctgaggcggcggtggactgcgctggacgatagcttggagggatggcagaggcggcctcgtgccatgatctgtatttaatggtttttatttctcgcggtgcatttgaagagaagccacgctgtcctctcgagcccagatggcaaagacgtttttgtgctgtggggccagcaccctcccccgcagcgggggtagggaagaaaactatcctgcgggttttaatttatttcatccagtttgttctccgggtgtggcctcagccctcagaacaatccgattcacggtgcggaaatgttaggacttctgcaggctatgcgcatgtgtggccttggggggcccgggcaggtcctgcccatgttgtccctcactcttgtcagccagcgcctgggctgtctgtcacagttatctgtcatctctctgggggccctggcctcagttcaacctgtgggcccgattgcctcctgggtgtgccgcccccttctggggggggggcccggccccataggggtcttgagatggtggccggtggcacggggggcgggccgggagacgattggtttctcgcgggtc

SEQ ID NO: 9985 - DNA, 2800 bp, Homo sapiens
  misc_feature 2800: n = A,T,C or G
acccatctacaaagacctctattacataaacactgcttcttacaggaaacaaacctcttctgggatctccttttgtgaaaaccagtttgatgtgctaaaagtaaaaagtctattttccagtgtggtcttgttcagaagcagccagatttccaatgttgtttttcccctccactcagaaacccctgccctttcccttcagaaaacgatggcaggcattcctctgagtttacaagcagagactcactccaacccaaactagctgggagttcagaaccatggtggaataaagaaatgtgcatctggtctcttctgttgtttttatttcatatcagattaaatttctttaccatgttggctaagtctaaatattagagatgaggctgtgcctactccctggccagctctgctgatagcctatgatgggttccaatgggaaatgactctttactattaaaagacaaggaaagctctgacttcgtacttctctgatgaatggcaatgtaaatgaacaaggctccatgtgactggagcatggaagtgaatgctactttcttaatttaatctgccctgtcctacctgctcctctgattgttagccatcacataacttattgaatgcttgccatgtgccaggcactgtgctgagtgccatacatacatttcatttaattatccaataatcctacttactattgtttattctcaatttacaggtgaggaaactgagacatagaaagcttaaataatttgctctaggtccctatactaattgagatgttttcagcagacaaaaataagtcactcttacgcatgtaaaaatattctttcactcataataaaagaaatgcaacttaaaaccatactgagatcctttttaaaactgtcagattggcaaagatcaaaaagcttgttaagactcctagctggcaagcatgtgggaaataggtactctcataacagctgacagaagtacatattgaagaggacaatatggcaatgtccttcaaaattataaaagcactaactctttgatccagtagtttccacttctaggaacttaaccttcagatatattttcaccagatataaaatgacatacgtaagaagttattactgcatcatttgtaatagctaaagattagaaacaattaattgctatggaacccttaaaaaaggtggctctaaattccttaagaaagatatccaaaacaaattaaggggaaaagggagggttgcataacagcatgtaacataacactatttgtctaaagaatggggaaagagaagcggttgtctgttcacctcatccttgccactccgccttatacctcaccatcggagaacttaccatcccccaaatatatcctgctggcactacaccttcgtaactgctgttcccactgcccccacaacactccaatctccaccttcctgccaaccttgagatattgtatgcatatatacatatttcctttgtttaaaatacaaatagcatactatgcatgctgttctgcactttgctttttttttatacttgcaattagagctgcctcatttcattttacagctgtatactattccattgaatggataaaccataatttatttaatcagtccctcactgacagacgtttccattgtttcctgtcttttgctataaataatgctgtaatgaatattcttgtgcatatttcacattaatttatgggattacatctgcaggataaattcttagaaccaatggtggtttgtggggagggtgacagggtggataggtacaggattgggagacttttcactgtatctccttttgtatttttttgaattttgtaccatatgtatcacctattcaaaaaaaataaaatatttttaaatacagttgctggccaaagattgcttaaatgctccttctctttatatatttatctgactataatttacaactaaagccaggcgctaattatgtcaaaattccttaatgcaaatttgtcaggcagccctgtggcatttttatgaagaggggaaaatacggattttaaaagaacgatcataaacatcaatgctagataggaagaaaaatagaagagattccttcctttcagacaaaacatgcagtgaacagtgttaggccctgcccaaagccagctgcacaacattagcttgggtccagatttcaagggagagctgtaccaccacgatcagtgctgcccacttccctataccaggttgatcctgccaaatgccacccctgcactctaatgctttataacaaacgacaaaacaacagagctcgattctcagaagttacagaaagaagagtctcttcctgaacacctactttagtagtccttcctaatcttttacttctcaacttctttcctcctatcccttgtaatcactcaacattcccatacgaagaaactatgggtgggccaggcatggtggctcgtgcctgtaataccggcactttgggaggctgaggcaggaggattgcttgagcccaggagttcgagactcctgtgcaacatggtgaaaatttgtattggaatccggagcatccacctccctccacttgcagcctgaggaattctgacccttcggtgatttccaaaagcctctggacgcaactgtctgtgaggcggatctgcccttcgccggcctcggggctggaggacgacgcctcccgacgcgcctggggtcccagggaggccgtgaggagcctgcccctcggccagggagtgaccgctctctgcgtcgcggccgttagggacgacccccaggcggcagcctcttcccggacn

SEQ ID NO: 9986 - DNA, 3175 bp, Homo sapiens
  misc_feature 1, 2, 3, 4, 5, 3170, 3171, 3172, 3173, 3174, 3175: n = A,T,C or G
nnnnncgccccccatttttttttttccgaccatacttttttagccattcctctccctgcaccgacttgtttctccagttactaatccacaacattaaacccgaccaatgtaacctgtaaagtacaactcttggaatcaatagccaacatatcataaagtcttcatatattcactagatatccccctccagaatttatcataataaaatttaaaactacttaagtattcagcaatagagtaaatactctaaataaatttaagagtattaaagtaatataattaaaataatcattatcacaactacatacatatagataatatcaaatgaaaaagtcaatttaaaagtataggtgccttaagactatgtgaacaccaaaaggaaaatagtaatataaaaatttaaattctaaagttactacattaagatggtagaggtaacagtaattttcccatttggcaaaacttcagttttaaacataaaagaaaaagagtggctatcgttttttaaaaatggtcaacaatctctactcctctattagtaaactctgtgtcaatttttaaggtgaaaaatacagcagaaatacctctgatgtgttctaaaacctaagtatttctctatttggactttaatttgcaatggaagaggacatattgtaacctgtaccagtccaacaggcagatgtagccactgccacctttggttgacacacactgtggggcactagatatgaacaggtaaaactgtaaattttcattttatgactttgtgtgtttgatattttatgttaatgcatcatggtattaacactctttttccttacagttttgtctcatactaagaattgttttagtgttttcatttaaaatatgttgccaatatgttgaaaatgctgtactgatgcatatataacattttacattgagtttaaattgggttaagcacaaataaaaccactttagtttacatattttaaatttcagagttagagactacaaagcaggaaaacacctttaaaaagaaaggcaaagcataaacatctaaaaacttgtattttatgaaatttctcatgagtcttccttttgaaactgtatttgagtaaaggaagagggatctgaatgtttctacagactggctgcataatatattgctttcccataacaaaaatatgaagcactcattatatatgaagtttactattacaatgtggctacatttaaaaaattatggtaaagagggatagggaactttcagaaagctatctgaatgaaaatgtttgagaagaactgtttttaaatatttagagcagaagagattagctggaaatgcagggcagccatctcaacatctgtaagtatctcttgaaagagcaaactaaagagacaatgtcacagggataacaccctacagagaaatataaataaatgctaaagaataaagtttttagttgaagacacattctttaaattttaaaaattatgttacttaataacttggtacaaagtgcttgaccatgttgacattaccatgaaaatatctcatagctgccaaaatacaaaactataggagctgtcttctgctctaatggtaggaaggtgactttaattaagtattagtcttctatttacaacctgttagtggtagcagtaataatttggttcatttacaaatattatcaaagcttattcatttccaagatctaaacaaacacaggtattactagatgatggccattttatcaaagaaattgtttttaataataaactctccaaaaaacagaagagaagagatcaataatggccactttaaacaatttaaagaatttcaataaaatgaagccaccaggaagcctaaataaagtaaaaataacactaaattatggtcatttttgtgaaactaaagaaacatggagctcatacttttttctttgattaggaaatttgttcaactttttcacaagactgaagacagatcaaattcagaaagttaatttttctgaatccaatcatattcatattttcacaatacaaaaaatcctaaaacatttcacaacacagcaaacaactgagccaactgcaaggccatttataatgcatagaaaataaattatgtgctattgaaactgtaaatgatagacatttttcttcatgcaaaaaaaaaaaagacatattgtttgtcttttgaatgcagcttgtcattctgcatctgcacacaggattcaaatgtcaactagaaaatgatgatattcccaggccaatctcaacacgtcttaattacatcatcttctctctttggctcatttagagttatatattcacagctcaaaacctgttcattagactcaggttttgattttttaagtgccaactctgctgggaaaagagatgagcaatgctcaagagactgtgcaatgtcatcaattgtccatttgtcttcaggaagggcatgttcttctagcgtaaatggtccctgtttggttcgggtcagctctagcacattggcacaggaagatagttcttttccaatgtcactgaccaagcttctgatataaaaacctcctccacattcaacatctaatgtgaaaaatggtggctggaatttttgaagggagatactgtatacagtcactggcctggcaggttttgcttctacgacttcacctctcttcatcaaagtcgaaagtctttgtccatctttctttaatgcagaatagagggggggcacttgcattatatttccagtaaatttctgtagaatgccttcaatatcttcttgtgttattttatcgtaaggtttttcttctgttaccctccccgtagaatatagtgtatcagtagctttccccagttctccaatggcagtatatctcttggaccctgacaacatactggtcaacatttttgttccgcttccaattccaacaaccagaactcctcgggctgcgctgtctagagtccctccatgcccaattttcaaagtctgctttttcctcttggtccattctggagaaggcattccagcttctgccagcagcttctccttcaaccgattcagcagctcggctgaagtgggccctttgggcttgtgcacggcgaacacgccgctcaaggacagcagcttggtagccaaagcggccttggagaccctggcttcggatccggtcctggccgcnnnnnn

SEQ ID NO: 9987 - DNA, 1652 bp, Homo sapiens
  misc_feature 1, 1650, 1651, 1652: n = A,T,C or G
nccggcgcgtggctcgggctcgggcggagctggagacgtgtggagctgttcgaggactcgcgggtgtgcagtgcacctatgatatgtgttttagaaatagccattaaactttggtttgaatgaagaatgtctctcaatccacctatatttctcaaacgaagtgaagaaaatagttcaaaatttgtggaaacaaaacagtcacaaactacttccatagcttcagaagatccccttcaaaacttatgtttagcatctcaagaagttcttcaaaaagctcagcaaagtgggagatcaaaatgtctcaaatgtggtggttccagaatgttctactgctatacatgttatgttccagttgaaaatgtacctattgaacagattccacttgtgaagcttccattgaagattgacatcattaaacatccaaatgaaacagatggcaaaagtactgctatacatgcaaaactcttagcacctgaatttgtaaacatttacacgtatccgtgtattccagaatatgaagaaaaggaccatgaagttgcactcatttttcctggacctcagtctatctcaataaaagatatttcttttcatctgcaaaaaaggattcaaaataatgttagaggcaaaaatgatgaccctgacaagccatcttttaaacgcaaaagaactgaagaacaagagttctgtgatttgaatgacagcaagtgcaaaggcacaacactgaaaaaaattatatttatagatagcacctggaaccaaacaaacaaaatattcactgatgagcgacttcaagggttgttacaagttgagttgaaaacaagaaaaacttgcttttggcgccatcaaaaaggaaagccagatactttcctttctacaattgaagccatttactactttctggtagactaccatactgatatattaaaagagaaatacagagggcaatatgacaatcttttatttttctattcttttatgtaccagttgataaagaatgccaaatgctctggagataaggaaacaggaaaacttacacattagtttttaacaagccacttatgtctttttattttgctaacattaataaacttatatttgtgctttgttttttaaaaaagtcaaaaaaaaaaaaaaaaaaaaaaaaaaaaaaaaaaaaaaaaaaaaaaaaaagagagagagagagaagaagagacacgagaagaattcccagagggggcccccagaaggaactaccccctttttcggcgaaggggggccccccaaggggggccccgtataaagcacgaacggggccggcttaaacacacgttgataacggggaacaaacgggggcagcagggagaacctcggggaagaacaacccaaaaacaccccggggagctgagccaataatggggaacaaaacaccccaacaaaatatataagagcgccctaagaggacacctatataacactttcacagagacgttaaaggggcgtggaacaccaagccagagaaatacacgccgcgccgcagcaagaacacattggcgcgcaaccacggggatcatcctactgacgcaaattcttctaccaccggacactagtaacgacaaccccgcgacctacgcaccgagcaaagtacaagcaactagcacaacccaaagacannn

SEQ ID NO: 9988 - DNA, 3128 bp, Homo sapiens
  misc_feature 3120, 3121, 3122, 3123, 3124, 3125, 3126, 3127, 3128: n = A,T,C or G
gtccgtgccagggtaagaggatgagaacaggcattcccggcaggacgccggagccggcgccgggagtgagccataactggcggctgctcttgcgccatgagcctccccaattcctcctgcctcttagaagacaagatgtgtgagggcaacaagaccactatggccagcccccagctgatgcccctggtggtggtcctgagcactatctgcttggtcacagtagggctcaacctgctggtgctgtatgccgtacggagtgagcggaagctccacactgtggggaacctgtacatcgtcagcctctcggtggcggacttgatcgtgggtgccgtcgtcatgcctatgaacatcctctacctgctcatgtccaagtggtcactgggccgtcctctctgcctcttttggctttccatggactatgtggccagcacagcgtccattttcagtgtcttcatcctgtgcattgatcgctaccgctctgtccagcagcccctcaggtaccttaagtatcgtaccaagacccgagcctcggccaccattctgggggcctggtttctctcttttctgtgggttattcccattctaggctggaatcacttcatgcagcagacctcggtgcgccgagaggacaagtgtgagacagacttctatgatgtcacctggttcaaggtcatgactgccatcatcaacttctacctgcccaccttgctcatgctctggttctatgccaagatctacaaggccgtacgacaacactgccagcaccgggagctcatcaataggtccctcccttccttctcagaaattaagctgaggccagagaaccccaagggggatgccaagaaaccagggaaggagtctccctgggaggttctgaaaaggaagccaaaagatgctggtggtggatctgtcttgaagtcaccatcccaaacccccaaggagatgaaatccccagttgtcttcagccaagaggatgatagagaagtagacaaactctactgctttccacttgatattgtgcacatgcaggctgcggcagaggggagtagcagggactatgtagccgtcaaccggagccatggccagctcaagacagatgagcagggcctgaacacacatggggccagcgagatatcagaggatcagatgttaggtgatagccaatccttctctcgaacggactcagataccaccacagagacagcaccaggcaaaggcaaattgaggagtgggtctaacacaggcctggattacatcaagtttacttggaagaggctccgctcgcattcaagacagtatgtatctgggttgcacatgaaccgcgaaaggaaggccgccaaacagttgggttttatcatggcagccttcatcctctgctggatcccttatttcatcttcttcatggtcattgccttctgcaagaactgttgcaatgaacatttgcacatgttcaccatctggctgggctacatcaactccacactgaaccccctcatctaccccttgtgcaatgagaacttcaagaagacattcaagagaattctgcatattcgctcctaatagtggctctgaggggatgcaacaaaatgatccttatgatgtccaacaaggaaatagaggacgaaggcctgtgtgttgccaggcaggcacctgggctttctggaatccaaaccacagtcttaggggcttggtagtttggaaagttcttaggcaccatagaagaacagcagatggcggtgatcagcagagagattgaactttgaggaggaagcagaatctttgcaagaaagtcagacctgtttcttgtaactgggttcaaaaagaaaaaaataataaaaataaaagagagagagaatcagacctgggtggaactctcctgctcctcaggaactatgggagcctcagactcattgtaattcaagctttccgagtcaagtgattgacaactgaagagacacgtggctagggttccactggagaattgaaaaggactcttgagccctcctggaatggagctgtataactgtgcagagactttatccatgccaatagttgctgtccccttccaggggtcaccttgagaggcatgacagctgttccacaggggctatcccttctcagaaaacttctcttctgagcctctttaacagctttctccagaaccagtgtctgaaccaccctggaaattctgccttattatttcttactcaaacatgtttagagtggatagaaaattatgcagcttgcacacccatcgtctttaaccccaaatttcctttggctattaaaaaagtggtggcaaaaggcatcctcaaaagaaagagaaatgaaatatttttgaatggttgcacgttaaaaattaaaagaaggaatgggggcagaatgccatatttttgagggctgtactaggtttatctcatttaagccccacaacaccccacaggagggtaattttctaactctagttgcagaggagcaaatgaggttcagcaaggtgagagaggtacccaaggtcacatagctagttatgtgagaaagttagagtacagatcctctggggtttcagcttattgtagcatattttctccgaaaggcaaaaatgtgccctttggccgggcatggtagctcaagcctataatcccagcatgttgagaggctgaggtgggcagatcatttgaggccaggagttcaagaccagtctggccaatatggagaaaccttgtctctactaaaaacacaaaaaattatctgggcatggtggggcatgctgtagtcccacttacttgggaggcgaggcacgagaatcgctgaacccgggaggtggaggttgcgtggagcccagatcacggccactgcactccaggcccggcaaacaggagccagactctgttctcaacacaaaatcacttccctcttgttacccagtgtggccccttaatgtggcaggataacataaacgggattcccaaaggggggggtccaaatgaatttggcgtcacaacctggaaggagttcccgcctaggaggacttaagaaacagattttaccgatccgggtgtcaaatgtataaccggggacaacaaaagactatggggaccgagataagcaaaaggcgaatgnnnnnnnnn

SEQ ID NO: 9989 - DNA, 2138 bp, Homo sapiens
  misc_feature 2130: n = A,T,C or G
gcggcccgggcttgggccctcttttggttgctgctgcccttgcttggcgcggtttgcgccagcggaccccgcaccttagtgctgctggacaacctgaacgtgcgggagactcattcgcttttcttccggagcctgaagggtgagagcggggtccgagggggtagcgtgtgggggcctggggttggtacagcatcgagggcattgaccactctgcttgcctgtgcctttcctggagcaggccgcccgggtctggcctgccgcttggcgtgcgggtccggatgtctgcagcaggggtttcccttcgcgtcccgtctttctcaactacctgttttttcttgtccagaccggggctttgagctcacattcaagaccgctgatgaccccagcctgtctctcataaagtatggggaattcctctatgacaatctcatcattttctccccttcggtagaagattttggaggcaacatcaacgtggagaccatcagtgcctttattgacggtggaggcagtgtgctggtagctgccagctccgacattggtgaccctcttcgagagctgggcagtgagtgcgggattgagtttgacgaggagaaaacggctgtcattgaccatcacaactatgacatctcagaccttggccagcatacgctcatcgtggctgacactgagaacctgctgaaggccccaaccatcgttgggaaatcatctctaaatcccatcctctttcgaggtgtgggatggtggccgatcctgataaccctttggtgctggacatcctgacgggctcttccacctcttactccttcttcccggacaagcctatcacccagtatccacatgcggggggaagaacaccctcctcattgctgggctccaggccaggaacaatgcccgcgtcatcttcagcggctccctcgacttcttcagcgactccttcttcaactcagcagtgcagaaggcggcgcccggctcccagaggtattcccagacaggcaactatgaactagctgtggccctctcccgctgggtgttcaaggaggagggtgtcctccgtgtggggcctgtgtcccatcatcgggtgggcgagacagccccacccaatgcctacactgtcactgacctagtggagtatagcatcgtgatccagcagctctcaaatggcaaatgggtcccctttgatggcgatgacattcagctggagtttgtccgcattgatccttttgtgaggaccttcctgaagaagaaaggtggcaaatacagtgttcagttcaagttgcccgacgtgtatggtgtattccagtttaaagtggattacaaccggctaggctacacacacctgtactcttccactcaggtatccgtgcggccactccagcacacgcagtatgagcgcttcatcccctcggcctacccctactacgccagcgccttctccatgatgctggggctcttcatcttcagcatcgtcttcttgcacatgaaggagaaggagaagtccgactgaggggctagagccctctccgcacagcgtggagacggggcagggaggggggttattaggattggtggttttgttttgctttgtttaaagccgtgggaaaatggcacaactttacctctgtgggagatgcaacactgagagccaaggggtgggagttgggataatttttatataaaagaagtttttccactttgaattgctaaaagtggcatttttcctatgtgcagtcactcctctcatttctaaaatagggacgtggccaggcacggtggctcatgcctgtaatcccagcactttgggaggccgaggcaggcggctcacgaggtcaggagatcgagactatcctggctaacacggtaaaaccctgtctctactaaaagtacaaaaaattagctgggcgtggtggtgggcacctgtagtcccagctactcgggaggctgaggcaggagaaaggcatgaatccaagaggcagagcttgcagtgagctgagatcacgccattgcactccagcctgggcaacagtgttaagactctgtctcaaatataaataaataaataaataaataaataaataaaaataaagcgcggccgcgaattccagcacacggcggccgttactagggatnccgagctc

SEQ ID NO: 9990 - DNA, 252 bp, Homo sapiens
  misc_feature 1, 2, 3, 4, 5, 6, 7, 8, 9, 10, 11, 12, 13, 14, 15, 16, 17,18, 19, 20, 21, 22, 23, 24, 25, 26, 27, 28, 29, 30, 31,32, 33, 34, 35, 36, 37, 38, 39, 40, 41, 42: n = A,T,C or G
nnnnnnnnnnnnnnnnnnnnnnnnnnnnnnnnnnnnnnnnnncccatttttttgtattttttttttttcgtttcatttgcgtttatttaaacacagttctcaaaacatttgagtgaaattgggcctcctttggtaagcaaaggacctgaaaataatatttaaaaaatgaacaggcaaagtctccagtccatgaaacataccatacttatatacctgcaactaagtgtttaaaattatgctctgtaactctgt

SEQ ID NO: 9991 - DNA, 1196 bp, Homo sapiens
  misc_feature 1186, 1187, 1188, 1189, 1190, 1191, 1192, 1193, 1194, 1195,1196: n = A,T,C or G
aaaggtagttctcgcgcttgctaggctggcctctcttgcctccccttggccggggcaacaccagttactgtgagcatcaccctggtgtggtgagtcacctctagtcggccctcttgctgctgccaaccaaatcagtattagctttgagcactgcactgtttctccctcccttggacgacacaaagactagcatgaggcactgtttgtggggggcagcccctatcctgggttccagcatggacacaggggtagcctggggcttatagagaaacagctggtttcccctaccctttcccggggaagaccccacgattggcctctagtcagcaaatggagataacagagtctggcctttccaatccccatctccttgccccccccttgcccccccccccgaaaaaaattgagcacttaaacccctcccttttggagggggccccctgaagcgtcaggctgggggcagtctggtacggaacatatttattgcctccatgcatgtgtgtgtgtgtctgtgaggactggtgtgcgtggacacgtctgaagcaggcgtgtggggctctttcagggaccacagaggagggagcagtttgcagtgcccagccaccctgaaatccccaataatggtgcctcagtgggccccagagttccagtgggagagtacggttccctcctgtctccctcttcttttccgcacctccatctttgtggataataaataaatatgcacaggttctgaaaaaaaaaaaagaaagaacgagggaaaaaaaaaaaaaaaaaaaaaaaaaaaaaaaaaaaaaaaaaaaaaaaaaaaaaaaaaaaaaaaaaaaagaaaaaaaaaaaaaaaaaaaaaaaagggggggggggggggcgacagaatatatcactagaggggggaaaaaaaaaaaacagcgcccaatgtaaaagaaagagaggaaaaaaaaaagagaaaaaaagaaaagaagaagagaggcgtaaaaaaaggcggggcggagggagtgggacgtggggggttgggggtgggggaacgcgggggggtgaggtgtgggggtacaccacaaaagaagggaggacgaagagaaaaagaaaacaagagagtgtatgagggatcacacgaaggagatcggagagagagagaatgaggtgaggagagattatcaggatattaacggggcaacaaggaagagannnnnnnnnnn

SEQ ID NO: 9992 - DNA, 2482 bp, Homo sapiens
aaatcattctctgttcacatggcacttctctaggatgcatccaggagtagttgctgggtggttaagtgcacacaaccttccaagattttgcaaattgcctggcacaatatttctcacaatttgtactcatttagcagtgtgaattatcgctgctccacgcacttacccacacttgggctttcaaaaatgtgccagctttctgagtgtgagatggtctgtattatttttacatttcagtcagtcttggtcagcattggttttgtcattcctctttttttcagttttcatttttttttttttcagaatttcaaattttaattaaaatgaaaaaaaaatgtcaacttggaatgtcatgattttcttcaaacaagcaacgacaacaaaatagaagagattaaactattggcatatttaacagcattgaacagaattctgtgtcctgtaaaaaaattagcttatgtccccatgtgggtatatgcaaatgtgtatacaaacatatccccctaggtgagctaaacactattctggaaatagtatcctctacccaaatctacttggctatatctgtggatagtgtatggtgtgtgtatttatccaatttacataaaagaaagctcctggccaaatctaccaaagcgttttccaggaggaagtctggtgggaggcagggagaggaaagacattcatctcagtctttcacctgagcttttgtacaaggcaggcaaatatgccaatagtttaatctcttctattttgttgtcgttgcttgtttgaagaaaatcatgacattccaagttgacattttttttcattttaattaaaatttgaaattctgaacaccgtcagcaccctctcttccctatcatgggtcatctgacccctgtccgtctccttgtccctgcttcatgtttgggggcctttctttaactgccttcctgggcttagctcagatgggcagatgagagtgtagtcaaggggcctggggcacagggaggggagagctgcagagtgtcctgcctgccttggctgggaggggacacctctcctgggggtgttggaagacagcttgggttcccccctagctccctggtgggtgaatgccacctcctgagatcctcacctcttggaattaaaattgttgtttttgaaataaaactataatataaattctcctattaaataaaattattttaagttttagtgtcaaaagtgagatgctgagagtaggtgataatgtatattttacagagtgggggttggcaggatggtgacattgaacatgattgctctctgtctcttttttcagcttatgggtatttatcttctattagtatttgtatcttcagttcattccactttaggaaacagagctgccaattgaaacaaaaaaaaaaaaaaaaaaaagcagcagacaacacactgtagagtcttgcacacacacaagtgcccaggcaaggtgcttggcagaaccgcagagtgggaagagagtacctgcccgggcggccgaggtttttttttttttctttttttacaacatatatctttaattaaatttatattggtgggtttaaaaaacattaagtcaggagatgatagctagggaaataaggtatcctgtgagtatttataacaaaatatttaaaatttaaaaagaataagaaacatcaattggctttttgtaacttaaaagagactaaccaagtgttgtttcccagttctgtacaagcagaggccacaggaggattcttacataagaagcacagggaaaagaattgttaattctgcgtgtgtgtttttgtttctcagaattgtttggaagaactttgtccagtcagaaatgagtaaaaacaagatgtaagaaacattaaaacagggggcatatggtcttaagagataatcttggagaatatagcaaaagacaaattgctccattagatattataatttggtatgtaacatgaacatttaaaattctgattaaagtgactaaaagggtttgttttttaaaaaaaatcaaaacagaacttacgggataaaactcaaaataaatttactctcagtagtaacttgatgtaggaatataagtcctctcactttgataaacatgaatataaaatattgctgtctgtattctagggtttcctacattttctgtaaagagtgattcatgctatgtcatatgtaaatgactcaacattttgagctaaaaggctgttcacaatatacacattctttacttacaaagcaaaataagcttaacacctttatattaaaaacccgggatacagcaggattagtagcaccgtgaaaaataattcttcccacaaactgcagtcttttattttactcaatgtgactcttctcttaattgaatttttaatgtaccattttagtaactgggcaaaatatataattttcatcttataattcttggagaaagtcattctggacccaaaaagtaaattcacttccttcggacgcg

SEQ ID NO: 9993 - DNA, 2759 bp, Homo sapiens
  misc_feature 1, 2, 3, 2758, 2759: n = A,T,C or G
nnnaatcgccgaggctccctgccattgcctagcactcgcggcgctgctaacggcctggtcacatgctctccggagagctacgggagggcgctgggtaacctctatccgagccgcggccgcgaggaggagggaaaaggcgagcaaaaaggaagagtgggaggaggaggggaagcggcgaaggaggaagaggaggaggaggaagaggggagcacaaaggatccaggtctcccgacgggaggttaataccaagaaccatgtgtgccgagcggctgggccagttcatgaccctggctttggtgttggccacctttgacccggcgcgggggaccgacgccaccaacccacccgagggtccccaagacaggagctcccagcagaaaggccgcctgtccctgcagaatacagcggagatccagcactgtttggtcaacgctggcgatgtggggtgtggcgtgtttgaatgtttcgagaacaactcttgtgagattcggggcttacatgggatttgcatgacttttctgcacaacgctggaaaatttgatgcccagggcaagtcattcatcaaagacgccttgaaatgtaaggcccacgctctgcggcacaggttcggctgcataagccggaagtgcccggccatcagggaaatggtgtcccagttgcagcgggaatgctacctcaagcacgacctgtgcgcggctgcccaggagaacacccgggtgatagtggagatgatccatttcaaggacttgctgctgcacgaaccctacgtggacctcgtgaacttgctgctgacctgtggggaggaggtgaaggaggccatcacccacagcgtgcaggttcagtgtgagcagaactggggaagcctgtgctccatcttgagcttctgcacctcggccatccagaagcctcccacggcgccccccgagcgccagccccaggtggacagaaccaagctctccagggcccaccacggggaagcaggacatcacctcccagagcccagcagtagggagactggccgaggtgccaagggtgagcgaggtagcaagagccacccaaacgcccatgcccgaggcagagtcgggggccttggggctcagggaccttccggaagcagcgagtgggaagacgaacagtctgagtattctgatatccggaggtgaaatgaaaggcctggccacgaaatctttcctccacgccgtccattttcttatctatggacattccaaaacatttaccattagagaggggggatgtcacacgcaggattctgtggggactgtggacttcatcgaggtgtgtgttcgcggaacggacaggtgagatggagacccctggggccgtggggtctcaggggtgcctggtgaattctgcacttacacgtactcaagggagcgcgcccgcgttatcctcgtacctttgtcttctttccatctgtggagtcagtgggtgtcggccgctctgttgtgggggaggtgaaccagggaggggcagggcaaggcagggcccccagagctgggccacacagtgggtgctgggcctcgccccgaagcttctggtgcagcagcctctggtgctgtctccgcggaagtcagggcggctggattccaggacaggagtgaatgtaaaaataaatatcgcttagaatgcaggagaagggtggagaggaggcaggggccgagggggtgcttggtgccaaactgaaattcagtttcttgtgtggggccttgcggttcagagctcttggcgagggtggagggaggagtgtcatttctatgtgtaatttctgagccattgtactgtctgggctgggggggacactgtccaagggagtggcccctatgagtttatattttaaccactgcttcaaatctcgatttcactttttttatttatccagttatatctacatatctgtcatctaaataaatggctttcaaacaaagcaactgggtcattaaaaccagctcaaagggggtttaaaaaaaaaaaaccagcccatcctttgaggctgatttttcttttttttaagttctattttaaaagctatcaaacagcgacatagccatacatctgactgcctgacatggactcctgcccacttgggggaaaccttatacccagaggaaaatacacacctggggagtacatttgacaaatttcccttaggatttcgttatctcaccttgaccctcagccaagattggtaaagctgcgtcctggcgattccaggagacccagctggaaacctggcttctccatgtgaggggatgggaaaggaaagaagagaatgaagactacttagtaattcccatcaggaaatgctgaccttttacataaaatcaaggagactgctgaaaatctctaagggacaggattttccagatcctaattggaaatttagcaataaggagaggagtccaaggggacaaataaaggcagagagaagagacagaactaaaaatacgaggaaaggagagtgaggattttcattaaaagtctcagcagtgggttcttgggttaatttaaaaacatcacgctaaataggcctttcttccttatggaatcaaattaaagcctatctttttcaagcggactggtatgtaaggaggggagaaaaagggaggcatggagagaggggacaaaggtgacggggattcttcgcattggagacagagtggaaaaagatgaaaaagtcaaaaaggggttcctagataaaggaagaaagtttgagggaatacaataaactgtgaatacnn

SEQ ID NO: 9994 - DNA, 1543 bp, Homo sapiens
cgtccgcaccgcccctgctgcggcgggtgaggggcggggcggggcgcggcgtatataaggctaggggcgggcgccgctcttttgtttcttgctgcagcaacgcgagtgggagcaccaggatctcgggctcggaacgagactgcacggattgttttaagaaaatggcagacaaaccagacatgggggaaatcgccagcttcgataaggccaagctgaagaaaacggagacgcaggagaagaacaccctgccgaccaaagagaccattgagcaggagaagcggagtgaaatttcctaagatcctggaggatttcctacccccgtcctcttcgagaccccagtcgtgatgtggaggaagagccacctgcaagatggacacgagccacaagctgcactgtgaacctgggcactccgcgccgatgccaccggcctgtgggtctctgaagggaccccccccccaatcggactgccaaattctccgcgatagacaaaccagacatgggggaaatcgccagcttcgataaggccaagctgaagaaaacggagacgcaggaaaagaacaccctgccgaccaaagagacgcccgcttcccgctctccacagccattgagcaggagaagcggagtgaaatttcctaagatcctggaggatttcctacccccgtcctcttcgagaccccagtcgtgatgtggaggaagagccacctgcaagatggacacgagccacaagctgcactgtgaacctgggcactccgcgccgatgccaccggcctgtgggtctctgaagggaccccccccccaatcggactgccaaattctccggtttgccccgggatattatagaaaattatttgtatgaataatgaaaataaaacacacctcgtggcaaaaaaaaatacgaacaaccacaccacaccacacaccgaacaactccggggccctcttatgcccggctgccgccccacgcggcgctctctgccgccctgggccccttgtgcccctctacctgtcctccccgtaccccacttttactgtgtcccccctcgtggcgacacctccccgcggtctccccatattggcgggccccatcttcactttccacaatcaccgccgttttaccaccggttataatgccctccccgcacaacactcccccccttctctcccctccccgcccatgtgcgcgctctccctctgccgccttgcgcggcccactcccactgtcgtccctcccatacctgttctcccgcaaccaaccgcatctccgacatcagatcgctccattaatttctcttcccctcctccgctccctccacctcactacagcatcgcacaacccaatcccacctcgtaaatctctcgtttactcaactcaatctcactcctctatctatctatctcactaaatcagatctccacctcatccctccacgccctcacattttcctaacttctcccccacaatcctcccgcacagcaccaacgcacgtgcaaatcttaattccaccgcacctatctcgcaaaacatctctcctatcaccacaaa

SEQ ID NO: 9995 - DNA, 384 bp, Homo sapiens
  misc_feature 1, 96: n = A,T,C or G
naaggaagaagagtattaaatatatactgactcctagaaatctatttattaaaaaaagacatgaaaacttgctgtacctgcccgggcggccgcccnggggcagttacatttgtccaaatgttcatcaacacttcttgattgcaattgattctttttaaagtgtttctgttattaacaaacatcactctgctgcttagacataacaaaacactcggcatttcaaatgtgctgtcaaaacaagtttttctgtcaagaagatgatcagaccttggatcagatgaactcttagaaatgaaggcagaaaaatgtcattgagtaatatagtgactatgaacttctctcagacttactttactcatttttttaatttattattgaaattgt

SEQ ID NO: 9996 - DNA, 537 bp, Homo sapiens
actttcagtttcatattactctaaatccattacaaatctgcttagcttctaaatatttcatcaatgaggaaatcccagccctacaacttcggaacagtgaaatattagtccagggatccagtgagagacacagaagtgctagaagccagtgctcgtgaactaaggagaaaaagaacagacaagggaacagtctggacatggcatcagagatccacatgacaggcccaatgtgcctcattgagaacactaatgggcgactgatggcgaatccagaagctctgaagatcctttctgccattacacagcctatggtggtggtggcaattgtgggcctctaccgcacaggcaaatcctacctgatgaacaagctggctggaaagaaaaagggcttctctctgggctccacggtgcagtcttcacactaaaggagtctggatgtggtgtgtgccccaccccaagaagccaggctccatcctatttctgctggacaccgagggtctgggagatgtatagaagggtgacaaccagaatgactcc

SEQ ID NO: 9997 - DNA, 3062 bp, Homo sapiens
cgtccgctccctgctgcttactcggcgcccggcgcctcgggccgtcgggagcggagcctcctcgggaccaggacttcagggccacaggtgctgccaagatgctccagggcacctgctccgtgctcctgctctggggaatcctgggggccatccaggcccagcagcaggaggtcatctcgccggacagctaccgagagaaacaacaactgcccagagaagaccgactgccccatccacgtgtacttcgtgctggacacctcggagagcgtcaccatgcagtcccccacggacatcctgctcttccacatgaagcagttcgtgccgcagttcatcagccagctgcagaacgagttctacctggaccaggtggcgctgagctggcgctacggcggcctgcacttctctgaccaggtggaggtgttcagcccaccgggcagcgaccgggcctccttcatcaagaacctgcagggcatcagctccttccgccgcggcaccttcaccgactgcgcgctggccaacatgacggagcagatccggcaggaccgcagcaagggcaccgtccacttcgccgtggtcatcaccgacggccacgtcaccggcagcccctgcgggggcatcaagctgcaggccgagcgggcccgcgaggagggcatccggctcttcgccgtggcccccaaccagaacctgaaggagcagggcctgcgggacatcgccagcacgccgcacgagctctaccgcaacgactacgccaccatgctgcccgactccaccgagatcgaccaggacaccatcaaccgcatcatcaaggtcatgaaacacgaagcctacggagagtgctacaaggtgagctgcctggaaatccctgggccctctggccccaagggctaccgtggacagaagggtgccaagggcaacatgggtgagccgggagagcctggccagaagggaagacagggagacccgggcatcgaaggccccattggattcccaggacccaagggcgttcctggcttcaaaggagagaagggtgaatttggagccgacggtcgcaagggggcccctggcctggctggcaagaacgggaccgatggacagaagggcaagctggggcgcatcggacctcctggctgcaagggagaccctggaaaccggggccccgacggttacccgggggaagcagggagtccaggggagcgaggagaccaaggcggcaagggggcatcgtgcacccaccttcccctgccaaaagacgtgaggctgattctgcaaacccttccagggggaccctggccgcccaggacgcagagggcccccgggagaaatcggggccaagggaagcaaggggtatcaaggcaacaatggagccccaggaagtcctggtgtgaaaggagccaagggcgggcctgggccccgcggacccaaaggcgagccggggcgcaggggagaccccggcaccaagggcagcccaggcagcgatggccccaagggggagaagggggaccctggccctgaggggccccgcggcctggctggagaggttggcaacaaaggagccaagggagaccgaggcttgcctggacccagaggcccccagggagctcttggggagcccggaaagcagggatctcggggagaccccggtctcacggagtgtgacgtcatgacctacgtgagggagacctgcgggtgctgcgactgtgagaagcgctgtggcgccctggacgtggtcttcgtcatcgacagctccgagagcattgggtacaccaacttcacactggagaagaacttcgtcatcaacgtggtcaacaggctgggtgccatcgctaaggaccccaagtccgagacagggacgcgtgtgggcgtggtgcagtacagccacgagggcacctttgaggccatccagctggacgacgaacgtatcgactccctgtcgagcttcaaggaggctgtcaagaacctcgagtggattgcgggcggcacctggacaccctcagccctcaagtttgcctacgaccgcctcatcaaggagagccggcgccaaaagacacgtgtgtttgcggtggtcatcacggacgggcgccacgaccctcgggacgatgacctcaacttgcgggcgctgtgcgaccgcgacgtcacagtgacggccatcggcatcggggacatgttccacgagaagcacgagagtgaaaacctctactccatcgcctgcgacaagccacagcaggtgcgcaacatgacgctgttctccgacctggtcgctgagaagttcatcgatgacatggaggacgtcctctgcccggaccctcagatcgtgtgcccagaccttccctgccaaacagagctgtccgtggcacagtgcacgcagcggcccgtggacatcgtcttcctgctggacggctccgagcggctgggtgagcagaacttccacaaggcccggcgcttcgtggagcaggtggcgcggcggctgacgctggcccggagacgagcgaccctctcaacgcacgcgtggcgctgctgcagtttggtggccccggcgagcagcaggtggccttcccgctgagccacaacctcacggccatccacgaggcgctggagaccacacaatacctgaactccttctcgcacgtgggcgcaggcgtggtgcacgcatcaatgccatcgtgcgcagccgcgtggggccccggagcacgcagagctgtccttcgtgttcctcacggacggcgtcacgggcaacgacagtctgcacgagtcggcgcactccatgcgcaagcagaacgtggtacccaccgtgctggccttgggcagcgacgtggacatggacgtgctcaccacgctcagcctgggtgaccgcgccgccgtgttccacgagaaggactatgacagcctggcgcaacccggcttcttcgaccgcttcatccgctggatctgctagcgccgccgcccgggccccgcagtcgagggtcgtgagcccaccccgtccatggtgctaagcgggcccgggtcccacacggccagcaccgctgctcactcggacgacagccctgggcctgcacctcttcagc

SEQ ID NO: 9998 - DNA, 2494 bp, Homo sapiens
  misc_feature 1, 2, 2403, 2404, 2405, 2406, 2407, 2408, 2409, 2410, 2411,2412, 2413, 2414, 2415, 2416, 2417, 2418, 2419, 2420, 2421,2422, 2423, 2424, 2425, 2426, 2427, 2428, 2429, 2430, 2431,2465, 2466, 2467, 2468, 2469, 2470, 2471, 2472, 2473: n = A,T,C or G
  misc_feature 2474, 2475, 2476, 2477, 2478, 2479, 2480, 2481, 2482, 2483,2484, 2485, 2486, 2487, 2488, 2489, 2490, 2491, 2492, 2493,2494: n = A,T,C or G
nngagtcgacccacgcgtccgggccagccggctcgcccgggggccatggcagcagcggctactgcagccgagggggtccccagtcgggggcctcccggggaagtcattcatctgaatgtgggaggcaagagattcagtacctctcgccagactctcacctggatcccagactccttcttctccagtcttctgagcggacgcatctcgacgctgaaagatgagaccggagcaatcttcatcgacagggaccctacagtcttcgcccccatcctcaacttcctgcgcaccaaagagttggatcccaggggtgtccacggttccagcctcctccatgaagcccagttctatgggctcactcctctggttcgtcgcctgcagcttcgagaggagttggatcgatcttcttgtggaaacgtcctcttcaatggttacctgccgccaccagtgttcccagtgaagcggcggaaccggcacagcctagtggggcctcagcagctaggaggacggccagcccctgtccgacggagcaacacgatgccccccaaccttggcaatgcagggctgctgggccgaatgctggatgagaaaacccctccctcaccctcaggacaacctgaggagccggggatggtgcgcctggtgtgtggacaccataattggatcgctgtggcctatacccagtttctagtctgctacaggttgaaggaagcctctggctggcagctggtgttttccagcccccgcctggactggcccatcgaacgactggcgctcacagcccgggtgcatggtggggctttgggtgaacatgacaagatggtggcagcagccaccggcagcgagatcctgctatgggctctgcaggcggaaggcggtggctccgagataggggtctttcatctgggggtgcctgtggaggccttgttcttcgtcgggaaccagctcattgctacaagccacacagggcgcatcggggtgtggaatgccgtcaccaagcactggcaggtccaggaggtgcagcccatcaccagttatgacgcggcaggctccttcctcctcctgggctgcaacaacggctccatttactacgtggatgtgcagaagttccccttgcgcatgaaagacaacgacctccttgtcagcgagctctatcgggacccagcggaggatggggtcaccgccctcagtgtctacctcacccccaagaccagtgacagtgggaactggatcgagatcgcctatggcaccagctcagggggcgtgcgggtcatcgtgcagcacccggagactgtgggctcggggcctcagctcttccagaccttcactgtgcaccgcagccctgtcaccaagatcatgctgtcggagaagcacctcatctcagtctgtgccgacaacaaccacgtgcggacatggtctgtgactcgcttccgcggcatgatttccacccagcccggctccaccccactcgcttcctttaagatcctggctctggagtcggcagatgggcatggcggctgcagtgctggcaatgacattggcccctacggtgagcgggacgaccagcaagtgttcatccagaaggtggtgcccagtgccagccagctcttcgtgcgtctctcatctactgggcagcgggtgtgctccgtgcgctccgtggacggctcacccacgacagccttcacagtgctggagtgcgagggctcccggcggctcggctctcggccccggcgctacctgctcactggccaggccaacggcagcttggccatgtgggacctaaccaccgccatggacggcctcggccaggcccctgcaggtggcctgacggagcaagagctgatggaacagctggaacactgtgagctggccccgccggctccttcagctccctcatggggctgtctccccagcccctcaccccgcatctccctcaccagcctccactcagcctccagcaacacctccttgtctggccaccgtgggagcccaagccccccgcaggctgaggcccggcgccgtggtgggggcagctttgtggaacgctgccaggaactggtgcggagtgggccagacctccgacggccacccacaccagccccgtggccctccagcggtctcggcactcccctcacacctcccaagatgaagctcaatgaaacttccttttgaacaacgcagctgccatgatgccttgggatgccctggtcctgggggactcaggtgcctccctgattcctgtgggaaccccgggttcagggccagggcctccttggaataaatggttattgttactaggtccccaccttccctcttttctggaagccaaagtcagcctccccaataaagtcctcactgcccaaaaaaaaaaaaaaaaaacaaaagccgagcgtttaccgtcgtgcnnnnnnnnnnnnnnnnnnnnnnnnnnnnnggggggggggctttttttttaaaaaaaaaaaaannnnnnnnnnnnnnnnnnnnnnnnnnnnnn

SEQ ID NO: 9999 - DNA, 2473 bp, Homo sapiens
  misc_feature 1, 2, 3, 4, 2473: n = A,T,C or G
nnnncgcgcacgcgcagctccgcttccgggagccgctcctcgctacccactatgctctgcgacatcgacctgtcgcaaaggccgcgtttgcggggccaatgagcgactcgctttccgtgcggtgcggcgagtgaggccccggtcttcctcctcgtcctgccgcagggccagaacccctgacggtattcagctgcgcgtaagtctggccggtgccatctgtctccgcaatgccccccaagaaacaggctcaggccgggggcagcaaaaaggcggagcaaaaaaagaaggagaagattatcgaagacaaaactttcggtttgaagaataagaaaggagcaaagcaacagaagtttatcaaggctgtcacacatcaagttaaatttggtcaacaaaatccacgtcaggtagcacagagtgaagctgaaaagaaattgaagaaggatgacaagaagaaagaattgcaggagctaaatgagctgttcaaacctgtagttgctgctcaaaaaataagtaaaggtgcagatcccaagtctgtagtatgtgcattcttcaagcaaggacagtgtactaaaggagataagtgtaagttctcccatgacttgactctggagagaaaatgtgaaaagcgaagtgtttacattgatgcaagagatgaagaacttgaaaaagatactatggataattgggatgagaaaaagctggaagaagtagtgaacaagaagcacggtgaggcggaaaagaaaaaaccaaaaactcaaatagtgtgcaagcatttcctggaagctattgaaaacaacaagtatggctggttttgggtatgccctggagggggtgatatttgcatgtatcgtcatgcacttcctcctggatttgtgttgaaaaaagataaaaagaaagaagagaaagaagatgaaatttcattagaagatctaattgagagagagcgttctgccctaggtccaaatgttaccaaaatcactctagaatcttttcttgcctggaagaaaaggaaaagacaagaaaagattgataaacttgaacaagatatggaaagaaggaaagctgacttcaaagcagggaaagcactagtgatcagtggtcgtgaagtgtttgaatttcgtcctgaactggtcaatgatgatgatgaggaagcagatgatacccgctacacccagggaacaggtggtgatgaggttgatgattcagtgagtgtaaatgacatagatttaagcctgtacatcccaagagatgtagatgaaacaggtattactgtagccagtcttgaaagattcagcacatatacttcagataaagatgaaaacaaattaagtgaagcttctggaggtagggctgaaaatggtgaaagaagtgacttggaagaggacaacgagagggagggaacggaaaatggagccattgatgctgttcctgttgatgaaaatcttttcactggagaggatttggatgaactagaagaagaattaaatacacttgatttagaagaatgacaccaaacacatcgctgaaaaaattaagtcagctcagcacgagttgaaattgactacattaatttctttccacctagaatcaacaggatgtttatttcctatgctgattctggaggagttaacctcctgcaaaaaaggcatcttgtccctacatcttctcttctgactttggctacatctcatagtaagttcagagtagttcatgataaattgaaaatataatggtcattgcagaaaatgattgatgttgtaactgtccacccaagtaagaagtgtatctgcctttccatcttttggttttcatttgggcatgtgctattaccagaaacaacaaacttatatttaaaatacccttcatttgacacagtttttaatgagtgatttaatttcctctgtatttgtatgtttagaagactgcctaaaacatgagcactgtacttcataaaggaaactgcgtatgcagattcagtattgtgtatctttggacaattagatggacatttaaaatggaacttcttttatctgacaggatcagctacaatgccctgtgttaaattgtttaaaagtttcccttttcttttttgccaataaagttgtaaataaagaccatcatacattaaaatcaaatatggggctttacaagatcgtcctatgacaaattaaacttctagcatgagaattacaaaccggtatatatacctaggaaggttacaaaaaaaaacagagaaaacctcgaaaacagggacaggaacaagaagagtcgaacaaagaaatagaaacaaagaactcagcagagaaaacaggaaaacgaccgagaaacacaccaaaaatccgagaagaaaaaacgaacagctacacaagacgaacaaacaaacgacaaagacaacaacgaagggaagacaaaagaagaacaagaaccaacacaacgaaagacagacaaagacagcacacacacatagacagan

SEQ ID NO: 10000 - DNA, 1204 bp, Homo sapiens
  misc_feature 1201, 1202, 1203, 1204: n = A,T,C or G
tcctgttcaaagatgcagccagtgtggagaaggtcctagaccagaaggagcacaggctggatggccgtgtcattgaccctaaaaaggccatggctatgaagaaggacccggtgaagaaaatcttcgttgggggtctgaatcctgaagccactgaggaaaagatcagggagtactttggcgagtttggggagattgaggccattgaattgccaatggatccaaagttgaacaaaagacgaggttttgtgtttatcacctttaaagaagaagaacccgtgaagaaggttctggagaaaaagttccatactgtcagtggaagcaagtgtgagatcaaggtggcccagcccaaagaagtctatcagcagcagcagtatggctctgggggccgtggaaaccgcaaccgagggaaccgaggcagcggaggtggtggtggaggtggaggtcagggtagtacaaactacggcaagagccagcgacgtggtggccatcagaataactacaagccatactgaggcggcagcaggagcgaccaactgatcgcacacatgctttgtttggatatggagtgaacacaattatgtaccaaatttaacttggcaaaactttctattgcctgtcccatgtgcatcttatttaaaatttcccccatggaatcactctcctgttgactatttccagagctctagtgtttaggcagcgtgtggtgtttggaagcatagcgcatcatgggctgatttattaccaggtccccagaagcggggaggtctgtcctgggccgttgagcggactggtggccggtgtacgggtatggcttctgaacccgggcctttcccttattttattggctcatcggcggaggtcgcgttggcctgggcagttggggttcgccgttcccgttggtcctgattcccaaaacgttgcggggacgtgtccttgtgtttctctccccggccgcacatcgaagctatccaagcttttgaaataaaatttaaaaacccccaaaaaaaaaaaaaaaaaaaaaaaaaaaaaaaaaaaaaaaaaaaaaaaaaaaaaaaaaaaaaaaaaaaaaaaaaaaaaaaccttgcccggggggccgaggtacaaggagctaaggggcccatggaacagggttgaaatcagccccaaaaacccgattttggtcaaggggaatctaaagctggccaagggtttaatcccccannnn

SEQ ID NO: 10001 - DNA, 422 bp, Homo sapiens
  misc_feature 416, 417, 418, 419, 420, 421, 422: n = A,T,C or G
acaaactggatctatagatattttgaactggaccaggtgggtattgaagtaacccatcaaaatatgctctgcagtgattccgcttaatgtttaaattcagtaacgtcttttttttttttttttttttttttttttcctttttttttttttttttttttttttttttttttttttttttttttttttttttttttttccccccattattaagggggccaaaaatgtttttttttaattaatttttgaaaacccacctttttatttttccgggttttttttatttgcaaacttctttaaaaacttttccaaatgttcacatttttagggctaacctttttttaaaagttttttggttccaaatgtttttataagggggtttttaaaaaaggttaaagccctttttcccttttaaaaannnnnnn

SEQ ID NO: 10002 - DNA, 2199 bp, Homo sapiens
cgggcccgagacctggctcccggcgtccctggctcgctccacagcacggccctgaaaaggagcctttaaaagtcaattctactccatttggcaaagagggaactgaaatctggaaagtaaggacttgcccaaggtcactgacttagtggcagactagagacttgaactcaggtctccattcccagcagaaaaatatggctcaggagactaaccagaccccggggcccatgctgtgtagcacaggatgtggcttttatggaaatcctaggacaaatggaatgtgttcagtttgctacaaagaacatcttcagaggcagcaaaatagtggcagaatgagcccaatggggacagctagtggttccaacagtcctacctcagattctgcatctgtacagagagcagacactagcttaaacaactgtgaaggtgctgctggcagtccatcagtttctcagcccagtacttctcagagtgaagaaaaagctcctgaattgcccaaaccaaagaaaaacagatgtttcatgtgcagaaagaaagttggtcttacagggtttgactgccgatgtggaaatttgttttgtggacttcaccgttactctgacaagcacaactgtccgtatgattacaaagcagaagctgcagcaaaaatcagaaaagagaatccagttgttgtggctgaaaaaattcagagaatataaattacttcttgtgaagagactgaaactttgtttttattttatatatcgtaggaaaacattaaagagcaaatgcatggccatttttctttgatgttctccagagttttacattacacttgtctgtcttataattgatattttaggatgttgggtgtttgttacaggcagaattggatagatacagccctacaaatgtatatgccctcccctgaaaaaaattggatgaaaatctgcacagcaaagtgaaacacacagataataggaacaaatgtagttcccatgtgccaaacaaaataaatgaaatctctgcatgtttgcagcatatctgccttttgggaatgtaatcaaggtataatctttggctagtgttatgtgcctgtatttttttaaaatggtacaccagaaaaggactggcagtctacttctaccatagttaaacttcaccctctttaatttcacaacatattctttggaagcaggaagaaatgctcataaagaggatcagaccttttttcccgtgaaaccagtatttggcgccatatataagcctggttaaattggtcatctaaagctgtcaaataagacattctgtgaaaggtaaacatcgaaactggttataagtaaaaccatcaagccaacaacagggtcttgagataacctttgaagcttattgtactggcctgcaccagaagatgtctgcattactcattgctaaaaatgtgtagcacagaactgcactaggattaatttgtttacaagaagaaatttaaactctacgtttggttttcacatacagcagctctattgaataacatgcatctgaattttaagttgcaaaggtatctgaataatttttcatgtgcatcttttgtcgaatgttttggttcaagaaagaatgtttaaagctttttaaaagacttcagttcttaatgtaactgtacccttctgcatggaaaatcataaccaacatggctgcagtagacttcttagtggtatccagcgccacttgcagagggctgctttatcatattgtacttgggtgtaggactctagtgttcttgggtgtattgcatgggctgcattatctacagcattgtacaataacaactagaaaaggcagtatacttcactgatgcttgtctggtaataatcacttctgtgttataatggaaggttttttgtgatgtatgaaacttgtgttttttatatataaatgagtatagttagtgttgtggtaatgcctgttttcatctgtaaatagttaagtatgtacacgaggcactacttctgatttattgcaatgttcagtcctagtttttacttttattcttaaagcattcagttttgctttcaattttatgtaccttagttctgagttagacctgcagatgtgtacagatagttcatatttatgtattgcacataatcatgctattcagcattgatgctatattgtattatgtaaataataaaagccatgtacagagaaaaaaaaaaaccc

SEQ ID NO: 10003 - DNA, 1094 bp, Homo sapiens
atgtggttagagggatgggctgaataggcaggttagatttcctgcatcaacagtgctttgggaagctgtgtggattcctgaggaagaacagggagccgagatggagccacacatgagtttgctcaccggctactgcagcactttgtacctgcccgggcggccgcccgggcaggtactgggcggcccatgggggctcctggcctcttggttcaggcaatccctgagctggggacacattccatcttaggtccaagagacggaggtcaggagcatccctagaacgacctcccaggcacgaggaaggcccggggcagggccgggcgcagcgtggctggcttcagtaccctcgggcatcttgactcctgccctctgggactgcaaagggatctgcgggcgcctctgctgagtcaatcgtctggtaggcactacggtcctgagaagacccaaggaaaccagtgtggaccaggagctcacccccgcgctcccggtacatgtggtagacgaagcagcaggagagcggcttgagcagcaagctgaggatggccatgcccacgccaaagcggcccgtgtccgtgaggctgacccgcgggtagaagatgctgatgtgcacgatgtccaggaagatggtggccagcaagccacccagaaacatgcttatggcgtcgatggagtcccgctgagccacagcccacacgcccaaggccaggatggtgaagttggcccaggcataggagcctgagaatacaatgcagcccagctgttgccctgtgcgctgcacttcgaagtttgcaaagtgcacaggtgagctcaatggtttccagtcttggtttggcagagaaatgtctccagaagctcaacagattaaaagagatggtaaaggtgaaaatcaagctgcagtgctgaggcctcactgtggggcaggccctggggagctctgatgagcacttccacgtctccctcccagctcctgcagggtgtgcaatccttatgccaggttgtcagcagccagtgacctaggagaatcaccttcaggttcacagcaggcagctccatcccgactcaggccgagggcacctgcgccgcagccgcgggcg

SEQ ID NO: 10004 - DNA, 1549 bp, Homo sapiens
  misc_feature 1, 2, 3, 4, 5, 6, 7, 8, 9, 10, 11, 12, 13, 14, 15, 1547,1548, 1549: n = A,T,C or G
nnnnnnnnnnnnnnnggttggcaaacaaactttcattattctagttcaatctttcacaaacatactgtacagagtcttatatggtataaaacaaaggaaaacatctgtctgttcaatttaacacaacaccaaaataaagcaattaagactttggggaattcaaagtacaagaaaacaaaaacgattattactaattcctcagctttttaccataaacacttgtcatttaacatagtgtttgatatagtttcttttgtactgcaaatacttttggtctttcctccccgtagaacaaatgaagaattaaaatggaccccatagcatcctctgaaggaggtgaaaagataaagctcctagacatagctagcttatctttaagaatctattgtttctgaaattttcacaacaaaaatactgaatccccaactaatgatgcttattttgggaaacaataaatactgtgaggtacaataaatcctacaggaataataacaacagaaacatattaacagtttcctttggcaaatttaacggaagtgaatgctgatgtgaacatagaaaaaataattacaaaaacatgaaaaatggaaacgacataaaagttaaaataaagggatatttctaacttttagactgatgaaagaaatgtctgaggccattaaatgcaaaaaagaaatacattctctttaaattattgtgtactgtttgacaaaatattccttgtttatctcttcttttcccctccacttaaaaaaaaaggaaaaaagaaaaaaaaaagacaacaaaacagtctgcaatgcacaccctaatggttttggctgcagactgaacttgagtaaatatcatcatttagtcagtatgttgtggtagctgaggctgccgatgtggttaaccagctcaggcaacatgtgtaaacatcggaaacaaaacaaaacaaaaaaggtttggagaatagtctctctcctctttctcactctcaattgcttggtttcaggcttgctttcatttctctctgacaaatcgtgtggggaaacacaaaacactaaacattgagagatcctgctttaaaacccccttcttctggcttttcagaaaggagtgttgctccattcaagtttagcacatgttttcaaagcttccaagtactgctgctgttaaatgccttttgattttgtctaccaaacaggcctgaattatagtacgactgcagaatttgcaacaaattagacagccatacaacagaccgacccagttcagaggatttctttttaaaggataagggttagggccttggaaatgagtgttcgactcttttactgtattcatctttgttccgtagcgggtaatttgggcttttgtatcctgaaatattatcctgcctctgaagaataaatgccttggctgtttcacaccacataattttgttttccttttatgtaacttaacgtataagcaagaaggatgcaatgttgattctaataacattcggcacttgaaagaatcaccaagtgtttttttaaaaagcggttttctggtggccaacaaannn

SEQ ID NO: 10005 - DNA, 4024 bp, Homo sapiens
  misc_feature 1, 2, 4021, 4022, 4023, 4024: n = A,T,C or G
nncacgaggggcgcggaggatgaggccgctgcctggcgctcttggcgtggcggccgccgcgctgtggctgctgctgctgctgctgccccggacccgggcggacgagcacgaacacacgtatcaagataaagaggaagttgtcttatggatgaatactgttgggccctaccataatcgtcaagaaacatataagtacttttcacttccattctgtgtggggtcaaaaaaaagtatcagtcattaccatgaaactctgggagaagcacttcaaggggttgaattggaatttagtggtctggatattaaatttaaagatgatgtgatgccagccacttactgtgaaattgatttagataaagaaaagagagatgcatttgtatatgccataaaaaatcattactggtaccagatgtacatagatgatttaccaatatggggtattgttggtgaggctgatgaaaatggagaagattactatctttggacctataaaaaacttgaaataggttttaatggaaatcgaattgttgatgttaatctaactagtgaaggaaaggtgaaactggttccaaatactaaaatccagatgtcatattcagtaaaatggaaaaagtcagatgtgaaatttgaagatcgatttgacaaatatcttgatccgtccttttttcaacatcggattcattggttttcaattttcaactccttcatgatggtgatcttcttggtgggcttagtttcaatgattttaatgagaacattaagaaaagattatgctcggtacagtaaagaggaagaaatggatgatatggatagagacctaggagatgaatatggatggaaacaggtgcatggagatgtatttagaccatcaagtcacccactgatattttcctctctgattggttctggatgtcagatatttgctgtgtctctcatcgttattattgttgcaatgatagaagatttatatactgagaggggatcaatgctcagtacagccatatttgtctatgctgctacgtctccagtgaatggttattttggaggaagtctgtatgctagacaaggaggaaggagatggataaagcagatgtttattggggcattccttatcccagctatggtgtgtggcactgccttcttcatcaatttcatagccatttattaccatgcttcaagagccattccttttggaacaatggtggccgtttgttgcatctgtttttttgttattcttcctctaaatcttgttggtacaatacttggccgaaatctgtcaggtcagcccaactttccttgtcgtgtcaatgctgtgcctcgtcctataccggagaaaaaatggttcatggagcctgcggttattgtttgcctgggtggaattttaccttttggttcaatctttattgaaatgtatttcatcttcacgtctttctgggcatataagatctattatgtctatggcttcatgatgctggtgctggttatcctgtgcattgtgactgtctgtgtgactattgtgtgcacatattttctactaaatgcagaagattaccggtggcaatggacaagttttctctctgctgcatcaactgcaatctatgtttacatgtattccttttactactattttttcaaaacaaagatgtatggcttatttcaaacatcattttactttggatatatggcggtatttagcacagccttggggataatgtgtggagcgattggttacatgggaacaagtgcctttgtccgaaaaatctatactaatgtgaaaattgactagagacccaagaaaacctggaactttggatcaatttctttttcataggggtggaacttgcacagcaaaaacaaacaaacgcaagaagagatttgggctttaacacactgggtactttgtgggtctctctttcgtcggtggcttaaagtaacatctatttccattgatcctaggttcttcctgactgctttctccaactgttcacagcaaatgcttggattttatgcagtaggcattactacagtacatggctaatcttcccaaaaactagctcattaaagatgaaatagaccagctctcttcagtgaagaggacaaatagtttatttaaagcatttgttccaataaaataaatagagggaaacttggatgctaaaattacatgaataggaatcttcctggcacttagtgtttctatgttattgaaaaatgatgttccagaaagattacttttttcctcttatttttactgccattgtcgacctattgtgggacatttttatatattgaatctgggttcttttttgacttttttttttcccaatccaacagcatccttttttttaaaagagagaattagaaaatattaaatcctgcatgtaatatatctgctgtcatcttagttggaccaacttcccatttatttatcttaaaactatacagttacatcttaattccatccaaagaagatacagtttgaagacagaagtgtactctctacaatgcaatttactgtacagttagaaagcaaagtgttaaatggagaagatacttgtttttattaaacattttgagatttagataaactacattttaactgaatgtctaaagtgattatcttttttccccccaagttagtcttaaatcttttgggtttgaatgaaggttttacataagaaattattaaaaacaaggggggtgggtaataaatgtatataacattaaataatgtaacgtaggtgtagattcccaaatgcatttggatgtacagatcgactacagagtacttttttcttatgatgattggtgtagaaatgtgtgatttgggtgggcttttacatcttgcctaccattgcatgaaacattggggtttcttcaaaatgtgtgtgtcatacttcttttgggaggggggttgttttcttctgtttattttctgagactcctacaggagccaaatttgtaatttagagacacttaattttgttaatcctgtctgggacacttaagtaacatctaaagcattattgctttagaatgttcaaataaaatttcctgaccaaattgttttgtggaaatagatgtgtttgcaatttgaagatatctttctgtccagaaggcaaaattaccgaatgccatttttaaaagtatgctataaactatgctactctcatacaggggacccgtattttaaaatctccagacttgcttacatctagattatccagcacaatcataaagtgaatgacaaaccctttgaatgaaattgtggcacaaaatctgttcaggttggtgtaccgtgtaaagtggggatggggtaaaagtggttaacgtactgttggatcaacaaataaaggttacagttttgtaagagaagtgatttgaatacatttttctggaactattcataatatgaagttttcctagaaccactgagtttctagtttaatagtttgctatgcaaatgaccacctaaaacaatactttatattgttatttttagaaagactcaaaacacctgtatttaaaccttaatatgcaaaatcatgcaattcacatagttacacaagatgtaaacatatacaaaatcatgtacctatatatttgatggacatctacatcctatattgtgacatgtaagtctataaaaaggtgaaaagtatgattacttaccaattaagtatgatagatatgatccaagaaattggatcagaagtgaagtaaaatcctcaactgaagcaaatggatactaaatctactaatgggaagttcataaaatatacatctacatgcctaagaccataattaaaaagaacataaagtaaataagagcaaatagaaacgaaagatataaagacaaggaaaacacaagatataaaagaccaaaaaaaacaagcaacaacggaaaagacgataaaagaaaaaacgaagaaaaaaaaaagaaaaaaaaagaaagagaaaaaaagaacaataaacaaagaaagaaaaaaaaaaaaaaaaaaaaagaaaaaacggtcctccnnnn

SEQ ID NO: 10006 - DNA, 310 bp, Homo sapiens
  misc_feature 308, 309, 310: n = A,T,C or G
acttttttttttttgttaactttatttttaattcatgacactttcactgatcattaggatggcagggtatcgctaagaaccaggattataaagatgaacaggcctcaggtctgtctttaacaagcttataatctatggtaagaggcaaggcatttaatctcctttgcttctacgataatggctcacatatgtttgctctgctctaagaaaaatgcatcagaagcaccttaggtttggcaggtaggggctctgatgttaacaggattgggtagagaagctcttgatgcttctggaaaccccatgagagnnn

SEQ ID NO: 10007 - DNA, 3537 bp, Homo sapiens
  misc_feature 1, 2, 3533, 3534, 3535, 3536, 3537: n = A,T,C or G
nncgtgccgaattcggcacgagaccgcgtgttcgcgcctggtagagatttctcgaagacaccagtgggcccgtgtggaaccaaacctgcgcgcgtggccgggccgtgggacaacgaggccgcggagacgaaggcgcaatggcgaggaagttatctgtaatcttgatcctgacctttgccctctctgtcacaaatccccttcatgaactaaaagcagctgctttcccccagaccactgagaaaattagtccgaattgggaatctggcattaatgttgacttggcaatttccacacggcaatatcatctacaacagcttttctaccgctatggagaaaataattctttgtcagttgaagggttcagaaaattacttcaaaatataggcatagataagattaaaagaatccatatacaccatgaccacgaccatcactcagaccacgagcatcactcagaccatgagcgtcactcagaccatgagcatcactcagaccacgagcatcactctgaccataatcatgctgcttctggtaaaaataagcgaaaagctctttgcccagaccatgactcagatagttcaggtaaagatcctagaaacagccaggggaaaggagctcaccgaccagaacatgccagtggtagaaggaatgtcaaggacagtgttagtgctagtgaagtgacctcaactgtgtacaacactgtctctgaaggaactcactttctagagacaatagagactccaagacctggaaaactcttccccaaagatgtaagcagctccactccacccagtgtcacatcaaagagccgggtgagccggctggctggtaggaaaacaaatgaatctgtgagtgagccccgaaaaggctttatgtattccagaaacacaaatgaaaatcctcaggagtgtttcaatgcatcaaagctactgacatctcatggcatgggcatccaggttccgctgaatgcaacagagttcaactatctctgtccagccatcatcaaccaaattgatgctagatcttgtctgattcatacaagtgaaaagaaggctgaaatccctccaaagacctattcattacaaatagcctgggttggtggttttatagccatttccatcatcagtttcctgtctctgctgggggttatcttagtgcctctcatgaatcgggtgtttttcaaatttctcctgagtttccttgtggcactggccgttgggactttgagtggtgatgcttttttacaccttcttccacattctcatgcaagtcaccaccatagtcatagccatgaagaaccagcaatggaaatgaaaagaggaccacttttcagtcatctgtcttctcaaaacatagaagaaagtgcctattttgattccacgtggaagggtctaacagctctaggaggcctgtatttcatgtttcttgttgaacatgtcctcacattgatcaaacaatttaaagataagaagaaaaagaatcagaagaaacctgaaaatgatgatgatgtggagattaagaagcagttgtccaagtatgaatctcaactttcaacaaatgaggagaaagtagatacagatgatcgaactgaaggctatttacgagcagactcacaagagccctcccactttgattctcagcagcctgcagtcttggaagaagaagaggtcatgatagctcatgctcatccacaggaagtctacaatgaatatgtacccagagggtgcaagaataaatgccattcacatttccacgatacactcggccagtcagacgatctcattcaccaccatcatgactaccatcatattctccatcatcaccaccaccaaaaccaccatcctcacagtcacagccagcgctactctcgggaggagctgaaagatgccggcgtcgccactctggcctggatggtgataatgggtgatggcctgcacaatttcagcgatggcctagcaattggtgctgcttttactgaaggcttatcaagtggtttaagtacttctgttgctgtgttctgtcatgagttgcctcatgaattaggtgactttgctgttctactaaaggctggcatgaccgttaagcaggctgtcctttataatgcattgtcagccatgctggcgtatcttggaatggcaacaggaattttcattggtcattatgctgaaaatgtttctatgtggatatttgcacttactgctggcttattcatgtatgttgctctggttgatatggtacctgaaatgctgcacaatgatgctagtgaccatggatgtagccgctgggggtatttctttttacagaatgctgggatgcttttgggttttggaattatgttacttatttccatatttgaacataaaatcgtgtttcgtataaatttctagttaaggtttaaatgctagagtagcttaaaaagttgtcatagtttcagtaggtcatagggagatgagtttgtatgctgtactatgcagcgtttaaagttagtgggttttgtgatttttgtattgaatattgctgtctgttacaaagtcagttaaaggtacgttttaatatttaagttattctatcttggagataaaatctgtatgtgcaattcaccggtattaccagtttattatgtaaacaagagatttggcatgacatgttctgtatgtttcagggaaaaatgtctttaatgctttttcaagaactaacacagttattcctatactggattttaggtctctgaagaactgctggtgtttaggaataagaatgtgcatgaagcctaaaataccaagaaagcttatactgaatttaagcaaagaaataaaggagaaaagagaagaatctgagaattggggaggcatagattcttataaaaatcacaaaatttgttgtaaattagaggggagaaatttagaattaagtataaaaaggcagaattagtatagagtacattcattaaacatttttgtcaggattatttcccgtaaaaacgtagtgagcacttttcatatactaatttagttgtacatttaactttgtataatacagaaatctaaatatatttaatgaattcaagcaatatatcacttgaccaagaaattggaatttcaaaatgttcgtgcgggtatataccagatgagtacagtgagtagttttatgtatcaccagactgggttattgccaagttatatatcaccaaaagctgtatgactggatgttctggttacctggtttacaaaattatcagagtagtaaaactttgatatatatgaggatattaaaactacactaagtatcatttgattcgattcagaaagtactttgatatctctcagtgcttcagtgctatcattgtgagcaattgtcttttatatacggtactgtagccatactaggcctgtctgtggcattctctagatgtttcttttttacacaataaattccttatatcagcaaaaaaaaaaaaaaaatacaaaagatgggggcccccccccggggggggcccccattcccccttttgggggggttttttcccccccccnnnnn

SEQ ID NO: 10008 - DNA, 618 bp, Homo sapiens
  misc_feature 1, 2, 3, 4, 5, 6, 7, 8, 9, 10, 11, 12, 13: n = A,T,C or G
nnnnnnnnnnnnncggaagtcttctagaattaattaatctctgtaagccatagtttccttatctgtaaaatgaaataatactgtcctagttatatctcaacatccaccacagtgtttagcccctttttaagaaaatgaataattcaggtttaatttagaggtctaagatcgagacttttgaaatgtacacctgaaaatacaaccttgttttttttccttgtgaattctatgagtgcagtttacatgagcacaattcagatggatgtgttttcaaccacacacctggcaaatcaccacacagtgctgtgcaactgatatcatttgagaagaagaggataactgagttcctgttggaaaaacagcaatttgaaagtactgcttaaatgaacacaagatggtgtcaggattccaagtttctagttctttctagggagttacctaaggtctaagttttatcctggacagaatctcttggggaactaaaatgctaccaatgaaaagctcttgatactcctacatcatgaatattattgagctctaaaacttgaactggtcgtgtcaggagaacctttaactgctcatggcagttcttgtggactgagaggaagtacctgcccg

SEQ ID NO: 10009 - DNA, 182 bp, Homo sapiens
cgcggtggcggccgaggtactgaacatgttccaaactcagatagtgatgattgcacaactctgcgaatacacaaaaaaacatcctcggagggagtctgaaggtatgtaaattacatctcagtaaagctgaaaaactgctttggctaaagtggctatccctccatggtgctgggtcctgcccg

SEQ ID NO: 10010 - DNA, 650 bp, Homo sapiens
actactcagagaatttcattgctactgcctgttcgttaacctagcaagtgagtaaattgaggctttaattaaaaaaaaaaacggttgttgttctttgatatacattttgacatagctcaagcttcaaccctgcccagttcctatgctcagaccccatcttcaaggatgctcctcctgcctaactcctctctcagaatattgttttttcctttcccgtttaatccccaggctcagctcctgggaccaatcctggttcaggctcctgttgcctgcctcatcccacagccgtccataatttggtggttacgtcatgcacctgaagtggtagtgagcatttatagtaataaaaatcatagtctcacactgccattttcagtcacactgatatacagcaagaacattgagaagcttagttgatgaagattctacatagtatatgtagaaaaactctatgttaattaagcaaatgttcttctacttggaacattattgaatctcaccaaacagactcaccggttctccagtttcaaagcacatcctctgcttcacaaccgatgtctgagctcccaatcgcagctaaatccagatcctcccatcaggcccctccttcaacactgcagattacaattcaacatgagatttgggtgggt

SEQ ID NO: 10011 - DNA, 583 bp, Homo sapiens
  misc_feature 583: n = A,T,C or G
acattttgaacaatctactcttcaagtggatcatttacaaaacaagaacataattccctgaatcagtaaattttattttcatgaaaggatgacaaagaaattccatttacactatcacgatttacattttcctacaattcatgcagctttcttcaattcacaatctacaaaccacaacaatgcacaaatttgatgttagaggatactttaatgtttagttctcatctcaacagtcactgttgctagtgtctctcattctcactcttcactgttacttaaagaacaaagaactaaagaagccagaaagaactagatcaagcgatgagaccaattttcagggtaaggcataataacattagctagtcaaaaactggagtatttctatcatttaatcctgcaagacaataacctgctgttttccctcactttccttccaataacttgacagaagtctggggaaggatggatcccaagcagaaaaccttcacaaatgtgaaagaaaatggaaatcctagcatagtcacatgactaactagaaatcccagaactctgtcaacaacctttgttttcaatgcagaaatcn

SEQ ID NO: 10012 - DNA, 190 bp, Homo sapiens
aggtacctcctgccttgagtgatttaaagcattttaagatatgctttgctgcctctagatatttctctggttagatccccacaaagatactgtaacattaagttctgggaccatttgagaacaaactagctgctcacagattcctgaaagaaatgcaaaaccttttctctggccccaagtacctgcccgg

SEQ ID NO: 10013 - DNA, 416 bp, Homo sapiens
  misc_feature 414, 415, 416: n = A,T,C or G
actctttttcaaaatgccatattttgaaattgctatttgctattatatgatgctgtgtccttgagaaagagaatacatggatctggcaaccaggagtgtgtgtaggtagaactggcttctctcatcatataccccagggatccaatgggaaatgttttcttcctgtccttttaacttcaggtttttttttcggggggtgggggtagcggtagggggttagtgaggatcttctagcagagaataccttacaaggataccactaaatctaaagctccaactacctcctggtcacttcgggctcctcctgacactagtccagcaggcaaaaaggttactgaactggcaggggtaattgccacacattgtcatgaggagttatggcatctactacataatggggtaggaaaggtgtcnnn

SEQ ID NO: 10014 - DNA, 1085 bp, Homo sapiens
  misc_feature 1, 2: n = A,T,C or G
nnccgacgtacgcggggggattcagagtgagaaggcataaaggagaatccccagctgacttgtgcagtggttaattgaaattattcaggcaagagatgatggtgtcttggaccaggggatgaggaaggctacaaaatgtgtctacctgtattctgtgaggagaacgtgttccctggttttagatactgtgaagatggatcaggagagagtttatctagactgttggggaaaggtgttgcgattccttcagctacacaggattgaaaggagacatttctgaaggggaaaaaggaaatgaaagaaaagatgtttcagattgaggatatgctgtgtggtgaacttgttcttcactctgtagggttcacaaatgactcttcactgccctcttggatgaaataaactggttcccatagaaatggaccgtctctgatttcacagtctagagcacacaaataacccaactttctggaagcaagggtgatggctcgtgagagctcaaggacaaggaggagtctgtagaagcacacctggactcggggaaatcattgacctctcatcctgaattaagtagcgcttgaaaagactctctttgaatcagaaaaataatgcgagctcctatcaaactaccttacacagccaactgagtgatcataggcttgggtggaaaaaatgtaattcgtagaaccttttaagagctaagattccttaatcaacatggataccgtcttgttgaatgacaccgaactgtgctgcgcaggattcggttgcatggtggctggagctgcctctctgggacccaaatctcagacctgctgcaaagtgactatatgatctgcaagttgctaacccttctaggcttttgttttattatttacataatgaagtgaggggaatatgttccttgtaaatttgttaagaggattaaattagttcatgtcaaattatttagacccctgtctgccacatattaaggactcaacaaatactacctattattaacaatgtgccctaaatctgtaaatcactcaataatacatggcattaggctaaatatggaaggtagaaggaaataaattgtccagaag

SEQ ID NO: 10015 - DNA, 177 bp, Homo sapiens
  misc_feature 1, 2, 3: n = A,T,C or G
nnncgaattggagctcaccgcggtggcggccgaggtaccacttgtgatgtgtttaataaattctgtgtggtttttacatagccctgagaggtaagcaatgagtcaggagtttcctccaagcacctgttaagtggcatcatataaatagcaatgtcaggaaatcaggtacctgcccgg

SEQ ID NO: 10016 - DNA, 1406 bp, Homo sapiens
  misc_feature 1, 2, 3, 4, 5, 6, 7, 8, 9, 10, 11, 12, 13, 14, 15, 16, 17,18, 19, 20, 21, 22, 23, 24, 25, 26, 27, 28, 29, 30: n = A,T,C or G
nnnnnnnnnnnnnnnnnnnnnnnnnnnnnntttttttaagcttttagaaaacaatttttatttaaaaaatcataaaaagtactggaatgaaaatacaggtaaagcatttgaaaattatttttctggcttagactgtttactggctcgattctagctctgtcctggtaaaggcctccagaaccttcacctactattatcaagtctggcctcatagggagggacttttactgtactgaaaggaagccagctgaagccgagatctgaagcgctcagcttccagttcccggaagaaaacatcatcatcattctgtgttatcatgtcctgcagctgctgaatttccttctccatcttagatctcagctccctcttcaccttatgtaatgtctgggcctgagatttctctctggctttaagttcttgatgttcctgtgatatggcttctgccagcaatgaaaactggtccttatagtagttctccatggagtccagttcatcctggtggcgtctcctttgttcatctcgcttttctttggcatagtttcttaggtctcgtaatctttgcttttgaatgtttaaaccttcttcaaacagtttcttaatatcatttcttccgggtcctcattctcatcatttttgcacacaactgaactctataatcatcataatattttcgagcacgaacgatttgctgtcgattttcttttatctttgattgggtcaacctttgcctacgaatgcagtccttgaagtcttgcagtctcttgttatgttcatattctttcttgacaagggtagtaaggaggtcatgccttcttagggcttcttctatttcatcttggagtttcttctttgatcgattttctctacatgcttctttcttaagctgttcaacctgtgcaatttgctgtttccacattttgcttagtgttgggccagaaacataaagaaacggaaactgctccagcataaggggcaggagactgtgttcacttactttcattggaactgctttatttggctttgggaggccacctcttagactctgcgttgtggtttttctagagtaaatcttccagggctgactacattctggagttcctttacgaacagcttctcctctgtatattttttcccactgtttcctcctccttctcatgtcattcttagaggtccaatattctcttgaactttatgtcttcttagttccctttcaaatgcttcagtaacgcctgtgcttggattggtgccggacatctgtttctcttggcttgcgctgcctttttctctccaacgtggaactgtttgtgtttgttaactggagatggagagagcgaatgggatctgtagggtggctttctacgcatggaaagtcccaatctagttcagaagagccgctgagagagtt

SEQ ID NO: 10017 - DNA, 1512 bp, Homo sapiens
  misc_feature 1492, 1493, 1494, 1495, 1496, 1497, 1498, 1499, 1500, 1501,1502, 1503, 1504, 1505, 1506, 1507, 1508, 1509, 1510, 1511,1512: n = A,T,C or G
ggttggggtatgattttgatctgggcactaacggggacactgattgcttttgccagtaagtcaagaccagcagataaaaaataatttttaaaaacctcgtgagactgatttgccgcatgaccgggaggaggaagaagcaagcgtggaaggtgctaacggaggaacctaaacctccatcctctttccctgggaggttaagaactacagggagaggcgagagagactatgaccgccctacggctagagtagccacgaagagaacacttccggggcggggctatctggccctttcctttccgcgtgtagaatgtggggcgcctgtaaagttaaggttcacgattccttggccaccatttccatcactctgagacggtacctgagattgggggcgaccatggcaaaaagcaagttcgagtacgtgagggacttcgaggctgacgacacctgcctggcacactgctgggtggtagtgcggctggacggccggaatttccatcggtttgctgagaagcacaactttgcaaaacccaatgacagccgtgctctccagctgatgaccaaatgtgcgcagactgtgatggaagaactagaggatattgtgatcgcgtatggacagagtgatgagtacagctttgtgttcaagcggaaaaccaattggtttaaaagaagagccagtaagttcatgactcacgtggcctcccagtttgcctccagctatgtgttttattggcgggattactttgaggaccagccccttctgtatcccccaggctttgacggaagagtcgtggtgtatcccagcaaccagactttaaaggactacctcagctggcgacaagcagattgtcacatcaataatctttataatacagttttctgggcacttatacaacaatctggactaacaccagtacaagcccaagggagattacagggaactcttgcagcagacaagaatgagattttgttttctgaattcaacatcaactataataatgagccgccgatgtataggaaagggactgtgttgatatggcagaaggtggatgaagtgatgacaaaagaaattaagctgccaacagaaatggaaggaaaaaagatggcagtgacccggaccaggacaaagccagtgcccttgcactgcgatatcatcggggatgctttctggaaggaacatccagagattctagatgaagacagctgacccttttgcgcttcagttctggtgtgcttaaccatgcaagccctcccacctcccagggctccttgccttaggtggctgtagcatccctaccacccaggacactggtgcgaatgacacaactcaagttgggaggggaacagggaaggaagggatggatgggggtggtgtatcttactctgtttaagcagaacaccttgtttgcggtgttggaacatggttcctttggcagaagtgctttttttttaatcgcagtactatttttataaagcaagaactattccatgcccnnnnnnnnnnnnnnnnnnnnn

SEQ ID NO: 10018 - DNA, 1050 bp, Homo sapiens
acaacaaaagttcatcctagtaattcttaaagctcttcaattcctatagagtttagcctttgtcaatagccaaaatatgtgcttgaaaaataacttctttgagtttcaaagcaaatgaaaacataaaacaagcaaaaaaggcttttttgttgttgtttttctctgcatatctagggtttgtttcttcattcataaatacggttttcaaaaagcattgcctcagccaaaattattgccctttttaaaaatgcttttcatgtatacactttctacataactgcttttctttacacctcttttctacattaattctaatgaaaggtcatcttgcttacctaaattcagtgccagcttccacatgactaactagtcagctatggttgtggcttggaatgaccatgtgctccttgaagcttttgtataatgataatggcttccttgtcactaacaggtctctacaacctactaccaaaggcaagttacaaatcttctcctcaaacttggagccttaattaaaagtatgagaattcaactatgaaaatacatgagtccagggaggaaataaatcagaaaagaaaaaaaaaaggcactggttccataatatttacaattatgtttttccaggctaaggaaatacctcagtagaagtgataatcgaattgctgaaacattcaagtttttagaaacgtttcactggactcaacataaatgatagtgccagagagaatagccaaagtgctgaggttgatagctactccctaaaatctttggacttaagtcttagcagttacacaactaaaaattgcattacttctgtcctatatgtcttggctgtcaattagctacaatgcaagtcaatccattttgaaaagaaaaaaaaataggtttacctcatttggactgccaggctaaatagttcagtcttccatttcctttgaaaatgtgattggcattttaatagacatgaatcactcatagacaaaggctatttaataaaaacattatttgtggactttttttgtcttgctttcagaccaaactgaactagct

SEQ ID NO: 10019 - DNA, 1217 bp, Homo sapiens
acaaggcagcagaagcaacaaaggctgtggccagcaacgaaggcagagtccccggtaggcggaggtccccgtgcacagtgtggtgcagcagtgaacccaagattttccttcacagggcaggggaactatttcctaataagcattggcatttcaggccacaagggcagccattactcagcactgcactgaccttgggaatttgctgggcaaggaaaatgacgtggccctcatcatcgatggccacaccctgaagtacgcgctctccttcgaagtccggaggagtttcctggatttggcactctcgtgcaaagcggtcatatgctgcagagtgtctcctctgcagaagtctgtgatagtggttgtggtgaagaagcgggtgaaggccatcaccctcgccatcggagacggcgccaacgatgtcgggatgatccagacagcccacgtgggtgtgggaatcagtgggaatgaaggcatgcaggccaccaacaactcggattacgccatcgcacagttttcctacttagagaagcttctgttggttcatggagcctggagctacaaccgggtgaccaagtgcatcttgtactgcttctataagaacgtggtcctgtatattattgagaaaatttagaaaacgacctaatcacgatgtcagcagatagaagatttcaaataactttgcaatacagcaccatattatttttggcatacggttcagaagaaatctaaagtattgatggctcttgctgtaatgaagctttacattctttttaatgtgtgaactattaatagatttctcaggactgagatctatagaaatgagtaataggaatagaaattaaaacaaaattaagtaagatttccatttaccatttctgtgaagtataacaagtgatcaataaaataaacaaaactacattaaattatggtaaaaaaaaaaaaaaaaagggcggccgccgccccgcacctgctgctgctgccgccgccgccgcccgccgcgccgccccccgctggggcctgcagccctttgggtcctcggagccccccggccgccacggccaccgccgcggcctcagggggcctggggctcgggctggcgctgggcgcggggggcggtggcggcagcggtagtggcagcggcggtggctccagccccgcgttcccgggcaccttctgcctgcctagccccgcgccctccctgctttgcagcctggcgc

SEQ ID NO: 10020 - DNA, 1747 bp, Homo sapiens
  misc_feature 1, 1747: n = A,T,C or G
natgcttggcctccttgacaagttcggaggtctgagaatgacaatcacagagaggagaggctttcctgccaaggtttaagtcatttgctggccttgcaggcaggcaccttccatgtgaaaatgcacatttggttgattgatggggcgtaggaggtggttttatacatggtgctgtctttggcatagcattggttttcgagagaagacctggggtgaccagcctgctaggccaagttcagcagtaaactcaagtcagcaatatatatgtggcggtccttaatctggaccagatgaagctacatcacacacagataaaaatacatgttgaaggcggtggctggtttgaattttccttcatcggatgactagaatacaatggagttacacggaatttcttctgagtcaagtccagatttctaacatagatgcaatgatttccctctcacatcttcactgatttttaaattctacggaggttttggctgaagacacctggtgaaatttcagctttacacgaatgggttctcacttattttattctgtcttagaaagttgaacggcgactggagcttaccaagaaggagaactttatctgtgtagttggcccatcatggatacgtgattctgtgaggctgagtgtacctctgaaaagcctagtgcactccagaaggcaggtggaaggtgttgtttgaagtgaaccctattttatttttctcaagaaattcttgagccgattctgtgacatgaacatctaaacagagtaaccagattccaactgcatgactcgaataggtttacacatttttcttctgtcccgcctttcaaacaaaatggtaaataacttcatttccaggccagtttagcattcccattttttaccctgatgagtcccattttaatgagcaatttgctttatccagtagtgcattagtgaagtgtttcctgattttatgcggcaagtgtttatgtgcagtccagtaaggccttcctcttggtgaattcctttctctactagtgaactatttaaggcagacaatatcaacaccaggtagtgatagttccagttttatgggacgtccttgttagcattcaggtatccttgattctcccctctgcctaaagggagtgtcagttcttctggggagggttaagttctctcagtgttaatcactctttcttagaatgccaagccctgccaatcttctcttgatggggtaactttacactgtgataccagagacctgtggtccctgtaagcagttaccttgttttccttcttttttttttttttcttcgatacagagtctcactccagcctgggtgacagagtgagactccatcttaaaaaaagaaaaaaaaaaaagaagatggggcctgatatattattttaggatccaatggcacgtaatctttcttcttaagttctaatggccaagaatactataaaaaaagaaacaaatcagcattcatttcctatgaaaattgaaatcagcttaacacactgattaattatctcattcttctgaaatcatgatatatagtctttttcatgtgtgtttgcctttcttaaacacattgggaagcaaatgttttattttagctgtatttgaatttggaggctaaaataatatgattttgaatggaatatttatttgtgatgaagggattttaaaaaacaacaaccccatatctattactgagggacacaagacgaagagggagattgcctttggcatccttttgtgan

SEQ ID NO: 10021 - DNA, 430 bp, Homo sapiens
  misc_feature 1, 2, 3, 4, 5, 6, 7, 8: n = A,T,C or G
nnnnnnnncagagtacgcttctaaaaatgagtgaacattggtgacttaccaaagtgtgatttgagtttcctggaccctctgcatgaaatgtgaacatgagctatgctgagatcacaagttaaatttacttttgaaaccaggtatacagttgatggatgtcaaatgataaacgtatgcatagtgatgaaacggtcttttaagttttaggtgtgcatgtttgcttttttcctgaacctgattcaaatagttgaaatttgtacttttttttttttttatttcttctgagactcaaaataaccatgttctttctgcttcagtaaatcattactgcagcttgaaagggttcctagaaagttctagttccattcagtttttaggaggaaaagcaacccaaacacgccaagaactagaagcttatccacaagggagt

SEQ ID NO: 10022 - DNA, 194 bp, Homo sapiens
tatagggcgaattggagctccccgcggtggcggccgcccgggcaggtacatcctactccaaacagcctaacaaagagtcaatcaaaggagttctttgacctgctacttgatttgagagttcctaagcagttttcgtgtgtggttctagaatacccagaatgctgattttggtaggaggctgtggatatgtacct

SEQ ID NO: 10023 - DNA, 1489 bp, Homo sapiens
  misc_feature 1, 2, 3, 1487, 1488, 1489: n = A,T,C or G
nnncgatttttgcaaatataagcaaatttgcatgtataatcaccctctgtccttattacacacagagtagctttttattttattattttattttattttattttattttttgagacggagtttttctgtctcctaggctagaatgcaatggcatgttctcggctcactgcagcctccgcctcccaggagaattgcttgaacctggaaggcggaggttgcggtgagctgagatcgtaccactgcactccagcctgggcgacagagcgagactccatcttaaaaaaaaagaagaaaaaaaattgtcctgtcttagccattggagcccttctgattggctccttgcccttctagcactgtgggtcagcgtttctcccagcgggatgcccgccttcaccttgtgtacttcccatcccagagctgcagtcagcccctccttcaggactccaggcccacgtctaccagtggccctggacgctcctgctcctggctgtcagcggcttctgtaactttgcccagaatgttatcgccttcagcatcctcaacctcgttagccccctgagctactcggtcgccaatgccaccaaaagaatcatggtcatcacggtgtccctgatcatgctgcgcaacccagtcaccagcaccaacgtcctgggcatgatgaccgccatcctgggggtcttcctctataacaagaccaagtacgatgcaaaccagcaagccaggaagcacctcctccccgtcaccacagcagacctgagcagcaaggagcgtcaccggagcccactggagaagccccacaacggcctcctcttcccccagcacggggactatcagtacggccgcaacaacatcttaacagaccacttccaatacagccggcagagctacccaaactcgtacagtttgaaccgctatgatgtgtagagtccaaaggacaggaccagactgttggtgactccttccccggcccccacagcagtatcagaaacttctgacaatcagtgaatgtacaacccagccgaggggacggtgcataactctccatcagaagccctggggttcctggccccccgtgagccgcaggaggatgcgttgcctgcagtgcagacggccgtgagctctgggcaaacctaaacagagaccagtgtctcatgctctttcttcctggagtctgtcatctgagggcccgtgtacctgcggagatctggccacgtaggtaccccctccactgtgggaatatcattcccccaaagcacgggtagctcagagcacctgcggtccggcattcccagaatcaacattcacgggaccggggtgaaacgcgggcgtccactgtggctggagcaacatggaacggcaggggggtgtcaggccgggctgaaaacgtccactgctagaaactcccgggcgcgaagcaaagcaaaggccacaacaacagaccggaaatacaacccaagacgaaaggacacgacacctcacagctgacnnn

SEQ ID NO: 10024 - DNA, 210 bp, Homo sapiens
  misc_feature 208, 209, 210: n = A,T,C or G
ttggagctcaccgcggtggcggccgcccgggcaggtaccctccaggccctgtgtattattaagatcttttagtagcgagttgctctttctctgggaaatcggctgttaaagtcagagggagctcttaatagtttgcatggtatttgattaaatggaacagttggatcagtacctcggccgctctaaaactagtgggatcccccgggcnnn

SEQ ID NO: 10025 - DNA, 2189 bp, Homo sapiens
  misc_feature 1, 2, 2188, 2189: n = A,T,C or G
nncaagaaaagaatgtctgtaattgttcgaactccttcaggacgacttcggctttactgtaaaggggctgataatgtgatttttgagagactttcaaaagactcaaaatatatggaggaaacattatgccatctggaatactttgccacggaaggcttgcggactctctgtgtggcttatgctgatctctctgagaatgagtatgaggagtggctgaaagtctatcaggaagccagcaccatattgaaggacagagctcaacggttggaagagtgttacgagatcattgagaagaatttgctgctacttggagccacagccatagaagatcgccttcaagcaggagttccagaaaccatcgcaacactgttgaaggcagaaattaaaatatgggtgttgacaggagacaaacaagaaactgcgattaatatagggtattcctgccgattggtatcgcagaatatggcccttatcctattgaaggaggactctttggatgccacaagggcagccattactcagcactgcactgaccttgggaatttgctgggcaaggaaaatgacgtggccctcatcatcgatggccacaccctgaagtacgcgctctccttcgaagtccggaggagtttcctggatttggcactctcgtgcaaagcggtcatatgctgcagagtgtctcctctgcagaagtctgagatagtggatgtggtgaagaagcgggtgaaggccatcaccctcgccatcggagacggcgccaacgatgtcgggatgatccagacagcccacgtgggtgtgggaatcagtgggaatgaaggcatgcaggccaccaacaactcggattacgccatcgcacagttttcctacttagagaagcttctgttggttcatggagcctggagctacaaccgggtgaccaagtgcatcttgtactgcttctataagaacgtggtcctgtatattattgagctttggttcgcctttgttaatggattttctgggcagattttatttgaacgttggtgcatcggcctgtacaatgtgattttcaccgctttgccgcccttcactctgggaatctttgagaggtcttgcactcaggagagcatgctcaggtttccccagctctacaaaatcacccagaatggcgaaggcttcaacacaaaggttttctggggtcactgcatcaacgccttggtccactccctcatcctcttctggtttcccatgaaagctctggagcatgatactgtgttgacaagtggtcatgctaccgactatttatttgttggaaatattgtttacacatatgttgttgttactgtttgtctgaaagctggtttggagaccacagcttggactaaattcagtcatctggctgtctggggaagcatgctgacctggctggtgttttttggcatctactcgaccatctggcccaccattcccattgctccagatatgagaggacaggcaactatggtcctgagctccgcacacttctggttgggattatttctggttcctactgcctgtttgattgaagatgtggcatggagagcagccaagcacacctgcaaaaagacattgctggaggaggtgcaggagctggaaaccaagtctcgagtcctgggaaaagcggtgctgcgggatagcaatggaaagaggctgaacgagcgcgaccgcctgatcaagaggctgggccggaagacgcccccgacgctgttccggggcagctccctgcagcagggcgtcccgcatgggtatgctttttctcaagaagaacacggagctgttagtcaggaagaagtcatccgtgcttatgacaccaccaaaaagaaatccaggaagaaataagacatgaattttcctgactgatcttaggaaagagattcagtttgttgcacccagtgttaacacatctttgtcagagaagactggcgtcagcagccaaaacaccaggaaacacatttctgtggccttagccaagcagtttgttagttacatattccctcgcaaacctggagtgcagaccacaggggaagctatctttgccctcccaactcgtctgcagtgcttagcctaacttttgtttatgtcgttatgaagcattcaactgtgctctgtgaggtgtgaaattaaaaacattatgtttcaccaaaaaaaaaaaaaaaagggcggccgctagacnn

SEQ ID NO: 10026 - DNA, 1340 bp, Homo sapiens
ggtggcggccgagtacttacaggggaccgccaggggcctcgagaatcggtatcctgagtcctcttgaagagcagtagaggttgtttcattaagtgcaaacacattgttcttaatttgaaaactgtgggcagaaacagaagcccgagactaatttttccattgctaactctagattctcggccactggagtctgaagatactctctttgagaatgcatattattttgctcacagctaaaacatttaagtatcatagctgatcagtggagtgagattaaaaggtttcttttttgaatcatcagctagagatgtgcaagggagacagcatgcagggtgtgttcagaagagcttgctgaggtgctcggctcttagcattaaaaatgtgatgttggtatatcatcctgatagaaaacactgctttccaaatcctagtcactggatgggaggaaagtaagaacagattctgccaaccactactgatttgttataattctccccattgaaattgggacaaaatttgtaacatgctactctgaaattgatcacattctcaattctgtcaatagcagagaatttagcctcaacaccaccaattcaaaatagtttaggtcttgcccctgcctgattatgtaacagaaaagcataaagtttgcagggtggagcgggaggatttttctaggaaacttccttctcttccattaacgtgtgaatgagtaaggacagttaatctctgcttctgatataaatattaggggtagaggctgagtagaagaccctctttttgttttcagtagctcattctcattcaccaatgataagggagacttggctctcaactataagtgtacctccgcagatctttagagagtagagatacatctgcatataaaaaaaaaatctgccgtaagtgatagagttgaaaataatgtcctacataccagaatgttcttctgaattaggcatcatgtaggtattcagcattctttccatttccaaaattgctcccactccctgttttttcatcatcccctttttcctcattagctcattggaaataaagatttttattttatttcattttttttttctgcagagaagcacatatgtatgagatttaggcaatgatttctcaaggaaaaaatgttttaaaggtacagcatcgctggtggtttcaaaaaacgtagtcattcttctcactgcaacaatgtaagataagcagggtagatctgttatttccaaattaaaggtgattaagatatatggagagagaacatggcatgtgaggtttatagggctagaaactgcagaaccatgtagaacccacatttaactacagtacct

SEQ ID NO: 10027 - DNA, 1040 bp, Homo sapiens
  misc_feature 1, 1040: n = A,T,C or G
ncatttcattcacttcgggaccctgtattgaaaggggagacaatgccaggtcaaagtgtgctcagggcaggtggaactgaaggcagaaagagggtgggtctttgaggagtcactgaagagaggctgggtcattgaaggctagaatccttggggtggcatctttgtacacttgagatggtctcacgtgagacatcaatacggcttgctggggggcacaggtttagggcagatgaaactcacaggagggcgggtctgggttaactgagctaaagagctttcaagccactagagcaacagagctgcccacagttgagtcagattaacctgggaagcctccaagtaatggctaccagcaccacattcacagatctcaaaatttatgaaactgatgagaggttggatttgataactaagagtctacaaatctacagcattaattacacttgtcattaggtcaaattacagagtctgattttcttctaggaaatatgtgtgagattacacatgctttgaaacataaacccattatttccaaatgacaggttataatgactgtgatgagctcagagatttgttattgaaacgaactaatgattatacttgttaaattaagtatgggaatgattaaagaatttgctaatagatattccctgttgacacacgttggactcagtggagtgtctggttataatgtacatgtgtctactcattcacaaataagcacatacacccacaaagacactcacatttatatgcagaaaaatagaaaacggcttatacggcaacaggcattcctcttgtgaggtacatcagacccgtctagttatcacaagaggtaatgcaaatgcatttaaaggttgattccttgggtttgaatccagcctttatgttttattgactgcggggccctggacaacttaatttatctcagtggtccctggaatggtggtatggtcataagcatcacctggacacttgctagaaatgcagattctcaggccccactgtggccctcccaaatcagaaaacctggtggtgcn

SEQ ID NO: 10028 - DNA, 229 bp, Homo sapiens
aggtactcaggatctgcagaggccaggctgcttggctcccatcacaggaggtttgctaggcaacccagaaggagctttcaaacaagcctagatattcctgcctggcctgctgccattctccaagaaggcaagtaggcacaataaattagaactggacggtaacagttcacatgttgccctttaagaagtgttgatattttatggcaagaggtttgtttgtacctgcccg

SEQ ID NO: 10029 - DNA, 784 bp, Homo sapiens
  misc_feature 1, 2, 3, 4, 5, 778, 779, 780, 781, 782, 783, 784: n = A,T,C or G
nnnnnctgacagatacttccgttctaagtaccaagtacttgttaatcctagtcaggttattgctaaggataaatgatttcacatttctcataaagatgcctgtcattaagaatattaacacaaattccttccccttgaatagaaatgagctgtcattttagcaatcttgctgtgtcagcctttctattgtcatacaccaacaaatgatgggaaaatcaatttactctttagaattagtcaaagtgaggaatcctttgaagtgggggtgcagagtttcgcctgaattctataatcacgtaacagcgagtactgtatgtatgttggtaaaatgttgtgaaatttaatgaggactatttgttgccataagaccttccggacagaatctatctctgaaaaagaattcccactcctaaaatagaggtctgatgagcaacagatgtggtttaaatgaacccttgttcaactgaaccaagaatatattgtgatctgtatgaggcacaattcagaagagaggggaggtggctacagcacagcctcagtgttgagtttggttgtggggtttaaacatatttatttatttcataaagtttctctcataaggcacaatgcaaatgagcttttaattaatacaatctaatgttcagaggatggtcttcatgctgtttataaaacaatttacatttttattttgtagtctaagaacgtgtgtcgaaaagcatgtcagtgagtagccataaccttcagagtgatctatgtcctggctctaaaactaggggannnnnnn

SEQ ID NO: 10030 - DNA, 338 bp, Homo sapiens
  misc_feature 1, 2, 3, 4, 5, 6, 7, 8, 9, 10, 11, 12, 13, 14: n = A,T,C or G
nnnnnnnnnnnnnncgcccggcaggtacatacccacatacatacccacacataaacatataaataatattttttaaagaaccaaggacaataaattttcctgatgagccaacattttaaggaaaaaaataatgaaaattgtatctttgtgacctgacataaatacccaccaggataactgccatccagctcttctcacggtgtgactgagcacagtgggtcctcccttagctgaattctaagagtgaagaatagtttattgtttgaagcagtgaggagagcactagggatatatttcataatacatgaagaaaggagggaagactaatgcaagtttgt

SEQ ID NO: 10031 - DNA, 300 bp, Homo sapiens
acttaatttaatgtttaataatattaaatatctttaatattaacgaagtgatcttttaagagatattggtattgcaaatgtttacaaatagtttcttagttgaatcaagattggtatgagttgctaattgtggagctgggtgatagattcatgataattcatcatattgctcagtttatatttgaaattgtatattaaacttgaaaagacactttaatttgaattactattttatcttttaaatgtggtatttctccttaatttaccctaagaaaacactataattttatcacagtacct

SEQ ID NO: 10032 - DNA, 454 bp, Homo sapiens
acacatatttgagctgtaggataagtcttgaattttattataatcccgtgaaaccatcatcagagtcaccataatgaatttatctaatctatcacctttgtatttacttggagcctttataaagtttttctctctgctcttcaaacaaccattgatttactttgctgtatgacggagtactgaaaaaagtcaaatacaattaacacacacttgattatttgagtgattttttttcaagaatagtctcatcagtatttcatgtctgtgccgcattaatgcacagtggttaggatcatgaactaggagtgcccagcttatgttcccagtgtgactgcttacaatctgtgtgactttcagtgaggaactgaactgtctttgttttctcaactgtaaaatgggatcaatgataatctttttttctttctttcttttttttttgagatggagtctctgt

SEQ ID NO: 10033 - DNA, 202 bp, Homo sapiens
aggtacccttggtttctcagacaactcactgatttatggtcttgagaccataaactcattttccttatatgaatgacatttccacatccacaacaataccaccaaatatatgtatctagttcttactaactgcaaatcctcaaagtgaactgcgtgcattttaatgttgcgtagtttgctgatttatgatttcccttaatgt

SEQ ID NO: 10034 - DNA, 310 bp, Homo sapiens
  misc_feature 310: n = A,T,C or G
ccgggcaggtccgggcaggtactcttgtttaaccatcagaggtgatcccatcaccttcacagccccagcctctgctccagtccctccccagcgaaaagggccgcccatgccatcctgctgctggtgatttgctttgtggtcatggactcagtggacatcattattttattaaccgtgtggtaggtttttaactcagttatcctggatatccaaaggtttgtggtccatctttaggcttccgtttgttctttggtacctgcccgggcgggccgctctagaactaggtggatcccccggggctgcagggaan

SEQ ID NO: 10035 - DNA, 1432 bp, Homo sapiens
  misc_feature 1, 2, 3, 4, 5, 1404, 1405, 1406, 1407, 1408, 1409, 1410,1411, 1412, 1413, 1414, 1415, 1416, 1417, 1418, 1419, 1420,1421, 1422, 1423, 1424, 1425, 1426, 1427, 1428, 1429, 1430,1431, 1432: n = A,T,C or G
nnnnngcgggacccaaacaattagtaaactggtagttgaaaaggaaaggattaagtaatgtagtttctttctccacattctgctgctgcttgaatctcattccaaaacagtttagcatcatatattattaccactctctgaatatcactgttgttgatatgcttaacataccttgatcttcaaaaaggaaaaaaagcgagaaagagaatgagttttggggagttgtctcttttgtctttacatgacacaaagcatgaaacatgttttctttttcagcagtcctttgccatgtgttatgactgaatgttgctccccaaataccatcacaccgggggttagagcttcaacctccagtatgatggtattgaggttggagcttcaacctccagtgtgatggtatcggggttagagcttcaatctccagtgtgatggtactgcggttagagcttcaatctccagtgtgatggtatcggggttagagcttcaatctccagtgtgatggtatcggggttagagcttcaatctccagtgtgatggtactgcggttagagcttcagtctccagtgtgatggtatcggggttagagcttcaatctccagtgtgatggtatcggggttagagcttcaatctccagtgtgatggtactgcagttagagcttcaatctccagtgtgatggtattagggttagatcttcaatctccagtgtgatggtatcagggttagagcttcagcctccagtgtgatggtatcagggttagagcttcagcctccagtgtgatggtatcggggttagatcttcaatccccagtggtggtggttagagcttcaatctccagtgtgatggtattggggttagagcttcaatctccagtctgatggtgtttcgggatggggcttttaagatgtaattagggtttaagatcataagggacctggtctgatggggattagtaggcttatatgaagagacacaagagggcttgctctatctctgactctcccacacacaaagtagaggccatgttagcctatggagagaagatggccatctgcaagccaggaagaaagccctcactagaaaccaaaccctgcaaaaccttaatcctggactcccagccttcagaactgtgagaaaatttatttctgttgtttaagccacccagtctatggtattttgttctggcagcccaagcagactaagacaccatgttcagacagaatttgaaaattacttttaagtttgcaccagaatgtaactacatttgatatttaaggggcaaaagcaggtgtagagtttgtaggaaacctttatgttatttaatccctgtaatcatggtaccctcttgagagtttgcatgtttgaaatatttaaatttaactcactcatgatttttttcagaaannnnnnnnnnnnnnnnnnnnnnnnnnnnn

SEQ ID NO: 10036 - DNA, 269 bp, Homo sapiens
ggtgacggccgaggtactttttttttttttttcacgtggtcccagcttgagtttactgagcctcctccaggctcagatatgtgcttgcctggagaaactgcttccaaaggccaagcagccctgcctttggagagctgcttttgttacttacaatagtgtttcccagagtgcattccatgaaaatattagtctttcaacatgctgaacaatgaaagaatccatggtcaaatcctgagaacatatgtccctcttttagagattcataaggt

SEQ ID NO: 10037 - DNA, 289 bp, Homo sapiens
aggtacagaactccaaaagaaaatcaggcctcattgccaaagctcagggataagtctaaacagaaaggcatttatacagcaacaagaaagttactgggggctggggatgagggagggctggggtaggaggatactaaaatatttttctgaggtgcccaactgcttgtcttagaagaggctaaactgagccaagcgtctctgtttgtctcctccaccccctcctctacagctttacaatgttctctagcagaagcaaaaacagggtcactgccatcatagataaaaggat

SEQ ID NO: 10038 - DNA, 392 bp, Homo sapiens
acagttttatatcaatattttatcaagcaaaaagttgaagccaacacccaaagctgccagatatggagaacccagtgacaattttgaattaacctgagtgaccctctttctttcaaagttgctaaattgtttcacagatatgcttctgtgggatgtaaataacagagtatatatgacctttttaaaaaaaattctttcttttctgtgttctaagcaactggaaactaaaaactgccctggcctatcataagggagaagatgggagtcttttgctgtccatcttgaatgtaattcacattgtccatgagtgctgatctaaccccatatgcctctgcccgactgcctttatgaaatatggtaatttaatgcttaaacaactgtttcatttgtgt

SEQ ID NO: 10039 - DNA, 413 bp, Homo sapiens
aggtaccagatcaaaacctgggaacttcgtatttgtccttttctctctgccaggaatatcgtcctctccatttgcccaatgagccccacctcctcaacatttttacctctgtggaaatcccttccttccagaagcctccactcgcttctgatgccaaggagcttctgcggcgccctgcacgcacctttacagatgcaggtggctgtttcctgtgtcagactgcaagctccccccgcgttccttgctcatcgttgacttggcctggcaaataatgacttggcctggtaaataatgattacacgaacaaatgtaactaagacatccagatacaatctaatgcatttcatgcaactcgtgtaaccaagtgaggttttccagctgtttcagcttctattataacttacattacagcc

SEQ ID NO: 10040 - DNA, 3185 bp, Homo sapiens
  misc_feature 3180, 3181, 3184, 3185: n = A,T,C or G
gaaaacctgactgcgctcccagaagcctccggtgtacctcgctgggaacgcacttcctgggacgctgagagggagacgctccaagaggctcctcagtgtgggcgagtaaaatgccctgcgtgtgagaagcaggctcagattattgctactctgtattcagatcttcatgtgtctcttctaagctgaataaagctgttttggaactgtcaggtacctcaaagctctgactgacagtactccacaagcttgcctgccatgggctgtcgggatgtccacgcagccacagtcctttccttcctgtgtggaatcgcctcagtagcaggcctctttgcagggactctgcttcccaactggagaaaattacgattgatcacattcaacagaaacgagaagaacctgactgtttacacaggcctgtgggtgaaatgtgcccggtatgacgggagcagtgactgcctgatgtacgacactacttggtactcatcagttgaccagctggacctgcgtgtcctccagtttgccctacccctcagcatgctgatcgccatgggtgccctgctgctctgcctgattggaatgtgcaacactgccttcaggtcctcggtgcccaacatcaaactggccaagtgtctggtcaatagtgcaggttgccacctggtggctgggctgctatttttcctggcaggtactgtgagcctctccccatctatctgggtcatcttttataacatccatctgaacaagaagtttgagccagtcttttcatttgactatgcagtgtatgtcactattgctagtgctgggggcctgtttatgacttcccttatactatttatttggtattgtacatgcaaatctttgccttctcctttctggcaaccattgtactcccatccacccagtatgcatacttactcacagccctattcagcacgctctcgcctctctgccattgaaattgacattccagtagtttcacacaccacttaatggggaaatagttaattgttaaagaaaacttcttgtagcctcacattccccttgtgcaaagagctcttttggacctacatacattttcctttgtttttgaccaatcaatgaagccaaatttatatgtcctagtagaatgaagtgctgctagtttttatgagaagtatattatattaaatgtgaattttttaaattttgcttcttatactggaaggaattttagccttcatattgatatctaattaattatttaagtggaagaggcctgcatcacaattgaggtaatgtagagcaacatgttaaagaatgatggttagcagaagctgttgtatacaatcttcatgaaaatttcagtgtgtatttttctttttctataatacctttaactgcaaagaaaaggcagtttcaaatataagaaatttatttcaggtaagggtaatattttaatagtagtcaataatctagcttaaggctgtaactcttctatcggggctaattgtatgaataggtgtcagtatgttgaagattactttcttttgtgactttcttctacctcatgccactgtttaaaagtaaaacgtattttaatgatgttagaataagactaccattctaaatatcacctacttatgaataacatgtaataatttttaacattaatgattccataaattgtattattgggattagaatgtgctttatgacaggttagtgtttcctctgaggcagaaaactcttttttggagatatcttccatcaagcagtactcgtgcccatatacaatctcttagtggctaggagaaataaataaaagggccataatggtttgttctctttcagacataatttagtaggggacaagaagtctgttcttcagtgagtacactagagatttactctggtgactgccttttgagttatgggtgaagtaaggtatggctttaccataaccttgattcattcacccttgattcatttctcgcccccgtcactgattatttccttgagcatatatctctgcctaacactttagtaggtgctatagaggatacatgaaaagtatgagatctggttccatccagtaagacattttaatagagaagatcaaaatgttacctggcagttggggaataatctgacttcgttggcagttggccttaacttcttaatcattgatccaggaatatttcaaccagagacacaactttctggcagacagacaaattgtacaacaccaacaatatcctggaccttgaaattctgtttacttcagtccattgtatcctttaaggcacctgtgctagcctagattttgtaataacactgatttatgagaatggacaaaagtggtagggaaattgttccctctccacttctgaaagtatgatgatgtattaaggatggaggagttattaaaaatgtctcttctgatgaggtaacaattagatgaaaccatgttaaagctgagatgaacacttagaaattcagggatattgggtctttagccttatgaatttgagctgcttatttaattggtgtaatttactacatattagtactatattcgtaaggattttttattaaccattacagattttacaaacagctagttatatggtaaacagattattatgcctttttgcaattctgaatatgattctagtatttgtgtagatgtatttggtactttttcccctaattccaacactagtttatatattatagacgaataaaatctaggtgtcttcaactttttcacatgcccgtcgtcggaacggcacacaaggttctgcatgttcctcaactaaccgggttctggattacttcaccttcggagtcctttacctttacccagatgtagctgagctcgaccattttcagaacccgcgggcgccacttgcgagcccacggctactttccccccgttttgctaaaattaaggccccctttcaaatggccttgtccaacaagagtctaaaatactctccacagccgtgggcttgtgggtatacacgctagcacagcgagaccacacttagagatacaaacgctgctacgacgcgtaatgacagaacctccacaatgggctgcgaccagacgtgactgacatcacacgacactactctctgttgacttgtcctcacttttcttctctcttgatcttcttcaatactatcctcatattgtgtnngann

SEQ ID NO: 10041 - DNA, 453 bp, Homo sapiens
  misc_feature 1: n = A,T,C or G
ncgtaatacgactcagtataaggggagctgcaccgcggcggcggccgaaactttataatcttttaactaaatgtaattgtcaccataatcttatagacaaagcattgaggtttattgagctaatgctgaaggtagtaagtggaggagccaggatgaggtcagaatctgagattttaaccatgcctatgctgtcacttcttacactttagaatacctccatgctcatgtggacacctaggaacaaatgaatatttctattcttctcccagaatttcaaaacattaaacatgttaaactgtatttttgtttaccataagccttcccaggaggaacaagcactaaacacagtctctggcttaggatttggatgaacatattcaaaagccatctgcttcccagcaatcataatcataccctttccttttggccactatcaccaagatctccagtagt

SEQ ID NO: 10042 - DNA, 2077 bp, Homo sapiens
  misc_feature 1, 2, 3, 4, 2069, 2070, 2071, 2072, 2073, 2074, 2075, 2076,2077: n = A,T,C or G
nnnnctcaggaaaaagatgaactggtcccattcctgcatctccttttgctggatctactttgctgccctcttgttgagtagctgcagagacggcagatggaaaatatgctcagaagttgtttaatgacctttttgaagattattccaatgctcttcgtccagtggaagatacagataaagtcctgaatgtgaccctgcagattacgctctctcagattaaggatatggatgaaagaaaccaaattctgactgcttatttgtggatccgccaaatctggcacgatgcctatctcacgtgggaccgagatcagtacgatggcctagactccatcaggatccccagtgacctcgtgtggaggccagacatcgtcttatataacaaggctgatgatgaatcttcagagcctgtgaacaccaatgtggtcctgcggtatgatgggctgatcacctgggatgcaccggccatcaccaaaagctcctgtgtggtggatgtcacctacttcccttttgacaaccagcagtgcaacctgacttttggttcctggacctacaatggcaatcaggtggacatattcaacgccttggacagcggagatctctctgacttcattgaagatgtggaatgggaggtccatggcatgcccgctgtgaagaatgtgatctcctatggctgctgctctgagccttacccggatgtcacattcaccctccttctgaagaggaggtcctcgttctatatcgtcaacctcctcatcccatgcgtcctcatatcttttctggctcctctgagtttttatctcccagcagcctccggagaaaaggtctccctgggagtgaccatcctgttggccatgactgtatttcagctaatggtggcagaaatcatgccggcctcagaaaatgtgcccctgataggtaaatactacatagccacgatggccctgatcacagcctccactgcgttgaccatcatggtgatgaatatccacttctgtggggccgaggcccggccggtgccacactgggccagggtggtcatcctgaaatacatgtccagggtcttgtttgtctatgatgtgggtgaaagctgcctcagcccgcaccacagtagagagcgggaccacctcacgaaagtttatagcaaactcccagagtctaacctgaaagcagccaggaacaaagacctttccagaaagaaggacatgaacaaacgcttaaagaacgacctgggctgccagggtaagaaccctcaggaggccgagagttactgtgcacagtacaaagtgctgacgaggaatattgagtacatcgccaagtgcctcaaagaccacaaggccaccagttccaaggggagtgactggaagaaggtggcgaaagtcatagaccgattcttcatgtggatttttcttcattatggtgtttgtgatgactatttgtgatcatagcaagagcggattagtcacagatatgggcttttgctatctgggtagaaattaatacaattccctgtgatctattccaatgttcttccaagatttttgttcatctataatttaggggtcatgttgtctgtgctttttatttttagcttcaaatgaatgtcgaagctatctgctctgttaaattaagcagaagatccaaaatttcaagggtaggaagatggaagaaatagggaaagagcccttttatagcccaccgtagtggtgggtgactggcctctagtttatataattatttgcctctttggcagtaccagataacaaaatacactttactggtaaaatttaaaccaaagaaggcataacaaaacaaactcattttccccttagtgcccattaaaatatgcatttggaacatgacatagtcctatatttattagtgtgatttaagtctcaagtacctaatcggctatgccttgaagtctattcatttgaaaaggttgccggtagaggtagcttcacgtagggaaaatctcaaggagggatgggtggtttaacaagagtcggtcttgtaataaagggccatgaaaaggagggcccaaacaacggggtgtgagagaaaaaagggcnnnnnnnnn

SEQ ID NO: 10043 - DNA, 304 bp, Homo sapiens
  misc_feature 1, 2, 3, 4: n = A,T,C or G
nnnncgaattggaagctccaccgcggtggcggccgaggtacccaaagaagtaaacttagcaacctcataattctaggcacctctctcaggtaatctcagctggcttctctaacacctctggttcctccccctaccagcatgaggacatgaacagccatggatggtgttctgcaaatgttatctcagatagtctctggacaggacctgcgagcagacttgctcagggtctagaaagtcttccctggacaaattccagatctctagctagctaagacaactgcagccattttcctgtacctgcccg

SEQ ID NO: 10044 - DNA, 1233 bp, Homo sapiens
accttatacaagatgctataaatatttgtatgcataattcaacagtaatcagtggtgtttatctaaactaactgataatctacagattgcagtgcatttatgatttcaatggaattaatctaattctccacacttaattgtgagaatagctataaacagattgtcaagaggagccttttagtgccaatgctttacttgaggaaaaaaatttcttttgggcaaacccatctttattcattgcagaatacaacgattctcaaaagtagcttaacaaccccaactccgctgggtaagtgtggcggcacacgcctgtaatcccagctacttgggaggctgaagagggaaggctgcttggggccaggagtttgaaaccagcctagacaacataacaagagtctgtcgcgaaaaaaaagcaaacaggcaaacaaaaaataacctcaacttcttataatatgcatgtcttagaagatatcttctttgccacataaataaaatatgaaaataacagacaagttccaagaaataatataatgaaatcaactcttctttgctcatgggaaaaataattacttccatttcctgagtcctcttttgacctatgagaacacaaaggatttgccgccagtgggcagaagacagtgggtgtggcaatttatacatgccatgttagaaacagctcaagcatccctgaagccttcctctacttttccatttatttttacatgtttcagatccacagtgaacactttgtttggcaaatgtgatctagattatttaataagtgtgacttcaatttcactttcctggtattcgtatgctgcccatttttcagtcagcttactttgagtccaagttgaccccctagtttgaatggtcacggcatataaggggaataccaggcatatctgtcaactctatgggtttaagacactgcagtgtgattacttagtgatttataatagagctgggaaatgactacttgctgtgctcctgggagacactggtggctgaccctgattacagaaagtagtaatacatactttccagctgaagatgccctcagagcagttttcatcaggtcattacaagaatcctctaatcaaaaatgaaaatgacccttctccatccaactctgacctcccacaaaaatcacttttaaaaattaaataatttgcaaataataaagtatcatacttttaaaaagtagatgatttgcaaataataaatcactgt

SEQ ID NO: 10045 - DNA, 190 bp, Homo sapiens
  misc_feature 1, 2, 3, 4, 5: n = A,T,C or G
nnnnnccgaggtatccctcaaacataccagctaagagggcatgatcacatcctttgctgatagctgacaaagactgaagatgactgctggaaccacggcataaaaatcaatctattcaagacagacaacagctctcatttcaaaaatatcgcctacctttccatagccccctttaccaagtacctgcccg

SEQ ID NO: 10046 - DNA, 3060 bp, Homo sapiens
  misc_feature 3036, 3037, 3038, 3039, 3040, 3041, 3042, 3043, 3044, 3045,3046, 3047, 3048, 3049, 3050, 3051, 3052, 3053, 3054, 3055,3056, 3057, 3058, 3059, 3060: n = A,T,C or G
ggagtcgacccacgcgtccgcggacgcgtgggacacttacccctatttccaatttcaaataaaaatcagtcatattgcaattggatccatttgcaatatgactgtcattaaatcatagtatcctggctctgtgattatgcaaagtatactttttatagtatatcagtcattgggtttacatagtgagtgcgtagtcctttttttctttctttcttgactaggtaatatagtgactgcttctcaaatcaattttcctttaaaaagagattaaatgaaccagggttttgtttttctgcttttatagatttcttgataaccggctgtttgctacctgctctgatgacactacaatagcactatgggatctgagaaaattgaacaccaaagtatgcactttacatggtcacactagctgggtgaagaacatcgaatatgatactaatacaagactcttagtaacatcaggatttgatggaaatgtcattatttgggacactaacaggtatacagaagatgggtgtccacataagaaattctttcacacacgttttctcatgcgaatgaggttaacaccagattgttccaaaatgttgatttcaacgtcctctggatatctcttaattttgcatgaccttgacttaactaagtctttagaagtaggcagctatcccattttaagagcaagaagaactacttcaagttcaggagtttcaccacgaaatagtcttgaagtcgtaacccctgaagttcttggtgagagtgaccacggaaactgcatcacgtccttacagctgcacccaaaaggctgggccactcttcttcggtgctcaagcaacagtgatgatgaggagtgtacttgtgtctatgaattccaagaaggagctccagtgcgacctgtctcacctcgctgttctctacgactgactcattacattgaagaagccaatgtaggcaggggttacatcaaagaactttgcttcagccccgatggacgaatgatttcttccccacatggctatgggattcgcttgttgggatttgacaaacagtgcagtgaacttgttgactgcttgcccaaagaagccagtcccctgcgggtgatccgttctctgtactctcataatgatgtggtactgacaacaaagttctctccaacacattgtcagattgcctcagggtgccttagtggacgggtttctttgtatcagccaaagttttaggcacaacttacatcaaataaggaactcttctggtgtttgacttaggaattgcttcaatttagatgaagtattttctttttagaagatcttataagtttgggtcaagatcctggttcttatgggtccatgaacacacttgtgaccttagtacttggtcatccagcatcatacaggcatctccaagttagactctatgcagcatcatcttttgcagcattcctctgctcctgctgatctgtgccactgaactccagttcttctggtcattttgcatggtagctcttgtcacgttccttccttcctcactctctatttctctttccctctccctgtccctctctttctttgtgtttgttgattttggtgtcaattttgtggacatttggcaggagttttgactggggtaggagaaacccatgacattagaattgaataaaacctagaagttggatattggcatattggttgttgaaaaataaatttcatcctcacttatgagtatacttggccttttaaagttactgttatgtttatctatattgagcacagataatggcattattcttataattgttaagatagtcttgcaacaaaatgtcttttaagtttcctgttaaaattataaaaagattttcatggtgagagggattttattgtgaaattctagaaaaaaatattaccacctctctttgtaatttactttacttgtatgaatttaacatctctagcatgtatccttacttgatattttgttcctatcaacagcattagaaaggaaaggagacagaatgagctttggttatttctattgcacagaaaaggatttttaaaattagattagtataatatctggccatagagtgataagaacaatatgacttagattttctgtatttcatctgccagattatttgaatcacacaggatgatgtgttaacagtattagggtggaagaggaatcaagagtaaagaggtaggggtttactcatttttcttccctgagccaggtgtgacaagccaactctgtcaccattcgtgaggggagagttgcagtcctcttcaagctgttatcataagtacagtagtcagctacttggatatcaagactaagtgctgatatgaagacttgcctttgtgttttgttatgaaacacgcaagcataaagcaggactcaagcacaaggctgactgttctactttgaataacagcttccttgcagtctcctccacatgggtggtactgtgtttagaagggattaccaaaggctggagcgatttaagctatgcactagccttgccctcttaggttgcattctctttaggccactggttctcaaacattagggtgcactgtaaccattacagagcttgtgaaaagtgcagaaacctgagcctcaccttatgagattctgattcagccagggggaggacaggaatctgtatttttcatagcaacctcaagtaatctttattctgagggtctcgggattgcaggttgaaaaacacaaccttaatcagcagtaaattcttctctactcggccaggcgcagtggctcatgcctgtaatcccagcactttgggaggccgaggtgggtggatcacaaggtcaggagttcgagaccagcctgaccaacatggtgaaacgccatctctactaaaaatacaaaaattagccgggcgtggtggtgctcacctgtaatcccagctacccaggaggctgaggcaagagaatcacttgaacccgggaggcagagggtgcagtaagccgagattgcaccactgcactccagcctaggcgacagagcgagactctgtcnnnnnnnnnnnnnnnnnnnnnnnnn

SEQ ID NO: 10047 - DNA, 2496 bp, Homo sapiens
  misc_feature 1, 2, 3, 4, 5, 6, 2496: n = A,T,C or G
nnnnnncatctccgtttaatagtgagagcccagaatatgatgctcgcagcattttgtgagaaattgtattagatgaaagaagtgaatgacaagtctccttgtttcagatatgagttatagggggagagaaacacgtactttgaaagaattgacccagctgaattggaaaatgtgggaaggggatggggaagaggctgctccacctgagatctggctccaggacttacagcaaggggaacttgggcaagttacagactgtctatgcctcagtttctttatcagcaaaacagaatcatcccataaactataaggtcgatggtatcagcgggtccccaaactgactgcacatctgagtcatgttaacaaacacattccaggccccacctgagccctctgaatcagaatccctgtaaggaggatgatgaacttgaatttgcactgactttcccagctgtttcttactctgatcaacttgggggtaggacccattgagctgcatcacatcattccaaagccaaaacacaacagcaggacaagaatattttcaaggcagtctctaaagcagaggagaaactgttgagggaacctagaagtaaaggagatctggcttgctgggctccatttgaactttgagtacaacagagacatgagcccttcgggacacatgcctgaggtagtgacaatccaactttggaagagtggaagccctagtttcaaattcaagcatgctttgagtataaattaagtttacctctttttgcacagcaacatggccaatctttcctaagctgctcagcttacaagaaaaggaatcatactgctaagaattcaaacttcagcagtcataggtaagtaaggaagtcttataaacctattctagccacctaaccagaaactcgaaatttagcaagttctttcacattcaggacagttgtgttcactagatcagaggcactgagacatgaagaacagacccctaaaaagggaaagtgttcctttcagttttaggacaccactggaatattagggaagtggaaacacagctgcccactctacagtatgggttgcctttgtgtccggaatgtgcctaacgtcctgacctccatgcccttttcagggagccttgggaggagcccgaatcactgatggaattgcgcagtgcatggagatggctcagcaggatgagggtaaatgcaggggcaagtccaggccatactgagagacaatgagtggcgctgatgaggacaaagataaaatcaaaagtttgtgcttcatcttcaaaaactcaagctgataacaaacttggcctgatgagaaataataagtatttttctatttacatgagaatttaatctcaaaacagaaatcagaaaaatatgaagtccagggcataaaacctaaaactattgctcatatttattctttctaaatagagcaaagtgtacaatcttctccataagacatacattgtggttataaaaaggcaaaagtcttagtgagaatcattggtattccatagaagagtgaattaaacacagccaagggaagacccacgtctcatacttctcttgtatattccaaagttccagggaaattccaggtgatagaggttatttcccatactgttaaagcaaggtttcagacacttctgaattttggtcccagtactctagaagggcacacctctgcccctggaaaataatacaggaatgaatactcttcccgtgacccattctggtcattcttccagcatcacaaaaaccaaaaaatggaaatatggccaaatacgtgattagctgtccctcatcttcaggtttcttatctgttacttatagataatagcattaccttaaggattatgatgaagatacaatgtccaaatataaacacagttttgagcaaaatgccttgtatgaattggtcaatgaataattactaaatatgtgaatatttactggattgtatggatcctatgaataattactgaataattattgtgattgcttttattggcagtgctgaaaactcatccctttgtgacctcaagtaacccatgacactttgtgaacctgcagttttttcatttagaaacttgacagattttcattctgacacagaatgtcaggtctcccagaccctagaaaatacattgacttaaagcctttgatacatctcaaagcagtatccttacagtgtcactggaagatggtgcgggctgcagagagggatgctttcaaatgggattaaccagtcctccttccttcacttccacatgaatgctgggcagcccagggtcaacccactgcaccctcaactcaggcaagtccagcagccaatcttaggagacctgggctacagaacagtctctcaagttccaggctcacaaaacctaggtggggatgaaagctgagaaagcgaagaggtggttcaggggatcactctttcctacttgttcctctcacctcaaactcaccctctacctgcacgacaacacan

SEQ ID NO: 10048 - DNA, 347 bp, Homo sapiens
  misc_feature 1, 347: n = A,T,C or G
nccaccgcggtgtcggccgcccggcaggtacgccctagctccagcttcccctgggagactgtgcatctcctggctccactaacaccaccttcttctgaccttccagcctagagatgatgactctgccagcctagatgggctctgggttgtctccctattcctgtttgctttgtagatttcccattatgctgtcaccaactccccagcctaagccctctctattttaaattctcaagtggattatgttcctgattagtccctgactgatataccactctcctcatgatctctgattagttttcctgttaggttgttgcagtaaaaaaaaaaaaaaaaagaaaaaaggn

SEQ ID NO: 10049 - DNA, 189 bp, Homo sapiens
  misc_feature 1, 2, 3, 4, 5, 13, 14, 32, 39, 40, 107, 108, 125, 126, 138,139, 146, 147, 184, 185, 186, 187, 188, 189: n = A,T,C or G
nnnnnaccttcanntgctctaaatcattatgnatctacnntatctgaaaagtgtaaaccgacaaatcttgatctatacaaaagaaaatttcaacaacagaaataggnncagttgaattagcatgnnaggcacttaacnnattaaanncccaagtctttcaatggccacttggagtccagggccnnnnnn

SEQ ID NO: 10050 - DNA, 864 bp, Homo sapiens
  misc_feature 1, 2, 658, 725, 832, 835, 839, 863, 864: n = A,T,C or G
nnatacatcaggcttgagtttggaccttctgaggtcttctaggctgaatgacaatgtaccttaggctctccagggaatgccatcagtaaaggcagcctgttctgatgtcatgactatagggaatgtgatgccttatttgaattaggcgctgtttgttccactctttatcttttttcctccagaactgaggctagttgatcttcccttgaaagttcagtccccctgagtagctaagcccaatcctgtctgtacagtggagggactcaggatgcctcatccaacactcggagacgcaaaatgaagtctctagtccattgatctctgttcatattcaagtctccagttttctggtcccagtccatgacgggcctccaaaagtacaaccacagccccaagaagtggttctagtcaagagttaacatctttagcatgatgcagggtaaaaagaatgtatctcacaggaggtggtgatgggtcacagctgtttggcacagcacagtagtggaacatcctggcttaggaggtattaacagctaacaggcagacagggatacccgcgtcttctggtacatagcctgccagtgggtaaaagagcctcaaccaccatttgtaaatccattgatcaaacttttattatgaatatcctgagtgctagacncagtgctaggaagaaaaagtgtagagataaataagacaccgtcccagcactctagacctctcagaantctggaagtcctcctttgaatgaattctggttatgctaggtccctctctgggtatgatgcctggcacctattatagtagtccaggtattttccaaacaatgaatcanccnatcnacggaatgatagtctggcatctann

SEQ ID NO: 10051 - DNA, 993 bp, Homo sapiens
actttttttttttttttttttttttttggaatgggttatgaggaattgtggtcaaaaaacgagaacttctttttggtgttaacagggctatgtctgctttgctctagtgattcctaacctactgtgcgaaggaggcatagcaaggcaagactgtttaagtataaccataaagggactcacgcactctcaggtgaagtgcaaaaatactgatcacggtgctcaaacattctggaggagtaagcattcaaattcagaaatgtaagacgatttctcaaagaaaagaggaaaaacctatcattaattttttaaaatataccttccagagcaggtttctcaacaattttacatagaagacgagtatttttgtctccttaagatttggacttaaggtcaaagttgttgaaggttgatcggctattgtaagcttcaggtgaaacctagagaggagaagggaagaagataaatctactatcctagattctttttaagaagcagcacgttccactcctgactctcccgaagatggtctcaggtcttcaggtgaccctatgcaaggaccctactgtgcactctgctgagtgttctggctctctggtatcaggtcactgggcctactctacttttggtgtcattctggccctgtgaagaaactatgaggagaatctggtcgatgcattttgtagttaacaccgcaaaggacatgagaaacttagccagagagctattagagtggcgatcagtgacgctgctgctctacccagtctgtcttgtgtgctttaagatggaagacacctaatgctgacttagccttccctaaagtgaacagaccactcttctaaggtttctgcttgttgtcaggaagtataagcaaagaatgacaagcagaacaatggacatttgttaagtgattggcttgcatacgttggctccttcaatgctaacagcaacgagtaggtgccattattacagccatgttacagatgaacggtgggt

SEQ ID NO: 10052 - DNA, 222 bp, Homo sapiens
  misc_feature 1, 2, 3, 4, 5, 6, 7, 8: n = A,T,C or G
nnnnnnnncttccgcccggcggtactcgggcctagaaattatttaaaatggcgactgatacgtctcaaggtgaactcgtccatcctaaggcactcccacttatagtaggagctcagctgatccacgcggacaagttaggtgaggtaggggctgacatattcttgaagctcactcttggatcaatccctgacttcaggccctgctgggtccttcttggtacct

SEQ ID NO: 10053 - DNA, 390 bp, Homo sapiens
  misc_feature 386, 387, 388, 389, 390: n = A,T,C or G
gtagatgaaagtaagaacttgtgtgcttagacccaacgctggaaggacatgctgccacctaggttacttgtaggaccctatacggcaacctcctttgccaggaactatttataaacatcctgcaggaaaatggcctctttaaatatacacttctctgtagtgtatgctagaaatggagtggctggaataaaagtggctgaatcatcttcaactctagtagctgagaccaatgatgctgacctccctcaaaagctgcatttctgaatttctgaaggcaaactgtctgcctatattgtacagcaaaataatttcctgtattaaaacgtttttactgctccaaaaaacaacaaaaaaacctgagtacctgcccgggcggccgccacgcnnnnn

SEQ ID NO: 10054 - DNA, 504 bp, Homo sapiens
  misc_feature 1, 499, 500, 501, 502, 503, 504: n = A,T,C or G
ncgaattggagctccaccgggtggcggccgcccgggcaggtactgaaatacttaagaaatacttttcacaagtgtcaatagttttatgtgttatggactcattgcagaaggctgaggagcagtaaaggagggaaggttcaagaaagccttcaaaaaggaaataacacttaccagagccctgctcaccagtaagagcaaaaattgtgcaactttgatatttaagaaatggagggttactgctagtcgtagtggtggtgagtaattctatatgactaaagcatcaaactctaataagagcattataaaaagaggctagaaaattggacaggcaacattcaacatatcttataattaaagatttggtagtttatgttagaggtgatagacacataggagagtttttaaatgtggggagaaaatggtcagacttgactttttagaacagtaataaaggagtgccagtatttttggaaatcatttatgggaccttttaaagacnnnnnn

SEQ ID NO: 10055 - DNA, 441 bp, Homo sapiens
  misc_feature 440, 441: n = A,T,C or G
accacagggaagaatacctcagttattcaccttttgtttaaatgttttggaataacacagacacagcaattatgaagtttttctctgctctacttagatgaacagattctgttaactaaaatgaaggcaatgaatgaagagagttctatgttatatatctgagagcagggtctctatttttgatacactgaccattgtttctctgtaaaaaatacaattaatacttcatcctctccgtaactcagttttagctgaatactattttttagtccattgtatatggcagactttatgttaggcacgagggacataaagattcattcattccttcacgcagtaaaatattgagtttggaatctcctatgttcgaggcactgagttcagtgctgaaggtttaacaatgagcaacacagacacagttttgccttcctgcagggtann

SEQ ID NO: 10056 - DNA, 698 bp, Homo sapiens
  misc_feature 1, 2, 3: n = A,T,C or G
nnnacgccgtccgcaaaaattaaaagtttgacagtttctagtgttttagggacgtgaggatatcgagaccatcctggctaacatggtgaaaccccatctctactaaaaaatacaataaagtagccgggcgtggtggtggctgtagtcccagctactcgggaggctgaggcagcagaatggtgtgaaccctgaggcggagcttgcagtgagtcgagatcacgccactgcactccagcctgggctacagagcaagacttcatctcaaaaaaaaaaaaaaaaaaaaaaaaaaatcacctaaacagagcccagagaagacattttagaataacaagccaattaagaagtatcaaatggtatagtcatgattttaatttaggtttatatactctaacctaaattattattttaaagcaaactgcagtgggggtggggtgaaaaatgaagagaaacctactataagggtactgtaattttggggagcaagctaacacatttgacttgcggctgagctcttaactaagcaatacctcagtatgctccttcgggaaaaattaaaggttcagtagtcaaatacttttggaaatgctgggccattatgcacagagaaggtccgcagtaaggaacattttaaatttgaacagagaacatccaaatctaattcatcttagaatccatttgctatggaatgtacctgcccg

SEQ ID NO: 10057 - DNA, 176 bp, Homo sapiens
ctccaccgcggtggcggccgaggtgcgcggggaagcaatgacgtggggagagagcgctgaggaagggagagatccagaaaggtagattcttctgtgtaggtgagtggatgagataatgaagcaagttaatttgggctctgctgacttatttatctgtcccgggcacttttctctgt

SEQ ID NO: 10058 - DNA, 479 bp, Homo sapiens
  misc_feature 479: n = A,T,C or G
actgcgggctctcttgattccagtctactggtctgcttgttgctttgggtatttgagtatttatgtgtttcttttggctcctgtttgcatggtcactggctgtcatagggaatggtgatcggcttttccagttgctcaggacacaaaagaggttggctggtgtcatggacagcacatgggatttggagttagaaggtctcagttaaaaaccctcaggcccctgcattctagctgggggaccctcgggcaggttgcttgaacctctcaccttgactggtttgttgaacttgcagagtgctagcagcacctgcccccagcgtgggggagtggttttgcagattaaagtgttgtgaatgcacttcctcgatggagggcctctagcaccatggtttcgtcatcctgtatctgtcactcaccctgtaggtcaggggtttttcacatttgtggcatcagagaaacccctaggtttctgtttacan

SEQ ID NO: 10059 - DNA, 346 bp, Homo sapiens
  misc_feature 1, 2, 3, 4, 5: n = A,T,C or G
nnnnntactggattgacaatgtgttgaaagtcaaaagaagaggcttgagatctctttctagtgtgatggttttacaagtatatacgtatgttaatgtttaaaaatttcacaccccaaaaatgtgcagtataccagatgttaattatatctcataaagctattaaaattttatctcaaaattatagctttattgcatttagggcattatccaattttgaatctagtccagttatcatagcttaatgcagtattatgaaaataatgcctataaaggtccagttcctcaaacacccttggaaccaattttgccatctatattagttaccttgggctgctataatgaagt

SEQ ID NO: 10060 - DNA, 567 bp, Homo sapiens
acttgtagcagtccacaaagagaacagccagaacattctctatgccactgcctgcttctgggtgaatcccaggtgtgagtaatgaggctcacatgagtgggtatatcactaacacggcttaggagccccatcctccgcaagtcattattttgcttgacaaccatgagcttccaggatcccgacaaggcacatggcaaattacaggagtcctcacactaagagaagccctaagctatggccagcacaggtatttatagttcctcccagtcctttcgcagtttaccagtgggtcatttttaccataagcagtgttgcctagtaacatagctgacattctgcctgtatggtttccacgggaacagagctgatagctgggttaaactgaatccaagcccaatttctcatgctgaaagacaagagttttgctaacacttaagtcacaaatatagccagaggtttccctgcttctgtgcttctctgttagtttcagtagccggagtgattctttcaaatgtatggtggatcacattacctgctctccgccctgcagtgggttccctccttaca

SEQ ID NO: 10061 - DNA, 187 bp, Homo sapiens
  misc_feature 1, 2, 3, 4, 5, 6, 7, 8: n = A,T,C or G
nnnnnnnnccgcccggcaggtacactttcgtggcttatgggtatcttagtataaccttttctggttgagtgaactgtgtcatttcaaaagcctgaagacattgtgatgactgctgcctccataatggctacattctaggggctttgccctgaatcgcatatattaactcaaaaagcaaacagtacct

SEQ ID NO: 10062 - DNA, 258 bp, Homo sapiens
  misc_feature 1, 2, 3, 4, 5, 6, 7, 8, 9, 10, 11, 12, 13, 14, 15: n = A,T,C or G
nnnnnnnnnnnnnnnccgaggtacagagccacaccaaaatctgggagaagactatttcaggaaaggaggaggaaatttgaagacctggggctagaatgagctcaacatattctaagatcggcaagtttagtgtggctggaaaagaatgagtaaaacagagaaacctggagtataagatgaggtcacggagaaatgcatgggtcagaccacgtataaccttgcaggtcatggtaaaggcatctggactttatactgagt

SEQ ID NO: 10063 - DNA, 889 bp, Homo sapiens
actttcaaatttttgttatcctcttcaagaatgtctccttgggattctgcatatatatcccaacattttaggaactcataaattgcatacttttttggtgtgatcagagatgggtaactcttattacttgtgggttagatagttttggaaatagcctggagtcattgagagccaatccttatcaacaaaatggcataaatggacaggaatgggtttcttcttcactttagagatagctctgaagacatgtctcagttgggattagttcagttgcatatatgaatagcagtcattgaaacaagataaaagtgtatgtctctcacatctaaagaagtctggagtaagcagtccagggttagcctagcggccccactctcataagggactaagttccttttatctcgcttcaccattcttgatgtttcgccttgtggtccaaggttggtacttgagctccaagcattactactgcattccagccagcaaggaggaggatggccatgccctctttgttctcaggagtcttccaggaagttccagtcacaacgtttgtttatatctcactggccggaacttaagtcgtatggccacctctagctacaaggaaggctgggagatgtagtctgtaactggatggccatattatcaactaaaaattactgaaaatgacaagaagaataaataatggaaggcaacctgttgtttctgtcaaaggatgacttcaaaagagaaagttgcaaaagtatttcaagcttgacagtatcatgacagttttcttcagaggtgacgctattcatttgcatgtccaagttctgatatctgttttcaagttcacctatttgcagcgaaataggaactcttggaggcaactagtgggtgtgtaaaccgg

SEQ ID NO: 10064 - DNA, 416 bp, Homo sapiens
  misc_feature 416: n = A,T,C or G
acagcttaatggcaaaagagaatcttaatccctaagagctttttctaattgatggacatcattttccaattgaacaaattggaatttattagtggtgactgtggctttgaatctgagctagtttattcttgcagtcacagagagtgtccttatagaaaataaaaagggaaaagctcagttctgctgaatataatcaatatacacaatcaattgataattcacaactacctcctttgccttcttgcacactcttcctgccactcagaaacatccatacttactcttcaggatgggttttttgagcctgaattatccagatggctgtttcaactttttcagccataccttaaagttgaaaaggatggccctaatttccacctctaattccacttccaatttctggtttgaagcaagan

SEQ ID NO: 10065 - DNA, 216 bp, Homo sapiens
aggtacccctgcgccaatcatcacagcctggttgtatcaagtgtgtgccaaactgcctgcgctaacaaccaaatgcaaatgtcatacgtctctgtcactagcagcatagttgctagagagacacgtgtgagccacacctcaaagacaagccttcatcatcttttcctggagatagctgactagcaatcagatgttcaaataaagctactttcttgt

SEQ ID NO: 10066 - DNA, 1169 bp, Homo sapiens
  misc_feature 1167, 1168, 1169: n = A,T,C or G
tccaccgcggtggcggccgccggcaggtactaagtaacctaaattgacaacattctcaaatgacccagcactttaatgctataaatttatcgagatgagctgccctcaatcctggtgtggcctgcaggttggcagcaagaattgccatgagagagagggagtagcatcacccatgagtgtgcaagcaataattcacggacaatcatctctatgtagcagctactgagagaagtccttaagagcaacaatctaaagtattatctgtcaggtgggaaatttcaagaagaaaaagcttgggagtattgctctagagaggttcccctacgtggtaaacaaatatcatagaaaatctaactttctactttgttacctagcaaaagggtaatcactaagcacccctcctggcctactcacacttacacgaatgcagtgaataaactggaaaacaccgtctctttttttggaagaatgctatgtaaatatgagatttcataattctcttccgtaccacaaagggcaaccaatgctggtaactgtacagaactttataagcaattttgtttaaaagtcaactttgtgtttaagataaggttaactttctctgaatttaacatcccagaacttgatggaatgctgataggggaagtcggagatagaataatttctttaatatctttctttgttttcaaatgattaatttttatgaagcttaagcagattagcccagccggacacttgcagcacgcaccctcatatgcatattgggtactgcttgtgatccagctactgaggtctgaaccgaacagacctgggaagtgtctcagagctgtctctcaggctctgagagaaagtagccaacattacagtagacagagagagacagagatcaagacagagacagagacagcataagacaaaatactttatgaaattgccaagtcctcaagcaatctagttaactctctcagcaactgttgaaccaggctttaacctcaaggtaaaaaaaaaaaaaaaaaaaaaaacgtttcccgcccggggggcccgtttaaaaattgggggccccccgggcccggggattttttttttaactttttttaaccccccccccctgggggggggccccggccccccttttttttccctttaagggggggttaatgccccccnnn

SEQ ID NO: 10067 - DNA, 1098 bp, Homo sapiens
agtcacttaatggccccattaccgctcctctgtctcccgtgctgctagctcctgcttctaactctcatccctaatcttagtgtctatgccctgttctttgatgtttaatcaattgcttttgtgatttttttttttttttgctatgctaaatgccatatttaagtttctcaagatttttttttaacctcaggagcagaaaggtgaattaatcagactctttagcctgtggcaattttgttgtataaggtccacctgtcttgtcttatttttccctttatgccagattccaccaccatcagtccctggctatcccaacaagcacctacactaatgtgatacagacatgtaatttacataaatgttactgggttttccctttgctttttacactgtctttgttgctgaaatgtccatctagataactgctttctaactgccatatagaattccatggcattcacctacctcagtttacttagccaatcccctaggcctctggagcctggttttaaatttctttgttatagtccacagtgtcagtaaagagctagtgtttagtgatgactcattaggtatttgttacaaaacaccagaagccaagaaggcccattttcaaaaacagaaacccatcactaggaagaggaaaagtatcttatcagggctcacatatgtatgcaaaaggcagcaacatgtgccccagaatgcatcttcctcctggcacagagagggaaaactggagttgtctaaaaaataagatatccgaggtggggtcagaattcagcttttatggctcttggtcgtctggtcaggtctgacccagaagttcccatggagaaacatctttggtgacctcatggagttaaatattaggattctacatgagggaagtccaggattctatgtgagtgaccagaacacatgaggaaagaagcatcctgtatatactgcaaggggggatgccccaagaagtgagacctgcttggtttgagggaaaaaggccctggaagtcgggtaggaggatgatagtgtgcggtcaggtgtgcaccgtggctgggcaggataacagcccactcgccggcctggcatcaccccacaagt

SEQ ID NO: 10068 - DNA, 403 bp, Homo sapiens
  misc_feature 1: n = A,T,C or G
nactcaattaatattttattgaggtgccctgtaatctgacattccagggagctttcaaggaaactttgtcacactaaaaaaaattgaggattgttttgtgggttattccgctcctttgtcttctaacccacagaagttctgtcatggttcttaggggttgtagggtgtgtccacttattttaaaatgtcaaagaccagaagagtggagaatgggaaagtggcaaagtgttagcactggaaagatgtttagagatcacgtagtccaacccttaaattttatagatgaataaactggtatctagaaagcttaagtgacctgcctgaaatcacacaactagtttgtggtaacacttggtccaggaggttgtcagctgaccctcttcagggctcgttcccacaaggt

SEQ ID NO: 10069 - DNA, 276 bp, Homo sapiens
  misc_feature 274, 275, 276: n = A,T,C or G
gtagatggaaggaagaacttgtgtgcttagacctgacgctgggaggagatgctgccacctaggttacttgtaggaccctatacggcaacctcctttgccaggaactatttataaacatcctgcaggaaaatggtagctgagaccaatgatgctgacctccctcaaaagctgcatttctgaatttctgaaggcaaactgtctgcctatattgtaccgcaaaataatttcctgtattaaaacgtttttattgcgatacaactcaatacaggagtannn

SEQ ID NO: 10070 - DNA, 897 bp, Homo sapiens
  misc_feature 895, 896, 897: n = A,T,C or G
acaggagtgaggctatgaggtggataacttttctgttggcctggcaggggaactgaggtagctcacacccctcatcctggtactcaaaaggcatttccgcttacaatttgtagaaacacaaaatgcgttttccatacagcagtgcctatatagtgactgatttttaactttcaatgtccatctttcaaaggaagtaacaccaaggtactgggtagatatacgcaggtgatcacaaatcttttatgtctattcttgatcccttttttctttacttcccaaatttgccacatctttcttctacagctaataggatgggctgcaattaattggtaatggtaaagagattatgcttacaaaagaggtgaatgtatcatataaggagcataggttggaattttaagaaacgtaaccaaacatattggaattaaaaatgtctctgacggtatgactgggctggctaggtgaatatacattcattgccttatgaattttcctctcaatcctgtgccctttacacaatatgatgcccttcctgatgaacatccttctcaccagagtacagacaggattaagtgaataacagatttggaagcagacatgacactgctcattacctgtgtgattgtgagcaaatttctaaaactttcccaaatctaaagcaacatgaattataagagatacaacgattttgtatatcattaagaaagaaaaggctgtcaataaaaccattaggcaccaccgactgtaaattgcatcataattttagaaatgttcaaaaaaaatcaacctttctgatttgctgtttccttatctgtccagtggggacaatcacgtatcctctccagaaatactgtcatatgataggtaagagattacactgcggttgcacattcgnnn

SEQ ID NO: 10071 - DNA, 202 bp, Homo sapiens
ccgggcaggtacctttcactctcatcaaactagactaccgactgtttctcgaaaaactttttccacctcttcacctttgcttatgcttatctttctgtctgggaaggttccttccaccattcatctctccatttaaaaatattttttgagcactttttattttgaaaaatttcagtgcagagaagttgaaagagtagtacct

SEQ ID NO: 10072 - DNA, 765 bp, Homo sapiens
gtcttaggtaggatcttgctactctgtgtgcacttatcttgggagtcagagtaagttcaatttgtctactttattctgtggtagtttttcttgtatttttacactacgtcctgtgtgatttcattttcattgtaatttagtctttttgtttattgggtttttcttctttcatattggcttcatctaaggaacaataatgtcattgttcatttcagaaccaagaaaatatagaacacctagaaaatcaatcaaccaaacaaacaaatgaatagtagaaaatcaaacacacatgtattgcctcttgtttctgctggaatttttccctcacattctgcaactctctactgatgttttactagaagcaagaggaaaggttattggaaaaataacaacaaacaattgttgaagtcccagattgcatagggcctcttctgctggcttccacagtgagtaatttaaaattaaaaagcaatttcaatggcatgctcagattttattaaagggagaaagattagaagcacagtttcttggggagcataatcctatgcggtgtttattaggagtaatctcattttcatgctcttgtttggtctgaaaacatactttggcttaggcaactataatttcagtgttggaatattgtggcacacgaagcccaaaatccttacagggaaaaccgtctatgttcttaaggtttatggctacacaagacaattcggggtatgctctgctttctgagcactctgggtcctgctcagagtacct

SEQ ID NO: 10073 - DNA, 824 bp, Homo sapiens
acagtttactacccaaattgatattactacctgagcatttttcattttcttacataatcttccaaaacattcattttatctaccacaaaatattaaattgaataaaacatttttgctgaatttgtggagctgggcttttagaccggttttaacatttcagtgtaatatgtaatgcagctcaaaagctttgtgcaagtggtttctggatttaggatgtagttttctttgaccccatatcaacttgtggtaattgatcttaaggattctgtttgtgtggtttttaaaagaatattctctccagtcaattttggttccacttattatttaataaaatcgtttgtaatattctagcctgactcagctgtgccaaggacaaataaggggaagaggtttcccttccttgggatagacttttacaaatctttggcttttcagatttttttaacatgaaggatgctcatcaaaattattttcgatgcttttaagcaaactctgatgccgttagagtcattgttatttgcaagcattgagggaatatcacttgcatctatatgtactttagcggccacaccttaaggatattaataccacataggtaatatcacctaataccataagggtattaatatgacatttaatcttattttgggcttttaagtttagtttattggcattttttaaagttataattcaaaatgggggtggagcaagatggcctatcccatgcccctggacaggaacaccaaatttaacaactatctatatcttgtgaaggtgttttttttttctgcatagaaaccaaaaatcaggtgtgcactcacagt

SEQ ID NO: 10074 - DNA, 3758 bp, Homo sapiens
cctcgcgtccgcgcacaccggggtggcagcgccgcagcgggcagggcgcccgcactccgccgcctctgcccgcaaccgctgagccatccatgggggtcgcgggccgcaaccgtcccggggcggcctgggcggtgctgctgctgctgctgccgccactgctgctgctggcgggggccgtcccgccgggtcggggccgtgccgcggggccgcaggaggatgtagatgagtgtccgcaagggctagatgactgccatgccgacgccctgtgtcagaacacacccacctcctacaagtgctcctgcaagcctggctaccaaggggaaggcaggcagtgtgaggacatcgatgaatgtggaaatgagctcaatggaggctgtgtccatgactgtttgaatattccaggcaattatcgttgcacttgttttgatggcttcatgttggctcatgacggtcataattgtcttgatgtggacgagtgcctggagaacaatggcggctgccagcatacctgtgtcaacgtcatggggagctatgagtgctgctgcaaggaggggtttttcctgagtgacaatcagcacacctgcattcaccgctcggaagagggcctgagctgcatgaataaggatcacggctgtagtcacatctgcaaggaggccccaaggggcagcgtcgcctgtgagtgcaggcctggttttgagctggccaagaaccagagagactgcatcttgacctgtaaccatgggaacggtgggtgccagcactcctgtgacgatacagccgatggcccagagtgcagctgccatccacagtacaagatgcacacagatgggaggagctgccttgagcgagaggacactgtcctggaggtgacagagagcaacaccacatcagtggtggatggggataaacgggtgaaacggcggctgctcatggaaacgtgtgctgtcaacaatggaggctgtgaccgcacctgtaaggatacttcgacaggtgtccactgcagttgtcctgttggattcactctccagttggatgggaagacatgtaaagatattgatgagtgccagacccgcaatggaggttgtgatcatttctgcaaaaacatcgtgggcagttttgactgcggctgcaagaaaggatttaaattattaacagatgagaagtcttgccaagatgtggatgagtgctctttggataggacctgtgaccacagctgcatcaaccaccctggcacatttgcttgtgcttgcaaccgagggtacaccctgtatggcttcacccactgtggagacaccaatgagtgcagcatcaacaacggaggctgtcagcaggtctgtgtgaacacagtgggcagctatgaatgccagtgccaccctgggtacaagctccactggaataaaaaagactgtgtggaagtgaaggggctcctgcccacaagtgtgtcaccccgtgtgtccctgcactgcggtaagagtggtggaggagacgggtgcttcctcagatgtcactctggcattcacctctcttcagatgtcaccaccatcaggacaagtgtaacctttaagctaaatgaaggcaagtgtagtttgaaaaatgctgagctgtttcccgagggtctgcgaccagcactaccagagaagcacagctcagtaaaagagagcttccgctacgtaaaccttacatgcagctctggcaagcaagtcccaggagcccctggccgaccaagcacccctaaggaaatgtttatcactgttgagtttgagcttgaaactaaccaaaaggaggtgacagcttcttgtgacctgagctgcatcgtaaagcgaaccgagaagcggctccgtaaagccatccgcacgctcagaaaggccgtccacagggagcagtttcacctccagctctcaggcatgaacctcgacgtggctaaaaagcctcccagaacatctgaacgccaggcagagtcctgtggagtgggccagggtcatgcagaaaaccaatgtgtcagttgcagggctgggacctattatgatggagcacgagaacgctgcattttatgtccaaatggaaccttccaaaatgaggaaggacaaatgacttgtgaaccatgcccaagaccaggaaattctggggccctgaagaccccagaagcttggaatatgtctgaatgtggaggtctgtgtcaacctggtgaatattctgcagatggctttgcaccttgccagctctgtgccctgggcacgttccagcctgaagctggtcgaacttcctgcttcccctgtggaggaggccttgccaccaaacatcagggagctacttcctttcaggactgtgaaaccagagttcaatgttcacctggacatttctacaacaccaccactcaccgatgtattcgttgcccagtgggaacataccagcctgaatttggaaaaaataattgtgtttcttgcccaggaaatactacgactgactttgatggctccacaaacataacccagtgtaaaaacagaagatgtggaggggagctgggagatttcactgggtacattgaatccccaaactacccaggcaattacccagccaacaccgagtgtacgtggaccatcaacccaccccccaagcgccgcatcctgatcgtggtccctgagatcttcctgcccatagaggacgactgtggggactatctggtgatgcggaaaacctcttcatccaattctgtgacaacatatgaaacctgccagacctacgaacgccccatcgccttcacctccaggtcaaagaagctgtggattcagttcaagtccaatgaagggaacagcgctagagggttccaggtcccatacgtgacatatgatgaggactaccaggaactcattgaagacatagttcgagatggcaggctctatgcatctgagaaccatcaggaaatacttaaggataagaaacttatcaaggctctgtttgatgtcctggcccatccccagaactatttcaagtacacagcccaggagtcccgagagatgtttccaagatcgttcatccgattgctacgttccaaagtgtccaggtttttgagaccttacaaatgactcagcccacgtgccactcaatacaaatgttctgctatagggttggtgggacagagctgtcttccttctgcatgtcagcacagtcgggtattgctgcctcccgtatcagtgactcattagagttcaatttttatagataatacagatattttggtaaattgaacttggtttttctttcccagcatcgtggatgtagactgagaatggctttgagtggcatcagcttctcactgctgtgggcggatgtcttggatagatcaagggctggctgagctggactttggtcagcctaggtgagactcacctgtccttctggggtcttactcctcctcaaggagtctgtagtggaaaggaggccacagaataagctgcttattctgaaacttcagcttcctctagcccggccctctctaagggagccctctgcactcgtgtgcaggctctgaccaggcagaacaggcaagaggggagggaaggagacccctgcaggctccctccacccaccttgagacctgggaggactcagtttctccacagccttctccagcctgtgtgatacaagtttgatcccaggaacttgagttctaagcagtgctcgtgaaaaaaaaaagcagaaagaattagaaataaataaaaactaagcacttctggagacacctataggagtcgtattac

SEQ ID NO: 10075 - DNA, 1363 bp, Homo sapiens
  misc_feature 1, 2: n = A,T,C or G
nnagaggacccagtccatttcacctgcattagatgtcttatcaccaagaacagatgcaatcctctctgctcgcttatgaagctgaaggcagctggctgtgcatacagtggttcccttggcatttaacagcatgaagagtacatggtcaggagtcgcctgggctcgccactgtaggatctctgccagaaactggtgcttcctcaccaaatcattctcttctatttgtcccagatcccttccagcagcttgtgctatacgttttccagcaaccagattcccaaccatcacggaagcagggcctacacctggttgtttttgccggggctttggcaaagtttgtcaacacaatgtatgggggcacatgaaggatgttgcaaggatgcagtgatcccctccagaaagagttgtttcgtctgagatatatggattcctcctagtggagtttttggcaatgtattggctggcaccagagcaagacaataaacccccacttgatgaatgctatcgatcgcctgcagcacgcggctcatccactggaaactatcttcctcagaagcatcaggtctttgttccgcaaccaccacaatgcgctcatcataaaatacagacacagaaaacacagcaattcttcctctataaacagtctttattgattctacagccaatccagtagcaacaatgtcatcagcattatgtcttcgacccctaaaccatcagtaagccatccattttcccaaccacgaacaccaaactacccggccctacaaaccccagcaatcctgatcggatgaatggcacatccccaacaggagagcctgcagaattcactggaattacctcaaatgtattttttgtcacaccagcaagcccaaagtacatcatgcctccagttctggagctaacacagatttctccaatttcatctgttttgcagagctggggaggtccatctggtttcacaatgcacatcatcccaccaggcattacatgccctacatcctggaccgtcagtgctgaatttttatcttcagtattgacccgtattaccccatagctcaatccattcattgagagaatggctcttcctggcaaaggggctcctggaactccaggcctgcggattgctacagtcatggcttcagcagacgtggcgcacggtcagatggcctcaggcttcagtccatgactttggaacagactcaggaaggcatcacaggatgacacggaccaggggttagctccatctgtcacaattaacattcggagggaactcaagctcacgtctctttggtcccgatgtgccatcatagcccagtgcaagtcccgacattttactaaagctaccttggctttgtgagcatgt

SEQ ID NO: 10076 - DNA, 379 bp, Homo sapiens
  misc_feature 379: n = A,T,C or G
acttcctttttttttttttttttctttttagctacctgggtatctgcttgggaccctgtcctcttcccactccactgtagggtaagattaaacttttctaggattcttattaatgaaattatatagcatggatacttttatatctggcttcttttggttagcataatatttttgagatttatccacgttgcttgtatcattagtttgttcattttgcattggtaagcagcatttcattgggtgaacataataaaactttatttttctgttgatggacatttaaatttgttccgatttggataactgtaaataaaaactgctatgaacacatatggtcaagtctttatgtgggcagataaatgctatttttaaatttaan

SEQ ID NO: 10077 - DNA, 1639 bp, Homo sapiens
  misc_feature 1, 1630, 1631, 1632, 1633, 1634, 1635, 1636, 1637, 1638,1639: n = A,T,C or G
naactctggtgatttaacaatctacacacttttataaataaatattatgtttcatttagtactttatcatccataatatcttactctctaatccacataatggagttgtgccagactccaaactgaacataatatttatatatacatatatatttatatatatacacacatacataaactataaacctgaatatcttagcatacaaaacttatctaacaactaataatttaggattcctttgagagggaggggttagaagaaactcttcttagtctttgaaatagtcctgacagtaagcaataaacaacattattaatttctgggttctcacttattcaagtgaaagacaaataaaataaaattcacttctgagccactagaaattttgaaatcataaaggattattgggaaatgagtagtctttaagaacaatttagtgttatctaagtaaagtggattttggtaagatacagagaaaaatctatgcataaataaattcttgtttcattgagcaactataatcgctaagtgggtctttttaagtatctcaggaatgtttttaaaatattaatagtgaataaattagattgaggataggaccaatcttttccaaagcaaccaaatataataaggaagaagtttgaagactattttaatttcttcccatccttcattggaaccaacacctccctagaaatctagcttaatttcaaatcatcacctcctcacaaaatattctgatttgacgttatccacgttcaagtatttaccaaaaagaaaacataattttatctacaaggtaagcccaacctcacttaaatttaggaaaaacccaagaaacaaaaacatgacccacttaactggcataaatgtttacctgttgttttgtagatgatctgtttagaggcactgaagtttctcttcaaggctcagatgattagtcacacttagttctaaccatatattccttctaggctatccctaagaatataactgacacaagagaaaggaacctttacattattattgaggttatttttaatatcaattgaagcagcgttctgattacagttctacttgttttctaactgttttcactctttaaaaacacaattttttttttttcaatttcaaggattacgaaattcttctgtcttagttacaaacaaaatgcagctatgaagcactgggaagtaaatgcaaaatatagaaagaatcttcatgattctcccaaactgtaagcacagctcacaaagtctcattgctttagaatgttttctggatgaacaagttaccagctgcaaaccgacttcagaagtgaggaaaatgttttctcatgtttcatgtagctgtcaaattttcaaaaatcctccatccttcaatcacccagtggggaaaatgtgttataaaacactgccccctggagtattctgggaggaatgtcttaaaaaaaaaaaaaacagcaaggagaaagtactttcaaattctttactaaccactaacagaatttctaagaagcaaaagaaaaccacagaaaggaaatgtacatgaataaagttgagcaggatgtgtacaactttaaactgtattgtattcatgttgctaaacaatattggccttctcgatgannnnnnnnnn

SEQ ID NO: 10078 - DNA, 195 bp, Homo sapiens
ccgggcaggtacaggccaaggtcctctgtgactcgccgcccactacccaagtgaatgagtctcccctagagctttgctactcagaggggtctgaggacaacagcatgggccaacacgtgcactcgagctgcctggagatcttgttcaaaggcagattctgaatgagtaggtctgggttggagcctgagagtctgt

SEQ ID NO: 10079 - DNA, 1352 bp, Homo sapiens
  misc_feature 1349, 1350, 1351, 1352: n = A,T,C or G
gtccacgtgtcggaagacctgtttaagacagtcatttttgcctctccgccaactgtcttcagagaaaccattaggttaggtgatacggtgccagcaagggaagcaccatcgtccaggatctgcaaatctggttcctgggaaccccagactcctcagcagatctggctgtacccctaagtgggaacctaccaggacattcaaagcaagagcagtaagttctgaatgttctgggacaacctgggtgatatgcatggatatgggctgtggaggctgagcattttaatgataacttagggaaacgaggcatggccatggtgtaaaactctcaaatcccaacccctaatccaaccttaaaatccgagtcttctaaagggctgttttaaccatgaaaggaccataagaaaggcaattcacagaaaatgaagccatgtggccaagaaatataagaaaaacagtaaaagcccttaatctcaatagcaatagagtggatgcaaatgaatataatgagttgccatgtcgttcttactggattggaaaagaaattagaatgtctaaataacatgtatcatccaggatgtggggaaatgggagctcttgtaccctgcaggcaggcatttaaattggtgcaaccgctttggattgctgctttgtagtatctggtgcaactgaagatgaacatgccctgtgacacagcaaccgcacttctaggtcaataccctaattatattcttactgtggttcacaagaaggtatgtaagaggtcattgcctgagcactgtttagaataggggcaaactggaaatcctctaaatgtctgtcaatgaaggaatagataaattgtaatatgttcatataaaatactgcataaataagtgaaatttataaatgtactaacgaatgaatcttgaaaacagagttgggagataaaagcaagctgttgaagaacatggtcagtatcctctcacttatgtaagttaaaaactccaaagaacattatctatattggtaatggcatagacatgtgtggtaaaatataaaaatattaactaaaagttctatacgcttcaggatattgttagtataataaggcaggaagtggatagcattggggtgagacagtggtttggtggttatgtttggttactttagttatgttagtaacatttttttttttaaagaaggatctggaataattatggtaaaataatagtatttgctaagactagatgattggtgtactggatttcatccactattttctaagtttgttatgaacgcttaaaatatatatgtatgtagtaaaattaatgtaaatttgtacaaataaaaataaatggcatgtgatatannnn

SEQ ID NO: 10080 - DNA, 574 bp, Homo sapiens
  misc_feature 1, 2, 3, 4, 5, 566, 567, 568, 569, 570, 571, 572, 573, 574: n = A,T,C or G
nnnnncaatgcacaaaaaccccgggtgggtaaaaggcccagttagaggctgcagtcgggggggtgcagggcagtcagactggaaccatggagctcagcgtcctcctcttccttgcactcctcacaggcctcttgctactcctggttcagcgtcaccctaactcccatggcaccctcccaccagggccccgccctctgccccttttggggaaccttctgcagatggacagaagaggcctactcaaatcctttctgagggagtggatctgattgccgtcaatcaataatacctttgaccaagggactccaatcaattcagcatgctttgcctaatgccttttgtttgtaatactgttgcgggacaatcaaagactggagagaccaaaaaaggttcaggagagtttattaaattaaggtgaccactggctcagccagaaatatgtcccacaaaaaaaaaaaaaaaaaaaccccaaaaaaaaaaaaaaaaaacaccccccccgcttaaaaaaaaaaggaaccccccccccgaaaaaatattatattaattttttttcccccccccccccnnnnnnnnn

SEQ ID NO: 10081 - DNA, 564 bp, Homo sapiens
  misc_feature 1, 2, 3, 4, 5, 6, 7, 8, 9, 10, 11, 12, 13, 534, 561, 562,563, 564: n = A,T,C or G
nnnnnnnnnnnnncgaaatacttctagaattaattaacgcgggggaccacaggaacagttaaattcatggcatggctggtctaccacacagtcgggggaattctttaaatagagcctgtcactctcttggcccatcaatgggatttccttctcgaactgctgattcgttcaggtacacaacagacgaaatttcagttaacctttgttacaccccaggcaaaaatctggctgaaagtataaaatgaatagattaaaaaaaaaaaataagcagctcatccacagggccattctctgagtgtccacagcagcttaagttaaacagtaaatagggcagtggaatgtttcattcccaatggaaaattcaagcacaatctagaacttgggaatctagttagtcaaagtttattttgatgactaaaccaaaccaactgtcctttctgttttaataaactggaaaatttcccttctgataatcttataagagtcagaattgttgttctcttatatcaccattattactatgatctaactgangtgcctataacaaaactgcgtactaannnn

SEQ ID NO: 10082 - DNA, 331 bp, Homo sapiens
ggcgaattggagctccccgcggtggcggccgcccgggcaggtacttaagaactctccaggtaaggagcatggctctaatgggaaatccttcaggtcggggtgaaagaggaaaaaaaaatggttaccaaggatgaactgtagctcacttaggaactgagctttcagactcccataagagctaaatgataaaagaatttttttttttaagaaaaaaggaaaagaaagaaaagaagaggaagaaaccaggaattcaataatgtcctcagaaaacaaagcagtgattccttcctcattacttttgagcaatgagaccctacgctcccgcgtacct

SEQ ID NO: 10083 - DNA, 1354 bp, Homo sapiens
  misc_feature 1333, 1334, 1335, 1336, 1337, 1338, 1339, 1340, 1341, 1342,1343, 1344, 1345, 1346, 1347, 1348, 1349, 1350, 1351, 1352,1353, 1354: n = A,T,C or G
tcgaaaaagaggtgggatcgtttgtcgcgatgtggagtggccgtaagctgggctcctccgggggttggtttttaagagtgctggggcctggaggctgtaatacaaaagctgcgcgtcccttaatttcctcggcggtttatgtgaagaaccagctcagtgggactctacagattaaaccaggggttttcaatgaatacagaaccatatggttcaaatcctacaggacgatcttttcctgtttgaacagaataaagagtttcaggtacccttgggcgagactgtacagtacttcccaaaccactgtcgacagcggtgaggtaaaaaccttcttggccctggctcacaaatggtgggatgaacaaggagtatatgcacctcttcattccatgaatgacctgagggtgccatttattagggacaatcttctgaaaacaattcctaatcaccagccaggaaaacctttgttggggatgaagattcttgacgttggctgtggtggtgggctgttaactgaacctctagggcggcttggggcttcagttattggaatcgaccctgtggatgagaacattaaaacagcacaatgccataaatcatttgatccagtcctggataagagaatagagtacagagtgtgttccctggaagagattgtggaagagactgcagaaacatttgatgctgttgtagcttctgaagttgtagaacatgtgattgatctagaaacatttttacagtgctgctgtcaagtgttaaaacccggtggttctttattcattactacaatcaacaaaacacaactttcctatgccttgggaattgttttttcagagcaaattgcaggtattgtaccaaaaggtactcatacatgggagaagtttgtttcacctgaaacactagagagcattctggaatcaaatggtctgtcagttcaaacagtggtaggaatgctctataaccccttctcaggttactggcattggagtgaaaataccagccttaactatgcagctcatgctgtgaaatccagggtccaggaacacccagcctctgctgagtttgttttaaagggagaaacagaagagctccaagctaatgcctgcaccaatccagctgtgcatgaaaagctgaagaaatgaattgtttctgagaactatagtaatatggcttggatatctgatgttttcaaatacaagaaatgtacaatttatcctttgagagagaatcatgaagaaaagaaggtcaataaaaagggctaaaaccgcctcacgggaggacatagcccctggaggtgctgttgctatagttgcaagcaggaggataatgccggaannnnnnnnnnnnnnnnnnnnnn

SEQ ID NO: 10084 - DNA, 240 bp, Homo sapiens
agctccactcggtggcggccgcccggcaggtactcatcagatggaatgttttaccccgccgaggttttagtcatgatgtgctgagctctctgcgtctgacgtgactgactggtagctgggcgttggcgtgacccttctttcccttaggatcacatatggagaattccacctatgggaaaattaaaatgattgacatgcccgtggaaaggatgcatccccatctgtccaaaggctatgcgt

SEQ ID NO: 10085 - DNA, 273 bp, Homo sapiens
  misc_feature 273: n = A,T,C or G
ttggagctccccgcggtggcggccgaggtacaggaggcctaggacttgtaactggcatctgaagtgtggggagtcctgtgggattgagcccttaaccaaccctaaatacttgtgctaactccaggtagttagtatcaaaattgaattacattgttgaacatccatttggtgtctggagaatcagagaattggttgctggtgttgaaagcacctgagaattggtgttagaattgaagtgaggaaagcgaaccaaaaaaaaaaaaaaaaaaagtn

SEQ ID NO: 10086 - DNA, 476 bp, Homo sapiens
actttgtaaagaggtgcaagaaaaccaaaaacataggcatccaaggtagaaggcgtatctccaaagaaaactgagatgttcccaatctgtttgatagaagatttaggcactccttggcatctctgtatatctgtgcttccacttctcggaggtggtagaggggaggctgtcctctggtcaggagaatcctattcagtgctcccttagacattcttccaggcaggatcaaactcaaaggaagaggaatttgtgaagcaaaccatggctttgtcacagtaaagtaattgtcactctcaacccagaatgtgtgaagcactgcagggagaagcttctcttcgaggagagcaatataagccaatgtatctgccccttgttttgctgagagttcataatcagcattatatttctgttttcttaaaaagtttagtatttttgctggctgagaaaccatgtcgtcttcagttgtcaaaattggt

SEQ ID NO: 10087 - DNA, 2112 bp, Homo sapiens
  misc_feature 1, 2, 2110, 2111, 2112: n = A,T,C or G
nnccatgagccaggctgtggggctgccgccctggctgcaggacccggagctcatgctggttgaaatgttccttcttgcctatgctgtgcgccacaccatccaggtgtaccggctctccaagtacaacacggaagaattcatcacagtctaccccaccgacccacccaaggactggccagtggtaacgctcattgctgaggacgatcggcactataacatccccgtcagagtgtgtgaggagaccagtctatgagagacgcatgctcctgacagcctggcgacgtggcgaagatgcacaggtggctcctgggcttgggctgcaggtttgggggtctctaagaacaatctctgagaagaacccttgggcccctgggagccaagttggacaggatgtcctgaagactagcttttgataagagaaattaaccaagtctttcccctcatctatgatgcaatatatttcagtgggggccttcagagcacacctgttggacggtgcaaaccatatcttctccagaaggcaaatacttttgtatcagaggaaactcagttttggagaggaatatgttctttatatctcaaatcaaaactctctctaatggtaaactggcttctaatttttttaagtacagtatttttttttcccctttagtagtaacgggtttctatagatcttcctatacagtctgctttaactcaggaccttgagattatgagactgacgtgctgcccactgcactgagggggcttctaacagtctgctttaagtggtataattctgggatagatctgttactggcatagtcatgacaacctctggtaatcttaccttctcctttttatgaagggaagagcaatggtttggacttacatcttaattaaggctattttaagcagattgttttgcaacagattaagaattgggtcccaaagtgggttatttcaaggcatttttgaagactggaggagcgtaggagggagtggtgagggaacctagaacttcttgctccttgtgactatgacagatgtctgatgcccccagcgcactggagtctggggcttggtgcaggtggtgccccatcagtgtggacagacactacttgcctttgtggtttagtgttggaagctttaattattctacagttccatagattcacattttatagccaaacagtttgtatccacctgctttcagaggaggaaccaaaggccaaattactttgaggtagggcttagctggacctgggttttcctatgctcttttcatgctgtgttggagggtgtgtccactgccagatctgtgtaacccgtctgggtcaggggatgagtgacagcaaaccatcttaaaatttttcatgagtacatttaagcggaagcatacgggaatatgagtgcaaaagtgtggctgagccgcgtatgcccttgattggttttgggaagcctgagggaggcagccttcctggctatgagccatcgcctgcccaatcaggctaagggtggtgactggggtggtgaaggggcagctctgctgagcatggtctgccttatggcctgaattgtcctcaaggggtgtggactgcagatggtgttcacatgaaccggagacatcactctttaggattctactggcagcccctgaattggctcaacgtttgtggaggtggtatttccctgaagtactgagctttgttttataataattaaaatccttatttggtccaatttaatatggtttagaagctattttttttgaggcaaaccgtttttgaaaatgtaaattttgtttttaattaaaaataaagtcttagttaagaagactcaggatgcacaaaactattcagactgttactttggctttctcccattacctcatcagtgatattcaccacattttgctaaatatttattgattagagtgttgaaatcaaattctgctctaaatgtgtgtgaatatgttggagaggctttgtgttcttcactgtgaaatgcagttgtgcctagctggtatgtgggtggttacctacctgagaatgttgtagtcacaatgtatattatggaagtttgcgattactggtggatatcagttgggctacgtcggggtcctctaggnnn

SEQ ID NO: 10088 - DNA, 2174 bp, Homo sapiens
  misc_feature 1, 2173, 2174: n = A,T,C or G
ncatgcctgtaatcccagcattttgggaggctgaggcaggtggatcacctgaggtcagcagttcaaaatcagcctggccaaaatgctgaaactctgtctttactaaaaatacaaaaattagccaggcatggtggcaggcgcctgtaatcccagctactcgggaggccaaggcaggagaattgctcgaactcagggggtggaggttgcagtgagttgagattgtgccattgcactccagcctgggcaacagagcaagactctgtctcaggaaaaaaaaaaaaaaaaagaaaagcaacatagtggggtttctgtcaatctgtcctcggctgcccttctcatttgttgatgggaccttgaaagcaagcttgctaggtgccctctgtggctccagcctttaccggaagtgtggtgcatgtttttaacttcagggaagcggtatcctgtcactggggtatgggatgagcatggagaagaggcaccagccacgattccttcctaagcatctcctgttctgactgctcatgaattgaagaaactgacccttgtgttcactctgcttcctctgattgtttctatcatggtttccaaaaattgccatgggaacatgtcaaagggccacttttggagactctgctccaggaagaactagtccccatagctcccctatcccccaccataccacagacatgctgtgacttagagaactacacaaacatccttgggacctagatgctggaggaatgacttaatttgatgcagaaactccatcacccaagggagtacctctcactgtaaacagtgctgtgcttgctctgaaggattaagcaagaagtcccaacagaagcaatgcaccagtcctgctatgggaatgaaactgcaaagcctaggagatgggtgaagtccctttctggagacctttaatgagtacttcaaagcactcgacacagatgcagcaaatagggcatcacacatacacaggcattaatactcacgggcatatagatgctgacatgtgtacactgacttacgcccttcccacagctacagataagggctcgcaaagttggcctcagagacacatcaggaaccaaggtggaccagcaggtgccgagcctgtgtatctgcttggaggagacgttccaatgtgctgccttgttcagagatggtgtagttgcaagaaacagaaacccaccacaatttctcaggcaaaaagggagttaattataaggacataagagcacaaagttccagtgcaagagatacatccaggctgcacaagctccgggagtggggcctggcaagccaaaagaaaccaaagtttgtcttgccttctgttcctctttctgaagccacatagccttttatgactgtgtatctttgcatcgcttttgttttctttttatgtctctgaagccagcttttcctgttcactcatcccttgattaaatatggacattctagcttcacatcacttcctaattcagggaccaacagagactggttagcatgttgctatcccacctccaaattgcatcagggaatttgattttgctgcttgggtcagggtccagtagtctgggccaggggactgggaccatctagcacatagccaaaggggctgacctaatggggcaggtctgacacaaatggggtcatttcttggacagacatcccaagggccactatgatagtagcttctctaaaagacgggttcctgagaagaattgcattctgtttcccagtgagttagcggagtcatacttactacatcccaaggcaggtggcatggtagaaacaggcctgaaagagaggtcaggttctaaccttctcccctctctgaggctcagctgctcccttctgtagaataaaaggggttggtctgtaacaagattttcaaaaatttatagtagtgaaactttacaattcgacttggacaaccagagattaaaagcaaatagattcttgttgatgtcaggtggggagcttagctctcccattctgtgattccttcctctgaaggccctcaaagcaactccataataactcacagagctgccagagccgatgttttggagcaccctgagacatatgaactctaatataacttccaggagaaagtacataggattccacttagagccaatctcagctgtctatctgtctagctacctgnn

SEQ ID NO: 10089 - DNA, 372 bp, Homo sapiens
ctgtcctacaaagtgtgtatcctttccatatgtgagaacgtgaggaagtacaaacttggaacaaaagaaatagtaaggtaatcttagaaagatgttgaaaagaaagctatggtggcatcttaactgtttcactgcctggcaatctatatgtattgtcactttgggacgcttatgattccacatgaagtggataaccagctcatagttcttgtggtaccaacaaagacaaggctgaattcattctgcctaatggtcaagaagtagatctcccgatttcctacttaacttcagtctcatctttgattgtgtggcatccagcaaaccctgcggagaaaatcatccgagtcctgtttcctgggaacagcacccagt

SEQ ID NO: 10090 - DNA, 1609 bp, Homo sapiens
ttggagctccaccgggtggcggccgagtacgtggctggctccaaggatgtttagtccagaaaatgaaaagattgccttaacattagttatgggagccctagaaagccccaaccccttgctgagatgtgcagctgcagagtcatgggctagattagcccaaatggtagatgatggagcttttactgctggattagctcaagttagctttgacaaattgaaatcagcaagggatgtggttaccagaacaggacactcattggccttggggtccctacataggtatttaggaggaataagttcttctcaacacctaaattcttgtattggaatcctttatactttggcgcaggacagcacttctcctgatgtgcagacctgggcattacattctctatcattgatcattgattctgctggcccactctattatgtgcatgtggaacctaccctttctcttattataatgttgttgttaaatgtgcctcctactcatgctgaagttcaccaaagccttggtcgctgtttgaatgcccttattaccacgttaggtccagagctacaaggtaacagtacttcaatttctaccttaaggacttcctgtctactgggttgtgcagtaatgcaagataacccagactgccttgttcaagctcaggccatctcttgccttcagcagcttcatatgtttgctccacgacatgtcaacttgtctagcctggttagctgcctctgtgtgaatctttgtagcccctacttgttactgagaagagcagtactggcttgcttacgtcagcttgtacaaagagaagcagctgaagtttcagaacatgctgttatgcttgctaaggatagcagagaagagttgactccagatgctaacatcagagaagttggccttgagggggcattgttgatcttactagacaaggagacagatgagagattatgccatgatatcaaagagactttaaattatatgcttacatctatggcagtggaaaaactctccctgtggttaaagctttgtaaagatgtacttgctgcatcagctgattttacagctgtaacttgtgtggatacaatgcaagaagaagaaggagataaaggggatgatgcctcagtcctgaccaccagacgtgatgaaaaatcccatccttttaccaatccccgatgggctactagagtctttgctgctgaatgtgtctgtaggataattaaccaatgtgagaatgctaacagtgcacattttgacattgctttagcacaagaaatgaaaaaaagagattcaagaaatgactttttggtactgcatcttgctgacttaattcgcatggcttttatggctgccacagatcacagtgaccagctccgtctttctggccttgaaatgctgttagttgttattcggcgatttgcaactgttccagaaccagagtttccaggtcatgtgattctggaacagtatcaagccaatgtaggagcagcgcttagaccagccttcacttcagagacaccacctgatgtcactgccaaagcatgtcaggtttgcagtgcctggatagcaagtggagttgtaagtgaccttaatgatctccgaagagttcatcag

SEQ ID NO: 10091 - DNA, 1639 bp, Homo sapiens
  misc_feature 1, 2, 1639: n = A,T,C or G
nnctctatgtgccctcttattatctcatcggctcttaaagagggccaattgctctggtggtatcatagccccccctttttttttttgcccctcgaaaagaagttattaaatcaacacaaaagttgtgttattcggctccgcctgggtctacacagcggagcattcccaatgatgggacgccaatttaaaacccgccccggtgacagtgaacccacccctcctcaacagttgaacaagaacgcctccactcagcttgacaatgcccatgacctgagtgacttggcagagagctggcttcaggcgagttcagaaggctagcttcttcatcaggagataaactctgggagtccacctcgaatccatgcaggttgttggcatccccctgcagcctcatgagcaggcccccataggacacgtacgcagagctgaaaccagaaggcccccatcccgtgattctggagcactgccactcagcagctctcaatctcagcaggcgtgttgctgcttccagtagaagtttcatctccctcaatcctgtacactgtttccataccattacatactcaaactggtcagcctggaaggcctatcatcagtggggttgtattcaccatcatccagggtaccatcttcatacaaggtactagctatgaccaaccgaaacttgtcacccaagtctacagggtaaatttgaatgtttacatctaagattagatccatcttgaaagattcactctcacaatgcagtcgagacactcggtcaaacttcttgccctccgggtcaatatccttcacatcgaaaatatcctcaaacaggatgcccgccatcgcgagggggccacgagagcagcagaaggggtgagagcgcgaccacagttgggagtacaactttaaactgtattgtattcatgttgctaaacaatattggccttctcgatgattttattcatgttgctccaaagttaaaaccctgtagaactaagtaggtgaagagatattttgtataagtgccacagaagagaaaatataataaattaaatagtgaattgagcatcactagaataaaataaaatgagtaggcattcctaagatgtgaaatgatcacctaagatatacatgctccaaccatattgattttagaacaaaacacagcagcccataacagtttgtggcctctactaactgtcctctgctgtcccatctagaggttatgtttctctatttttaaaataaaatgtagttaaattagcctgacggatgtttcctctctatcccttatctcagacacatacaaaacagacagacaataacaaaaagacatcatctttatctgtacaaaataaggtatgcacacttttttctttgtgcttctgagattggctcctttgcatatataagatacaagccatctgcacgatcaccctcattccctatctttgttgacatgttcctcttacaacacaagagcaaattacctctatttgaaagcaccctgtcttcaacacagctcatgacaattttatttaatattgatcctttgaatgagagatcaaaagcatgcacaggtcaatcctctgcacattaaaaaaaaaaaaaaaaaaaaaaaaataaagcgtacaaaaaaaaaaaaaggtgtccn

SEQ ID NO: 10092 - DNA, 520 bp, Homo sapiens
acttttttttttttttttttttttggttgaaagattctaaagtgtgttttgatcatgttttcaaaactttaaaaatcaagttacttactgaatccaaccattccatctggaactttgtattcttctgtcattacagatctgctaagaaataacagaaagcaccattttccttcaatgaaagatactttgtttacaaataaaagataatctattaataaaaatggaagtctaatgtctcccaatggcttaaactaaggttctaggctcagactcatgtcaaaaaatatgatcttattacttgagtagttaaattaagaaatttaagatgacacatcgagtgaagaagggatgatgaatggaacagtctgaaggcattaactgtaaagaagttgaagtggagtttagagaatgtcatcttaacagttactctaattcacccctgttcttctaaaatgtggttaattccacctatctctccaaatcacaaatttttctcactcaaaagaaaaatcatcacttt

SEQ ID NO: 10093 - DNA, 391 bp, Homo sapiens
agaaaaggactaaaagattggtcgtttttgatgctcgatgaatgctgggaattcagaggaatgtcttcacttatacttggatttgctctcttcccatttctgattgttgtatagctttcgattttgcttacagtagttcccccttatcttcgggagatacattccaaggcccccagtgaactcctgaaacctcaaacagtacattttgcccttagctttttgtttcctagcttgtcttttttcttctgcttcctacttttcaggtttaaatttatcttttttcttctaaaagtatgtttttatcttctaatttccctatcttctctattcttttcttcgccttcccgtacctgcccgggcggccgctcggccaccgcggtggagctccaat

SEQ ID NO: 10094 - DNA, 4600 bp, Homo sapiens
  misc_feature 1, 2, 4220, 4224: n = A,T,C or G
nngcctggaggtagcctggcagccgctgaacggcgcggctctcaacgtgacggggaagtagttcggctgcccgcggcttactaccccagggcgaacggacggacgacggaggcgggagccggtagccgagccgggcgacctagagaacgagcgggtcaggctcagcgtcggccactctgtcggtccgctgaatgaagtgcccgcccctctgagcccggagcccggcgctttccccgcaagatggacggtttcgccggcagtctcgatgatagtatttctgctgcaagtacttctgatgttcaagatcgcctgtcagctcttgagtcacgagttcagcaacaagaagatgaaatcactgtgctaaaggcggctttggctgatgttttgaggcgtcttgcaatctctgaagatcatgtggcctcagtgaaaaaatcagtctcaagtaaaggccaaccaagccctcgagcagttattcccatgtcctgtataaccaatggaagtggtgcaaacagaaaaccaagtcataccagtgctgtctcaattgcaggaaaagaaactctttcatctgctgctaaaagtggtacagaaaaaaagaaagaaaaaccacaaggacagagagaaaaaaaagaggaatctcattctaatgatcaaagtccacaaattcgagcatcaccttctccccagccctcttcacaacctctccaaatacacagacaaactccagaaagcaagaatgctactcccaccaaaagcataaaacgaccatcaccagctgaaaagtcacataattcttgggaaaattcagatgatagccgtaataaattgtcgaaaataccttcaacacccaaattaataccaaaagttaccaaaactgcagacaagcataaagatgtcatcatcaaccaagaaggagaatatattaaaatgtttatgcgcggtcggccaattaccatgttcattccttccgatgttgacaactatgatgacatcagaacggaactgcctcctgagaagctcaaactggagtgggcatatggttatcgaggaaaggactgtagagctaatgtttaccttcttccgaccggggaaatagtttatttcattgcatcagtagtagtactatttaattatgaggagagaactcagcgacactacctgggccatacagactgtgtgaaatgccttgctatacatcctgacaaaattaggattgcaactggacagatagctggcgtggataaagatggaaggcctctacaaccccacgtcagagtgtgggattctgttactctatccacactgcagattattggacttggcacttttgagcgtggagtaggatgcctggatttttcaaaagcagattcaggtgttcatttatgtattattgatgactccaatgagcatatgcttactgtatgggactggcagaggaaagcaaaaggagcagaaataaagacaacaaatgaagttgttttggctgtggagtttcacccaacagatgcaaataccataattacatgcggtaaatctcatattttcttctggacctggagcggcaattcactaacaagaaaacagggaatttttgggaaatatgaaaagccaaaatttgtgcagtgtttagcattcttggggaatggagatgttcttactggagactcaggtggagtcatgcttatatggagcaaaactactgtagagcccacacctgggaaaggacctaaaggtgtatatcaaatcagcaaacaaatcaaagctcatgatggcagtgtgttcacactttgtcagatgagaaatgggatgttattaactggaggagggaaagacagaaaaataattctgtgggatcatgatctgaatcctgaaagagaaatagaggttcctgatcagtatggcacaatcagagctgtagcagaaggaaaggcagatcaatttttagtaggcacatcacgaaactttattttacgaggaacatttaatgatggcttccaaatagaagtacagggtcatacagatgagctttggggtcttgccacacatcccttcaaagatttgctcttgacatgtgctcaggacaggcaggtgtgcctgtggaactcaatggaacacaggctggaatggaccaggctggtagatgaaccaggacactgtgcagattttcatccaagtggcacagtggtggccataggaacgcactcaggcaggtggtttgttctggatgcagaaaccagagatctagtttctatccacacagacgggaatgaacagctctctgtgatgcgctactcaatagatggtaccttcctggctgtaggatctcatgacaactttatttacctctatgtagtctctgaaaatggaagaaaatatagcagatatggaaggtgcactggacattccagctacatcacacaccttgactggtccccagacaacaagtatataatgtctaactcgggagactatgaaatattgtactgggacattccaaatggctgcaaactaatcaggaatcgatcggattgtaaggacattgattggacgacatatacctgtgtgctaggatttcaagtatttggtgtctggccagaaggatctgatgggacagatatcaatgcactggtgcgatcccacaatagaaaggtgatagctgttgccgatgacttttgtaaagtccatctgtttcagtatccctgctccaaagcaaaggctcccagtcacaagtacagtgcccacagcagccatgtcaccaatgtcagttttactcacaatgacagtcacctgatatcaactggtggaaaagacatgagcatcattcagtggaaacttgtggaaaagttatctttgcctcagaatgagactgtagcggatactactctaaccaaagcccccgtctcttccactgaaagtgtcatccaatctaatactcccacaccgcctccttctcagcccttaaatgagacagctgaagaggaaagtagaataagcagttctcccacacttctggagaacagcctggaacaaactgtggagccaagtgaagaccacagcgaggaggagagtgaagagggcagcggagaccttggtgagcctctttatgaagagccatgcaacgagataagcaaggagcaggccaaagccacccttctggaggaccagcaagacccttcgccctcgtcctaacaccctggcttcagtgcaactcttttccttcagctgcatgtgattttgtgataaagttcaggtaacaggatgggcagtgatggagaatcactgttgattgagattttggtttccatgtgatttgttttcttcaatagtcttattttcagtctctcaaatacagccaacttaaagttttagtttggtgtttattgaaaattaaccaaacttaatactaggagaagactgaatcattaatgatgtctcacaaattactgtgtacctaagtggtgtgatgtaaatactggaaacaaaaacagcagttgcattgattttgaaaacaaacccccttgttatctgaacatgttttcttcaggaacaaccagaggtatcacaaacactgttactcatctactggctcagactgtactacttttttttttttttttcctgaaaaagaaaccagaaaaaaatgtactcttactgagataccctctcaccccaaatgtgtaatggaaaatttttaattaagaaaaacttcagttttgccaagtgcaatggtgttgccttctttaaaaaatgccgttttcttacactaccagtggatgtccagacatgctcttagtctactagagaggtgctgccttttctaagtcataatgaggaacagtcccttaatttcttgtgtgcaactcgacggtttcgccggcagtctcgatgatagtatttctgctgcaagtacttctgatgttcaagatcgcctgtcagctcttgagtcacgagttcagcaacaagaagatgaaatcactgtgctaaaggcggctttggctgatgttttgaggcgtcttgcaatctctgaagatcatgtggcctcagtgaaaaaatcagtctcaagtaaaggccaaccaagccctcgagcagttattcccatgtcctgtataaccaatggaagtggtgcaaacagaaaaccaagtcataccagtgctgtctcaattgcaggaaaagaaactctttcatctgctgctaaaagtggtacagaaaaaaagaaagaaaanccgncaagacagagagaaaaaaaagaggaatctcattctaatgatcaaagtccacaaattcgagcatcaccccttctccccagccctcttcacaacctctccaaatacacagacaaactccagaaagcaagaatgctactcccaccaaaaggttttaactggccccaagtacagagctagggaatggttgtaatgatacctaaattctgtgacttgggaaaaagttagctatccaaggattctgagagaaaaagctggtggctttatttttcccttcttcattgcttataatttatgctttatagcccattggggaataaagaattaaggtcacaatttctcagttaaaactggaaaaaaaaaaaaaaacggacgcgtgg

SEQ ID NO: 10095 - DNA, 580 bp, Homo sapiens
  misc_feature 1, 2, 580: n = A,T,C or G
nncgaattggagctccccgcggtggcggccgaggtacgcgggacaaaataagaaggcttcctgaaagcactgctgcttggcatacttcttgtagtaaccctgtcaccgtctgctttttgaagctaaactagatccaagaaattgacataaataatgagcaagaaaatgattatgaagaggatattgcctcattttccacatatattccttattctgaagactactttgaggtcaacattccaacagacctacgagcaaaacattctggggaaataagtgagagaaaggaaattgaagaactatcagaagcttcaagaaacaccataccactagcagtggtgcttcccactgaaattccatgtgagaatcctggtgaaatattcataattttgagagatgaagtaattggtgatactgtagaggttgaatttacatcaagtaataagcgcattagaacacggccagcccgttggaataagaaagtctggtgcatgaaagctttagagtttcctgctggttcagtccatgtcaatgtctactgtgatggaatcgttaaagctacaaccaaaattaagtaccn

SEQ ID NO: 10096 - DNA, 1357 bp, Homo sapiens
  misc_feature 1339, 1340, 1341, 1342, 1343, 1344, 1345, 1346, 1347, 1348,1349, 1350, 1351, 1352, 1353, 1354, 1355, 1356, 1357: n = A,T,C or G
ccgaggtacaggtgaatgccattctagtcatctcccatgaagattaattatttccttttcacaaatccattccttctgatccagaagaaagaaagcagtgagtgatttattttctccattgtaagatttttgttattcataattgaatgaatgtgctgaatttttatggtgttattggctagttttgaaaaaaaaaaggaagaaataaagcatattattttgaagttctaatgactcacgtttttcaaaattaatttttcagttaaggcaattacaaacttatcattagttattaactttgatgccaggtatactatcccatgccacacaaaggcagctcattttgatatagactggggcaaagaagatgattccaatttgttaattggcatctatgaatatggatatggaagctgggaaatgattaaaatggatcctgacctcagtctaacacacaagattcttccagatgatcccgataaaaaaccacaagcaaaacagttgcagacccgtgcagactacctcatcaaattacttagtagagatcttgcaaaaaaagaagctctttctggtgcgggaagttcaaagaggagaaaagcaagagctaagaagaataaagcaatgaagtctataaaagtgaaagaggaaataaagagtgattcttctcctctgccttcagagaagtctgatgaagatgatgataagatgagatcagttctgtgaaacatccaaataaaaaattacaacagaaagagacagtgaagaaaaacctgagccagcatgttttatataaagaaggaaccagaagaaaagagggacgcaccaagaaacaggcgaatacacaaaaggaacttacacaagggcagcatccacagacacaacgaggctcacgaacagcatctcccggacaacacagaattttcccgcacaacacgagaacaacaaagtaaaacgacgctataccgaagaaacagacataccggacgaaacgttgacgtgaatcaaagtctggtgggtagaggaaaggatcccaagaaatcttcggggtcagatgctcaatcatattacggcctgtgcgtaaccaggtcccattttggagaatcctgaaagcgggtcgaggacttcgcgatgtaagaaaaatgagcgtaacacattgacacctgaaagccgggaagcctctgacggaaccagctacggaggtcaacacggcacacaaggtacaggtaactggcaatgaggcacagcgaagttaaggagacagagaatcaaaggtacgagagctgcatccagactgaagcaaaacagagagtcagcacagctaccagtgtcattctcatcnnnnnnnnnnnnnnnnnnn

SEQ ID NO: 10097 - DNA, 1296 bp, Homo sapiens
  misc_feature 1296: n = A,T,C or G
acaattttaatttacaactgttggaaataaaaatcacttaatttttttccagtgcttctccctcatctggttattcaagaaaacaaaacagtctctgagatatttagcttttcaaactgtaaataatgctctagtgttatttattttttaatcccacttgtattattttacctctagagcatcttgtattaggacatgttatatttatgccagtgggaaataagttatggccaagttttgcaaaaacaggaagcagtgagatacttgtttttttctcctcactaaatatcagtaattgtcaggaatggtattacctattttcatttcctcttttcagctttaagctttgttgattgggacactaaaactgatgtatacctgaggaaaaaatagaatgtgctcatggttagggaaaattatattatttttaattttttaatttgttttttaaccaagtaggaatttgggtgtatggataagaggccaatctgcttctgtaggctatagaagaaaaccagttgtattttatggtcataatttgtccccctattattttggagatttaaatttaagtaaagtagccatcagtattttaattgaaaaatactaaagccacataactgagtaggatgtcgtatgatactttcaacaaattccctaatgctgcctaagcatatggatgttttaattctttgctgttataaacagatatctaatacgccagaattactgatggtaaaattgaagttgtgtaacttgtgaatttttttatcaatgttttaaatattatttaaatcttaaaatcatttaaagacttatgttgccactgggtggcagccatggcttctcccactaagcaacagaagtgaccaaatataattaagacaaattttcatctctattacatctgcttttaaaacattttagttcatattctattatttttctaactcagtactcctttgttgagggtaattattagtagttaagtttttaatggaaataaaaatcatgtatgcttatctttgctgtaaaatcaaatgaatataaattgaggaaaactttaaattgttgtaggatgactagtagtaacatcatcttaatttaacataaaaaaaaaaaagggggggctaaagattcctcggggccagttagcgtccagttttttgcaatggccaaggggcgaataaagaagggcgcgcttccacgcgaggaacgactgggttggaagccccttcgggggcaggcaccccggatagcggaataataaggtggaacgttggcgatgtcttatan

SEQ ID NO: 10098 - DNA, 1182 bp, Homo sapiens
ccacgcgtccgcggagttagcggcaacgaccttgcagcctggacactagccaggcgctccctcttctcacagcggcccacgtctccttgcttgggagcccatcgtcctggctccggtggcctcgctgggtctcggggaagcagaggactgttcattcctgtggcgaaaagccggagtcggccctagacacccacgactcgcagggtccatggttccggaggccgtgagacctgccggggctgacaggtgccagggcccatgctgcgggagcctgtgtgctcagccttcttgcggacggtaaagaagctaagtggaagagtgtttcctcctctggccgtaaagcaggtactctctgcagcaccagctgtccccgccctactccggaccgccccaaagactccatgggatggacctgagtcagccgaatcccagccccttcccttgggcctgctgtggtgctggacatcagtgacagacggaagcaggagaccatcaagggactgggaaggcgatgcctggcgggagctgctggtggagagactcgggatgactcctgctcagattcaggccttgctcaggaaaggggaaaagtttgggtcgaggagtgatagcgggactcgttgacattggggaaactttgcaatgccccgaagacttaactcccgatgaggttgtggaactagaaaatcaagctgtactgaccaacctgaagcagaagtacctgactgtaatttcaaaccccaggtggttactggagcccatacctaggaaaggaggcaaggatgtattccaggtagacatcccagagcacctgatccctttggggcatgaagtgtgacaagtgtgggcccctgaaaggaatgttccagagaaaccagctaaatcatgacaccttcaatttgccatcatgacgcagacctgtatacattaggttaaatctgaatttccactgctttggagagtcccacccactaagcactgtgcatgtaaacaggttcctttgctcagatgaaggaagtagggggtggggctttccttgtgtgatgcctccttaggcacacaggcaatgtctcaagtactttgaccttagggtagaaggcaaagctgccagtaaatgtctcagcattgctgctaattttggtcctgctagtttctggattgtacaaataaatgtgttgtaga

SEQ ID NO: 10099 - DNA, 664 bp, Homo sapiens
ccgggcaggtaccacaagctgtgtgtctttaagcaacagaaatttcttccctcacagttgcggaggtcagaggtcagaaaacaaggtgtctgcaggaccaacctctcctctggatgctctaggtgagaatcttttccatgcctttctcttagcttctgatgttgccgtcagaacttcagatggtgttccttggcttctgtcaatattaatacataaatccttttcagtctcagcttctctcttcacatggtcctctccacatcccccctgtttctgttccctcttcttataaagacaacccatgttattttaagtcccacctacagagataattttagcttgattacatctgcaaaaactttgtgtccaaatgaggtttcatttaccttatgtgtataactaggggttagggcttgaacatacgggtttggggaggggaacacagttcagaccatgacactcattgtttcactcattaatgagttaagggtgctttgatattattacatttgaatgagagtggtctttaaaattacattttgtcgtgtagtttgttccaccctgatgcttaaagggagtcacctgcctcagccaattaaactgtgttgtctctgcagtgcgttttatcacaagaacatgacctttaagcacaagaacaccttgt

SEQ ID NO: 10100 - DNA, 629 bp, Homo sapiens
  misc_feature 602, 603, 604, 605, 606, 607, 608, 609, 610, 611, 612, 613,614, 615, 616, 617, 618, 619, 620, 621, 622, 623, 624, 625,626, 627, 628, 629: n = A,T,C or G
gtcccatggcttttccagttctctcttgccttgaggctcaagaacagtttgttttaactgagagtctgggaggaactacagttttccccagagtagtcttggcggactactggaagtcacagccaaagaaactctgtgattactgcaagtgctggatagcagacaataggcctagtgttgaatttcatgaaagaggaaagaatcataaggaaaatgtggcaaaaaggatcagtgagattaaacagaaaagcctggataaggcaaaggaagaagaaaaggcatcaaaggagtttgctgcaatggaggcagctgccctgaaagcataccaagaggatttgaaaagacttggcttcgcgtcagaaattttggagccaagcataacaccagtaaccagcactatcccacctacctcgacatcaaatcaacagaaggaaaagaaagaaaagaagaaaagaaaaaaagatccttcaaagggcagatgggtagaaggcataacctctgagggttaccattactattattgatctttatctccaggaggtaagtcatttaggcataaaactggttaaagaacagtgtcacttagttaggattaggaacannnnnnnnnnnnnnnnnnnnnnnnnnnn

SEQ ID NO: 10101 - DNA, 365 bp, Homo sapiens
  misc_feature 1: n = A,T,C or G
nacatttcctaagtatcacatgacttaacaggtgcaagctggcaggcatcggacttggtatccgtaagacctgttgcccctttgccttctgccatgattgtaagtttcccgaggcctccacagaagctgaacagatgccagtatcatgcttcctgtatagcctgtcgcctttgggcagctggacacctcacccacgcttcaggctggagccttcctcatctttattaggtgtcttagaggcaagtgccggaggtaacatcctcctctgcatttcctacactgacaaggagaatgctgtggctctacgcagtcatccttttacaacttttgccagggagcaaagtctgccacatcagtcgatgagt

SEQ ID NO: 10102 - DNA, 1874 bp, Homo sapiens
  misc_feature 1867: n = A,T,C or G
acgcggggtcggcaactttgggaaccaccagtaggatgtggttaagattcagttcttgctgagctaaggaagcatttctcacttctttttaattgtctggctcacttctagtccctaactaaatgctcactcaagagttttagcttgaatgtcaaatgtcaaaaaattaattgggtgatctttctccatttctaggataagaagaaagagaagaaatgaagtgaccatccagcctttcccaattagacttcctctccttccacccctcatttcctttttgcacacattacaggtggtgtgttctgtgataatgaaaagcatcagaaaagcttttgtactttgtggtttcctctattttgaattttttgatcaaaaaactgattagcagaatatagtttggagtttggcttcatcttcctggggttcccctcccttttttgtcaaccccatctgtagcctcttcctctactcaggcagtcgacccgccacgatgagaagtgggaccagcagagggcgccaacttcaggagtccgctttcccaccaggcttcattcacccagtggacctgaactgtttggtagagccacccggcccttccttcctcatcgttgtttggtatgcgcacagttcctgtgggactgggccgtgagttttccattggaaagaagttcagtggtcccattgttaactcagcctcaaatctcaactgtcaggccctacaaagaaaatggagagcctcttctggtggatgctttgctccctctgagctgcccatgctggtctggcaaacacacctttctgctttgccttcacaaaagtaatgtgttccctttcccaccccttgcctgaccctcagggagtcagcctgcttccatccatgggtgggaagacttcagcacaaaggaaagactaattcttgtcaggcatttttgccctgtttttgtttttttagtttggtatccccttactgagcggcctctactaggtggctgtgattaaatgtcccaagcaaggatagggaaggggaatggttgagcctctggagatcattgtaaccaatcctgccagacctgtttggggcagtggggagcaaacctagataaggacctgttgggcaacaggagccaaatcttctttaccaccaagcagttcctcaatcacattaacagagcgaggctgtgataacttaggaggcagcaatcctaatagtccttcagtgcattttagtctgtctccaactggacaccagtaggtagtgtcaagccagagattcggggcagtagataaatgttcattttactgatgcactttagttttggtctgttacctgttttccagaaattgtggccttttaggcgggagttaggcgaccaaaccagagagagccccaatccctgcagttttgtggcttcaagtgtgggtggacagtcctaatggggatctccagctccttccctgtgggctgccacaaacagctacccccagaagggtcaatgttgggagtggttgtggctctgagctgctctacagagcttcagtgttcctggagtgacatgccaccccgaatggctcactttcactgaggatgctgtcctctgatttagctgctgcctccagcctctggcttgagaacttactaaaggcacttccttcctgttaaacccctgttaactctccataaatttggtgattctctgctaggcctaagattttgagttaacatctcttgaagccaaactccaccttctgtgctttttgcttggggataatgggagtttttctttaggaaacagtgccaaggaatgacaaggatattaaaaaaaaaaaaggaaaggaaaaaaaaaaaaaacacctactttttaaaggnaattacc

SEQ ID NO: 10103 - DNA, 1734 bp, Homo sapiens
  misc_feature 1, 2, 3, 4, 5, 6, 7, 8, 9, 10, 11, 12, 13, 14, 15, 16, 17,18, 19, 20, 21, 22, 23, 24, 25, 26, 27, 1711, 1733, 1734: n = A,T,C or G
nnnnnnnnnnnnnnnnnnnnnnnnnnngccaatcattctgctctttattcagagtccgacacaagcccccacgtccatagccaagttttccccggtttcccagcagccagtgacttctgtagcattaggattcttatagtagttattgtctacatttctcagcagattgaatatgtactgcctcttactactggactgtttattcttaaatgtgtacagtatggatttatgtcgtctatatattatgcatttatttgtcttcttcgttgtgatggtaagctcctggagggcaagtcttgcatccactgctttgctggcaacccgactggtaagcttctggaaggcaaggcttgcatccagtgctttgctggcaacccgattgctaagtaccgtgttttaagcttagttcagtctcaagtgtttgcagccacatctgaagaccaataaagcaactgctggtttatcctttgggagctgacagaatttcttctcccaaatacatacacagtaaaatcataagcctggaatgaagaaaaaaaaatcttacgggcaatgcaatggctgcaaaactataaggattagaaatgtgaacccacattttaatccaaattagggcaatttagaggtggtagcgtaaagaatagcttgctgtaatatacgccatgctgatacagaattggcttttggccttgtcaaaattaaattgtgctttctgtattgatggtgggcatgtttctgcaggtctctcattctaagctacaacaggccctaagaggtagaagtcacatacctgaattacccgtgaagttgctttcagatcatatcgttggttcactcttacagaaggatcactttaaaatatctctgcatttgtatccttgcaatgccacaactaaaagacagttatctcataggtccttgattaaattaggaggctttttattgaacacaagaaatgatacttttcaggcactgggcagataacttgctagaaaggcattttttaactgtgctaagattgagctgagtgcgtggctggagacaccacacaacacggacccttgctaaggcatctagtccacccgcttgttatgtagagggtgaaatgaagcccaaaacagtcaatcgtgaactctaagccgatcaggtgggaaagccggcatctctagaatgaaaacctaaggctgcttctcccactttgcctgagcaaatatagtgagattacacagcaaggcatgtgtaaattgccagtgcctatttctcagaaccagatttggtgatcgcaaagactgacgtggccctctaggtgtgcctatactgcaccagaagagcaagccgagaaagcagtgctcaaacctagagcattcaacctttcataccgataaaggctttaaaaaaaaaaaaaaaaaaaaaaagtacctgcccgggcggccgctctttcggtcaacgacttaagtctttacggctgtgagcgctatgggccgcggtagctttccgttaacttcagatccgattgtcgccccactgccaaagttaccttccaacatcgttactgttgcactttacgcagtcaagtgtccaactcctcagatgagcaagtggtcggccctaaaaagggcctttgggatcgaaacgtgcaaagctggagcggcggcctagcctccgaagccgtacctgcccgggcggccgctcggccaccgcggtggagctnccaattcgcccctatagtgagnn

SEQ ID NO: 10104 - DNA, 329 bp, Homo sapiens
  misc_feature 228, 229, 230, 328, 329: n = A,T,C or G
accaaatggctcacaaagcccaaaatatttactatttgcctctttacagatagtttgctgacacctgacatataggaatgggggacattgcttctcaccacccccagctctctcactggatggtccatgtatacaaagtagagcccttattaaatgcaaagatgttggtctaaaccctgcttgataggatgattgagtaaattcaagaaagtggtaatgagggctggnnntgcggtggctcactcctataatctcattaccttggaggccaaggtgggcagaatcgcctgaagatcaggagttttgagaaccagccctgggccaacann

SEQ ID NO: 10105 - DNA, 638 bp, Homo sapiens
cggaagtcttctagaattaattaacgcgggaggagcagtacaacagcacgtaccgtgtggtcagcgtcctcaccgtcctgcaccaggactggctgaatggcaaggagtacaagcgcaaggtctccaacaaagccctcccagcccccatcgagaaaaccatctccaaagccaaagggcagccccgagaaccacaggtgtacaccctgcccccatcccgggatgagctgaccaagaaccaggtcagcctgacctgcctggtcaaaggcttctatcccagcgacatcgccgtggagtgggagagcaatgggcagccggagaacaactacaagaccacgcctcccgtgctggactccgacggctccttcttcctctacagcaagctcaccgtggacaagagcaggtggcagcaggggaacgtcttctcatgctccgtgatgcatgaggctctgcacaaccactacacgcagaagagcctctccctgtctccgggtaaatgagtgcgacggccggcaagcccccgctccccaggctctcggggtcgcgcgaggatgcttggcacgtaccccgtctacatacttcccgggcgcccagcatggaaataaagcacgccaggcgctgccctgggcccctgcaaaaaa

SEQ ID NO: 10106 - DNA, 2481 bp, Homo sapiens
  misc_feature 1, 2, 3, 2480, 2481: n = A,T,C or G
nnngtctctccgctgtgtggtgtccttgttgtgtgcctctctcttgatattgttctcccgtgttacctttgccgtcccgggatcccccttgaaggtatattggccgttgcccctctccaagttgccggccaccgtccattgctgctgagttggcatcttcctgcgtctccatgactggttttcctctggtggaactccttttcgttgcgttcttgagcggatacactttggatgtaaaagattggaaagctgacttgttcgacttgccaaccattccaggcttcatgcatttggccaaggcttgaggtcactgacgtcacgaaggatgtcttgtggagggattaatttatcacccaggttcccaataagaacttcagactccttgccaaaagctgcccttatgaaatcttcttcctcctctctttttggcctcagctgtttgggttgagccatattcatccagtttggtagagatttcaagagtctgctgatatcatcatcttttgcccaggatgcactgatgacaagtttttcttctgactggacaatacccctgtaagctgcagtgcaggtgtccttgtactcctggagcttcacgcacaccatgttgaggaattgatctgaatatgcactcaagtcatgcatcaggttcaggaggtcttgaactgtcttctccacaatgattgtgctctgtaggagaggccgctgcactcccagcaccttcatggtgtctgcgttggccagaatcttcaaagggtcagatgttttagtgactccttcaatctccttgttgatctcagccaagacttgattgagaaagatgtttttgatgtacacggtgagaaactctcgaagaggacactgtttggctgggccaagacccagagcatgctcaatctcctgaataaatcttagtaatgggtggaatatgacggtaatgtttctggctccaggtttgcagacaaattttgttcctccaccttcaattaagttgtcatcaggacccccttgcagttctccactccgactatagagctcccttctctgttctcgcagataggcgctcatactgatggcatgggaggacgattcgaacttgaaaagagaattttttggcctttgaggtttcttcttggcaaaaaaggctgcaaactctcgtccagtgctggcatagcttagttgagctgatggttcagaggccgtacgagtatttttcatatccaagtactcagttaatagcatctgtagaacatcttggatcttcacccatacatctgccatatcatacagtttgatatcttcctgctgagtcagtggagtcactacagtgtcctgcaggtatcccaggaccacagagtgtgcagcggctacagcattaaacttgtcaaacagtaactccagcagttctagaagcaaccttggttggttctccacagtaacgttctccccccgctgatagccactgtctgccacctgggttgtagacctcttcacaatttgcttcaactcctgctccaagcgctctatgattgccttaactgtttctgggatcttcttcagtttcgccaagcccttaatgaggatacccataaacagggtgctgttttcctctggatccaattctaaatcttccttgatgtcctgcagatttatctccctcacacttgagcttccagcagtagaatagtgagaggtatcaaggaattttcgaggagtagggaggtttgtaacatcaatcagaggaacagaagcatctttcacgagggagctgattttccctttttccttgttacgctgcacaactcggctagtcgatttgatgtacaggtgccggtgtagttcatctatgagaaccaagtgaaggttcatcttcttgctgtgcagctctagtcgaagtcactcagtccttccacctggagcagggggccctccaaagactcaactgctgacaccaacatgtcagtggcactgagatagtgcttgctggccatgcactgttccagcttttgaggcacttgcttgatattctcaatttcatccaacaagttcaggacatgcttatgctcaattccttcaatccacagtttccgaagctcatcccgtttgcagtgcagcagcatcttgcatgaaagcaggttctcttttacctgctttattgtatttcgggagttagtgatgcgctctgtgatgctctggtatgtgcgaatggctgtcgtcaattctgtgtagtgctgtacaatcaattcatccaggtcacggtcacatttctcgtaggcttcttcaaggcgacccttttcattttccctgtcttcgacatcgtcactagtagacagagtcctgatcacagagatgagcagccccgaggggtctttgcttttgctgactgtgcttctgtatttcccaccagctgcttctgccgccatcttggacgcggggagagccgctaggctccaaggaagccaagggtgcgtaaattctgnn

SEQ ID NO: 10107 - DNA, 2184 bp, Homo sapiens
  misc_feature 1, 2183, 2184: n = A,T,C or G
nacgaggagcgggcgaggcgctaggggcgggggcgccgggaggcgcgggctttgctcctggggtctcggccttggccggctggacctgaccctagggcggcttgcgcagctgtcgggacgtgactgcgttcagccgcgtcgggcgtgcttcccagacttgcccaagttcgggtgccctagctgcccctttgcagccgctggcctacccggcccgcgggtgagaaggttgcgacgggaggtgggtggaactcgccagcgccgggaccgcggattggctgcctcggctttctcttttccccgtgggctccggcgtgaggcgctgaagcggccggcagccggcgaccggccctcaccgtccgccgggttgcgctctgcttttgcggtgaggcgttgaccacgcccatatgaattggagctctccgccagtaggagtttccggaaggagtttgaatttttgtgatttttatgcttgtttggtcggtggaatatgttgggatttatgtttgcctctgaacaagtgtcttgctcacatcgtaaatgactttctctccgaaacgctaaatattctttcccgcaggagctcatatccttattttccatgacagatcttaacgacaatatatgcaaaagatatataaagatgataactaatatagttatactgagcctgatcatttgcatttcgttagctttctggattatatcaatgactgcaagcacctattatggtaacttacgacctatttctccgtggcgttggctgttttctgttgttgttcctgttctgatcgtctctaatggccttaaaaagaaaagtctagatcacagtggggctctaggagggctagtcgttggatttatcctaaccattgcaaatttcagcttttttacctctttgctgatgtttttcttgtcttcttcgaaactcactaaatggaagggagaagtgaagaagcgtctagattcagaatataaggaaggtgggcaaaggaattgggttcaggtgttctgtatggagctgtacccacagaactggccctgctgtacatgatagaaaatggccccggggaaatcccagtcgatttttccaagcagtactccgcttcctggatgtgtttgtctctcttggctgcactggcctgctctgctggagacacatgggcttcagaagttggcccagttctgagtaaaagttctccaagactgataacaacctgggagaaagttccagttggtaccaatggaggagttacagtggtgggccttgtctccagtctccttggtggtacctttgtgggcattgcatacttcctcacacagctgatttttgtgaatgatttagacatttctgccccgcagtggccaattattgcatttggtggtttagctggattactaggatcaattgtggactcatacttaggggctacaatgcagtatactggtaagaacattccttcattcttgcaacttattggtatgttaaagaaatagggaaaagaaagaaaaaaatgttaacaatgaaaacaaatccaaagacacagggtgttgagggactagaaatgatagggcaaagtctctttcacaattttggttttcttattcttttgtattaaattaattgaaagagaattagtcccgcgcagcaatgattagaagccatgtggggaagatacaatagtgcagagaacagacgtttttgtgtgagccattacctaatcccagaaaagcaagacgtttgggatcagatcattttaatacaattccttccattcattttcctattccatttgaggagtaattgtacaaatctgactatacacacgacctactttcttactgtggtatcatgcttgctattcttgcccctgagttttttgcttcattaagatatatggtcgatgtctgggcacggtggctcacatctataatcccagcactttgggaggccaaggggggcagatcactggaggtcaggagttcgagactagcctggccaacatggtgaaaccccatctctactaaaaatacaaaaattatctggtgtagtggcgcctgcctataatcccagctacttgggaggctgaggcaggagaattgcatgaacctgggaggcggagattgcagtgagccgagatcatgccactgcactatagcctgggcaacagagcaagactccatcnn

SEQ ID NO: 10108 - DNA, 1176 bp, Homo sapiens
  misc_feature 1, 2, 1175, 1176: n = A,T,C or G
nnggattgcagtggatcttactgcttacctgtaccagttattccctctttcagcactgctctttatgggaaacttctgaaactccccacatgctggaccaaaagatctcagattgctataactgaaggtatatttgaacttccaaatctcacaattcaagctacaagagcacagacacttctcttgcaagcaatatatcaaagttggtctcatcttggaaatgtcagctcttccgcagtgattgaagctttgataatggaaacctccctaagtatagggtgtgaaatctaagaatcccctggccaactcttgacgggctcaatccagaatgttgaattgaagtactgcagcacatcattggtcaaatgtgcctctgggaccatgggatcaataaaaatttgtgccaaagccccagttgatagtggaaaagagaagttgattcccttgcttcagggtccttctgacactaaagaccttcatagcaccaagtggctcaatgagagtagaaagccagagtctctcttagctccagatttgatggccttcacaatccaagttccacaatatattgactactgccacaattccggtgctgtacttctttgcagtatacaaggactagcagttaatattgacccaatcttatatacgtggctcatctatcagcctcagaaacgaacaagtagacatatgcaacagcagcctgtggtagctgttcctcttgttatgccagtttgtagaaggaaagaggatgaggtgtctattggaagtgcccccttggcaaagcagcaatcatatcaggcctctgaatatgccagcagccctgtaaaaacaaaaacggtaacaggttgaagaagttctcctggataaaatcccgcccattgttcgttccatttcaatggaacgaacaggctcctctagagggatatgaagcaccgccaggtcctttgagttttaagctgtggctcgtagtgttctggcgagcagttttgttgatttaactgttgaggtttagggctaagcatagtggggtatctaatcccagtttgggtcttagctattgtgtgttcagatatgttaaagccactttcgtagtctattttgtgtccactggagttttttactactcaggtgagttttagctttattggggagggtgatctaacactcttacnn

SEQ ID NO: 10109 - DNA, 390 bp, Homo sapiens
  misc_feature 389, 390: n = A,T,C or G
aggtacgcgggggccaaaggctggaagaaaattgagccaagagctggaagccagaagttccccatgcctgccctacacatccaggctctgagtttttactttttctactatattgccatgcaagtaactttaactttgcttctctgttctctgtcactgagaaataccatgtctccatggcaataggaatgcatttaccttcaccaaacctgctcaaatccttgctgaacaggacgtagcaggagttgactttccaatggttggaggttcagagtacctcgcccgggcggcccgctcgaggggaggggcccgggtacccacgcttttgtttccctttagtggaggggttaatttgcgcgcttttggcgtaatcatgggtcattagctgnn

SEQ ID NO: 10110 - DNA, 288 bp, Homo sapiens
  misc_feature 1, 2, 281, 282, 283, 284, 285, 286, 287, 288: n = A,T,C or G
nnataggggccgaattggtagctccaccgcggtggcggccgaggtacttagtgaaatattcttggtaatatcattcaggtggactttggcatcataatcaaataatttgatttctactaactgttgaagaactttgttagccactttgcttattcattacattttggtgatcttaagcgcacattaattaccctgtctgtttagcatgtcttgctgttcatcttggaattatttgttgtttagggacacttatctagtttccagcagtctgcttttaaccnnnnnnnn

SEQ ID NO: 10111 - DNA, 2682 bp, Homo sapiens
  misc_feature 1, 2, 3, 4, 5, 6, 7, 8, 2682: n = A,T,C or G
nnnnnnnngggccccggagtttcccctggaacaaaaagcgggccgggaaaaacttgccacagggccagtggaaaaccttttgttgccgcccccccgaaaagagtccctgtaatttttttttttttaagtccattacagtgcacatttattgactctgtgtatcttcacagtgtgatcttcaccacagcttgcaaagtgtaaccactcagcaccttctgcttccttctgttcagtttttccactgcaattcttccagcataattttctgatagccagtgtatgactttggctttgacttgtttctacacagtgggtccagtcatttatttctggaacttgatcagtctttttccaggtatataagcaaatctttccacactccaatcctactgcaaccacgtatcgttgagaagggtggagcactgggcagacgctgacagctgtcacagccccacccacgtccaggactgaggagcaggggccaatgttgtgctcaatacagtcatcagtggagtcgcactcaccccagacaaccacctttttgtctcgactcccagtgaagaaatacttgctgtcaggactccaatcacaagaccaaataattctactgtgcacagaagtaattttgttggtgaaggcaaaaagactaaaaactggctcgaactcaggtgagattgtatcctgctttttccacaatgaccaggttcgatctctggaaacagctagtaagaacttctcattaggtgagaaggccatctgcgtgactgtcaaactgtggaaaactaaattctgcacctgtttccaagatgtagtgttccaaagaatgatagctgcatgctctttcttagctgccttacaagctgaggcaagcagagtctttgaactgttacaagtaacacaaaatatttcataaccgtgcccatatagtttttgaacttcaggccacaaagtattctgcagaagatgatcctcagtgggaggctcagtaagtatggagggctgaaaggccacctgctgatactcaaaaccagtactagttaacagctcctcttcatcagaaggctgagaagctatatctccctgaaagacagctttatttgataatcccaatgcagggacagtggctccttctggaagatcactatcttgattacagagcacatgattcagtgattgtcctgtaatggcacaaaaattttccacaaaattccgaggtgcagaaaaaacccgaagaactttttcatctgctccagatacaaactgaaaccgattaatcattgccaaacatttcaggtcatacccatgtatctgaggccttgcaatttcatgccaagtcacctgtgattggtcttttctcttccatggagcaaaaagtctagttgtctgatcagtaccaacagtgataataaattctccttctggatcccagactaggtcttggacaccatcaaagtgtcctgaaatgacaatctctggagtccactctcttgggttaactgtattctgtttccaaaggtgcaacgctccgtggaaagcatgagcaatgatcatggagccatcttcattgaactggcaatcataaaatcccaaagtattcccacctacttcacctactcgaacctgttctagccaaactcctgactcttcatctggagcccagagaatcatggttttatccatggaagcagataataatctcactggctgctgtaggacaccatctttgtaaaacacaggttgccagtgaactgcatttacccagttttcatgaccggctagcactgtctccagagtaacagcaaatgctattttaacactttcattttctatggtaaaagtattttctttcagtcttatgttatcgtcatcctgagtttctaaagatgttgactttatatacagcttccatattcttatcaggcaatcttgtgaacagcttgctaggaaaagatctctaccaaaggctgcccattccactcctctaatccaatcctcatgtccacagagagaaagcactttctgaaactgatcattttgttgagcaaatatgtgaattctgcaatcatcattgccacatgctaatattggtacatcagtatttggcaaaaaagataagcagagagccaaagcaaatccatttccaaagtttaaagtctgaaggcacattacttctggaccctttttagaccagagtcgaacagcagaatctgcagctgcagaaacgatcagtgtacataatgcaggatctgatgtcctcctctggtaaacagcatgcaccgcataaacaggtccttcatggccttgaagatgcactgcttttaaaagctgattatcctctatttcccagtgaatcacttgattatcagatcctccagaaactaattcagtagaaggggagccatcctgtttacaaatccactgtatgcaattgactcgggcggtgtgaccattcaagttggtaacaacaacccttttcagggggtcatagagcaccacggagcaggacgtgccaaaggccagaagtcctctgggcccagagctccagttcaggactccccgcacccggtttgggcagcaaaacacgtgagaagtctccagcacgggtgccaccatgtcgccaactggtccggacgccaaacaagagagccccttctgtcgtcttctcgcagccgtacggacgcn

SEQ ID NO: 10112 - DNA, 391 bp, Homo sapiens
  misc_feature 391: n = A,T,C or G
acgcgggggacatttcttttccaacacaagtgaggtgaacagccagccaatcctgagtatttgaaaaaatgtatctgcagcaggttatgatcagggagctgtattttcaagtagtaacagcactgcgaagagcaagcaatgaaaggccagcattctaattggaaagaaagaagaggaaatttccctctgcaagggggctaatttgccaactggtgatattgttcagttcaagggaatgaagaattcagaataattttggtaaatggattccaatatggggaataagaataagctgaacagttgacctgctttgaagaaacatactgtccatttgtctaaaataatctataacaaccaaaccaatcaaaatgaattcaacattattttcccn

SEQ ID NO: 10113 - DNA, 652 bp, Homo sapiens
  misc_feature 1, 12, 652: n = A,T,C or G
natagggcgtantggagcacatcgcggtggcggccgcccgggcttgtacttccttcttttttatgactaaattttactctattgtatggacatgacacattttgtttaaattgtataggtatgccatactttaagtttgttccataaatcacttcattaacatttgggttgcttccactttttggttaattaattaattaatttatttatttattttgagatggagtctcgaaaaaaaaaaaaaaagaatgtgtatctacccgcagttgtcaggcgcagtatccatatatgtcatttaggtcaagtttgttgtttttcaactcttctgtatttttactgacttttttggtctagttgtttaatcattcactgagacaggtgtgttaaatctctcattggggtgatgatttatctagttcccattttaattctgtcccatttgatttacatattttaagcctatgttattaagtatatatttcttcctggaaacttagtctttactaggaaatgtctctctctcttcttttttgagacagagtctcgctctatcaccaggctggagtgcagtggcgccatctcggctcactgcaacctccgcctgggtgacagagcaagactcagaaaaaaaaaaaaaaaaagagaaccaagn

SEQ ID NO: 10114 - DNA, 2607 bp, Homo sapiens
gctgaatatgtcgtatatacatatatataatattttattttaaaatgtcattgaacatatacatttctttagctttttccaggggacattacacctaagtttcaaaacacacaaaatagatcccctttactaaacagttttcattttggggtcacaaaaaagtcaatgtttcacaatcacaaagcataaaggtacatggttctgaaacaatttccaggcagatttctctcattcactatactagggtagttttggaaacccagaccatgatccattccttacaaatgatctccaccatgggcctccctgggtctccagaaaaaaaacaaagaaaactgggggcaaaacaggagtaaaataataacctcaggactcaggaaacaaacacaaaatacttgtgggagatcagaaaagtagaggacacaggttctccttcaagtacatcacagtagaaaactacagcacatttacagccttatttggtcactgtctacctggttgctacatgaacaaaacttcacctaagacacagaagaaaaattaaagctatttacacagataacactgtggattcgaaagagcagtcctctgcagaccggcactccatctgacaaaagccacagtgctcacagaagaggcaagtcagtctgctcgcgtagcgtcctttgaaaaatcccagtgtacaaacatgtgccacgtcaccacacaaaaccaaagtctgctcagagaggtgggctatggtgtgcaggctgcaacctttctctgcaattgttaagtcttcaaaaatctgagttcctcacataaaattctgtgctgtggccagagctcgttttaccattttcttagattggatcacttttaggatcagcttcgttgttctttgcgtagacaatgactctcacagctttctccaagtgtcccagaagcactaaattactgaaaatagaatctcatcaaagcttaacatattcactctgaaaacagcggagctgctgggtcgcttaaggaaagctgagaacctcaaacctgtggaaggaaaaccagtgaccacttgtggccttataaagttgattggcaggtgaggaaggggatctcaagaggagaatccgaatttcaaagacatgggagatttgtccctaatgttttcatactagtgctcttgttaaatggaaaacccttcctgaatggggaagatctgaggctaaatctggatcctgggactctcattcttgcccaccaccatctccctgtggctgtcattcttccctggaagtgaatgaatactgagaacacagtaagaggagggtggtcacagctgacttcacaaagcctcatggaggttaagttgttcaagaatttaaaaagtaaacaccccaaatcctccaaaatggaatactgtggaaaataactgaaatttccactgcttaaggcttcatcctattaagacagctgagtacttggcctggcccgattttcacctttccttttacacctcaagaacagcagataggtatgcataaccacagcagaacacaccctccacctctctgactgctgacactggctacaggaataaggctttggttatcatctagcaaaatgccacagagcatggacggactgagtttgttctaaggaaaggagtttcaccagatagtctgaagaggcccagcccagcaaagagatttagagcaggaaagcctttcattaaagtagccacacacccctcgagacaaccataaagacttgactaggaaatcaaaaggtttttattaaacaagacttcctctgaggctattcgagcaagcagatttggctataagtcagatacgcaagatttctgaaccatgtataaatacgttctgcagaatttcgaagtgtgcgtcctttgacttttccagggatgcaccaggggccaacccgttatgtagacacggttactgttttaggactgggtgacatggggcctgggtaaaaaaataaggccaaaactgagtaagctcaatttatagagcaatatcagtgctggacagatctgccatgcttcgtttaaattcatgtttcctacttttgatttcttcatcttatttatagtcttcctcccatcccctgaacacaaacttgactttatcttctaactaagattctttccactcaagggggcgtaggaaaacaattcctggatgcctttctaactaaaaccagcaggactaagtgctcaagattttataatatttcgatttagaggtttctagagttattcctgagacgtgccatagcagtaaatgaattggtgaattgagtagaaggtagttgtgacatctacacccaaattcttactctggtggcttgaataaaactggagaagctcaaggtagggcccagatagaggcccaggaaagcaaataaatgaaagacggtgggacacaggaaggatcccaaagacggcagctcagggtcctccacggaagacttgctcaggtttcctacttacacatgactctgagcgccagggcagaacagggagtggaccacactgctgtcacatgcccgaaggttttcctacagcatcagactctgccacgaagcaaagcattttccacaaac

SEQ ID NO: 10115 - DNA, 215 bp, Homo sapiens
  misc_feature 1, 2, 3: n = A,T,C or G
nnncgaattggagctccccgcggtggcggccgcccgggcaggtacaaacatccacaccagaagagcaagacttagaaatggcatcagagggagagcaaaagaggcttgaagaatatgaaaataaccagccacagggagagaatgggtcataaaatcaacccaactggctatcaagagaattataccttgcagaatggcacctttggtattagcgt

SEQ ID NO: 10116 - DNA, 1240 bp, Homo sapiens
gggaactctggagtatgagtaaggaaatgcttctcaccttctctgctccaaagagatatctgttacatcagggaacaagtcctctaggtcaggcacttcctcctgaccagtgcaacgggcactccaggttagaagctgtgtgtgctccctctctgtcagttacttgtctaagggctcctatccgtggtcatcagctctctggccatgagttctgtttgtgcttattgcagcagcatcttcacaacaaacaggtcagtaatcaacctgggaagggaaaagacgacagtaaatattaccccctgtagagccgggaggcatttacacctggaatggccttcttaactgatttctgcctggccccctcacccccagccaagtctgaacctgagcaataccaggcacagagaggtgtctacttgtaactccaacacttgacaaaaaacaaaactgaagctgtgattggtttaggcagcaagtggccaggtgcaacttgtttgtttttatttttgttttccccaacagtactgagatcacttgcacttttcctcatttcttaagaaaatccagtttgcttgccatgacttgtttagcgttaggtttacaaagcttgttgttgaatgttgaatatttgtccaaaggagtttgacaaaatagaagctgcttggtccctgttctgcctgctaggtcataaggatgaaggccatgtggctggggtacttatgtcaagtccagaatggggcagtgtccctctcctacctctctgcggagacgcaattgaaggtcaagtagactcagtgtagggcaggcagctgtcatgctgcaaagaagtttagaggagtctttgggttggggaggtgacaggtaggtaggacaggatctcttaagatgggaaagatactggggagaggagggctgcttggtcccagggaactgcagtgaggtggaactgagctccgctcctgaatctccaaaggagcccatgctgcccggcttccctgagtcattttttccagcatcctgtcagatccctcaatgtactgatttcccccttgtgttaactataccgatattatttttttagcaattgaaatgcacttttttatttcaactcaatcatgattttaagtataaaaaatttatagattgttaaaactacttttttggtgtatttttaaccactcaatgtagcattgtatattttattcctgtgagactctggtacaggtgtgccgcctaatga

SEQ ID NO: 10117 - DNA, 1184 bp, Homo sapiens
  misc_feature 1182, 1183, 1184: n = A,T,C or G
acttctttgcagtatacaaggactagcagttaatattgacccaatcttatatacgtggctcatctatcagcctcagaaacgaacgagtagacatatgcaacagcagcctgtggtagctgttcctcttgttatgccagtttgtagaaggaaagaggatgaggtgtctattggaagtgcccccttggcaaagcagcaatcatatcaggcctctgaatatgccagcagccctgtaaaaacaaaaacggtaacagaatcccgcccattgtcagttcctgttaaagccatgttgaatatatctgaaagctgtagaagtcctgaagaaagaatgaaggaatttattggaattgttgggaatgcagtgaagcatctcacactacagcttgaagtacaatcttgttgtgtgtttattccaaatgatagcctgccttccccaagtacaattggatctggtgacattcctggaacaataagaagttggtaccatggacaaaccagcatgccgggaacacttgtcctctgtgtgcctcaaataaagattattagtgctgggcacaagtatatggtacctctgcaggagattccatttgttatcccacgacccatccttgaagaaggtgatgcttttccttggacgatcagcttgcataatttcagcgtatatacccttcttggaaaacaagtgacactttgcctagtggaacctatgggttgcacctccactctagctgtcacgtctcaaaaactgcttgctacgggacctgatacacgacattcatttgttgtctgtctccatgttgacctagagtcactagagataaaatgctctaatccccaggtccagctcttctatgaactaactgatatcatgaataaggtctggaacaagattcagaagagaggcaatctcaacctatctccaacctctccagagaccatggcagggcctgttcctacttctccagttagaagcagtataggcacagctcctccagataccagcacatgcagcccatctgctgacattgggactactactgagggagattctatacaagcaggtgaggaatcaccattctcagattctgtgaccttggaacaaactacaagtaatattggaggaaccaggggacgtgttagtttatggatgcagttgggtgctttccaaaattactataaagctcnnn

SEQ ID NO: 10118 - DNA, 584 bp, Homo sapiens
  misc_feature 579, 580, 581, 582, 583, 584: n = A,T,C or G
actttttttttttttttttttttcaggtctccaggaaagatagttaaggctatgctagtgtaagtctttatggcttgcatggaaccaggcaggctactgctttctgctgtgtggcctggatccttttgttgtagaataaataactgcaataggaaagaaacacatatataattttattctccattcacagccctttgggttatagtcttttcccatatagcagatactatactaaaaaaaattggggtggaggaatcttcactgacatcacaaggtgatttttgaatccgacttttacagtctgaaattcagacttcctgccctactgcaatgggagtaaaaaccacctgaacctctttttggcagcttcttctcttactcccaaatggcaacaagtgttatctctttgattgagctcttggtccatgcagtctaattaccaattcagaacagtgggggaacttcttattttacacaactggcaactgagtacagatttccactactgcagtagttagaagagagtagttggggttgaaattaaaagtcttaaagttaacagaagttcatgttctggcnnnnnn

SEQ ID NO: 10119 - DNA, 1077 bp, Homo sapiens
  misc_feature 1, 2, 3, 4, 5, 6, 1067, 1068, 1069, 1070, 1071, 1072, 1073,1074, 1075, 1076, 1077: n = A,T,C or G
nnnnnngatgctctatatgttaagtagtaggagaaagatattaaaaagatgtctgtccccagtaaatttctaatctagcaatcgaggcaagtgaaagaaatactaggaaaccaccaggtaatgcatctgcaaaagctaaaatgacattgcacctactgtggcagctaagagggattaggagaggaaagacacacgctttgatataggattatcaaattttctttcttgggaattttcttgacaggcttcatggaaaggcagggcataaggtgggctttggtagagagcaaatttgtgagtttcaggaaacagtatttcagctgggtaacaagagcccagactcatggaaatggctgaaagtgttgctctgaaagggaagagaagggaagcagggatccttctgcccatgcctagagacctggcttatccttgcatgagtgcaggcacatggtgaaccactcagtgtgacttcacggtcaagcaagagagtgccttcaggtgggatttgcttcactctgacattaccagcagtacaggctgatgtcagtgtccctgtgcataaggttccttgtgacaccattacagagtcctaagcctccattagtcacttgaggcacttctaagtacaacagttttttaaaagatttcactgacatttgcaacaatttttttctaatttcttttggtgccattttagtaacttaacaattgctttaatagacaaaactcaatcatgcatgatcaatcacaggtgagaaaatagaggcgtgcttactaatggcagcaaaaggcttctgtgggggtgtgcgggatggaacagctagctagctagaaaggggcttctttatagagggactccagtgtcaggcaggggcactgaaatctaggggtcaccaagggccacagcacaggggactgagggagaatccagtggctggaactctcctcaccagtcacctgccttcattgttaaacctcacagtattttcaggccaccatgccacaaaggaaaatgtactgggtagaggcaggaggcccgcgttaattaattctagaagacttccgannnnnnnnnnn

SEQ ID NO: 10120 - DNA, 2144 bp, Homo sapiens
  misc_feature 1, 2142, 2143, 2144: n = A,T,C or G
nccgctgtcgctttgttacactgccggggatttccgtgtggcccgccccccagtggatcggtgcccccccgcccattgttacttacccgttaggggccatttactcccggggagaggtctgattcaatggtgagcaaattgttgtgtcccagcgggcccattggcccatctcgagtcacgcaacgtggcctcctgggttcaagccatctccgctcagtctcccaagtacctggatccacaggcacccccgacacactcagcctgatttttttatctttagtagagacggggttcaccatgttggccacgctggtctcgaactcctgacctcaggtgatctgcccgcctcggcctcccaaagtgctgggattacaggtgtgagccaccgtgcctggcggaactaagattaaagcaaagaccacgatcaattacttaacaagaacaccacattttgatgctctctgtagggtcatttttttttgtcaggaaaatatctgatctgattcttcccagcttgcttcccctacaacttaataagcccttcactaacccctgtatgtattaactgcaattgcctagcccggcatttacactctcaaaagatttaacgcaattacaatcaaaaaacacttgtcatatataacactttttcacatggaaataaattggtggtttaaggtttacaattcctttgaataaaatttcagttattagttacaaaatgctaagacagattgaggtctcaaagaaagaacttgagaaaattatgttttaaaggacttcacaaatatgaagcataattgttagaatcctgatacaaagtaacttttcctaggtttaaggttcaagtctgaattcttgaattgtccagcatcaacgagacctcatttatattctttttattttatcattactttcagatacagggtctctcactattttgcccaggttggactgctgggctcaatggatcctccccgcctcagcctcctgagtggctgggattacaggcatgcaccacgcccagtgctacaattttttttttaaaaaagcccggaaacacaatgggcttgcatcgtgttggcagcaggtgcctctcagctggtgctggacagaaggggcttgcagtatttgcactgaatccaaacccggtacattgtcagttgctttcctcggttcacctgcagtcggcgatccaccaggttctgaactttttccagtccagcagtggtgaaaagcgtgtccagttcctcttgtgtgaagaagtaaactctggttccatcacctctcacgtagaaatttccagatagacactgaccttttttaaaccgaagctgagccatgtcatagcggccgtaatctcgcagaagcatcatcccgccaggtttcagaagcctgctcagcctgttgatagccttctgcatcttgtctggaacaattgctgaaagaacaaatatgagaatgataatatcaagactgcccttgggcactgggtaactcttctcttcatcacacaggtcgtgaacaaaggcaaaacaccgagaaggatcatattctgaatttgtctggaccagttctatagctgtggaagaaaaatcacagcaataaacaaagagtcctgggtcattgttcgtttgtaaaattggaaagactgtgtttcccacaccacagccaacctccagtattcggtaggtggctgaggatccaggaaactcatcagcacaaatttccaggtcactaattttctgagttacattctcctccacaggaggtgtctgtgttttatgttcaaggctcttcgaagaacacttgtgctgttcttccattattaaaccaggtccatcctcattgtttctacattcacatacttcactcttgttctccaagaaccaatccttcaaatgattttgattttggctaggtgccagctcagggaattcggtaaaaagccaatgtctatccttgaaaaacccattttcgtggattttgtagaagtcattccagtatttgtgggcattgatctcataatcaacaggcattgtggtggaagacccgcgccggatcgctcaggaaccggcttccgaactgctgcctcttatcggcgaggattgcaggtgcaccttcagggtaggagccggccannn

SEQ ID NO: 10121 - DNA, 493 bp, Homo sapiens
gcgtccgtgaatttagatgttttaacagtggtcaccttatttatgtttgctttttcacttcaggtaccccaatctgaagtcagtaaatgaactaatctacaagcgtggttatggcaaaatcaataagaagcgaattgctttgacagataacgctttgattgctcgatctcttggtaggttctatttgggggaaaatttggtattagaccatgcgataatttcttaccctcttgtggctgtacatttctcactattgtgaatcttcatgtgttccctatgattcttgatttagcttaaaagaaaacgtaagacatggtttcattagcttgaaccttatctttgtaaagccatgcatttaccttgattattcctggttatgtttttatctcacagcctattcaaaaagattttgaataattatttcaaaactttttgcaactttaataatcttaaataaccttaacatatttaggtaaatacggcatcatctgca

SEQ ID NO: 10122 - DNA, 1612 bp, Homo sapiens
  misc_feature 1, 2, 3, 1602, 1603, 1604, 1605, 1606, 1607, 1608, 1609,1610, 1611, 1612: n = A,T,C or G
nnncagtggtatcaacccagagtggccattacgccggggacagtgacagcttcctttctcggaaacgcggcgcggcggctgccggaaagtgatctcacttgaccttcgctctcagtttccaaggggcaggcattccgaggactttaatgtaaaagaggaggctaatgctgctgctgaagagatccgttatacccacattctcaatcgggtactccctccagacatccgtatattggcctgggcccctgtagaaccaagcttcagtgctaggttcagctgccttgagcggacttaccgctattttttccctcgtgctgatttagatattgtaaccatggattatgcagctcagaagtatgttggcacccatgatttcaggaacttgtgtaaaatggatgtagccaacggtgtgattaattttcagaggactattctatctgctcaagtacagctagtgggccagagcccaggtgaggggagatggcaagaacctttccagttatgtcagtttgaagtgactggccaggcattcctttatcatcaagtccgatgtatgatggctatcctctttctgattggccaaggaatggagaagccagagattattgatgagctgctgaatatagagaaaaatccccaaaagcctcaatatagtatggctgtagaatttcctctagtcttatatgactgtaagtttgaaaatgtcaagtggatctatgaccaggaggctcaggagttcaatattacccacctacaacaactgtgggctaatcatgctgtcaaaactcacatgttgtatagtatgctacaaggactggacactgttccagtaccctgtggaataggaccaaagatggatggaatgacagaatggggaaatgttaagccctctgtcataaagcagaccagtgcctttgtagaaggagtgaagatgcgcacatataagcccctcatggaccgtcctaaatgccaaggactggaatcccggatccagcattttgtacgtaggggacgaattgagcacccacatttattccatgaggaagaaacaaaagccaaaagggactgtaatgacacactagaggaagacaatactaatttggagacaccaacgaagagggtctgtgttgacacagaaattaaaagcatcatttaaccatagacaatttgccaggatctaggaaccacctaatggtaggtggacagaaaaggaaaaaaaaaaaaatttacttgcaagtactaggagtagcggtcttaaagaagaatgccaagaatatagcctatatagaagatggcgtatcaacattcaagagtctataccgggcgccaaggggtactggctatagaccatacggaagtgtttactacacggagacaggtcggtttttaaactcagcgacctgtctggttaaagaaaacaccgcgccttttgtggcgaagaataggacaggcgagttatcgaccctatagtaatgcactatctagtcgctactcgagtcgagcgaaggtacacaacgatacgactcctagatcctgatcctatttgcgtcgacgctgttcgtcgtacgcagtgtaagagcatcgacgagaacgtcaatagannnnnnnnnnn

SEQ ID NO: 10123 - DNA, 2914 bp, Homo sapiens
  misc_feature 169, 171, 325, 363, 387: n = A,T,C or G
accaaaggcaagctcttccttggcaaacaatcggctgagttccagacccagggatcactaatgcagaagcaagcatccaaactctgtttgcaaaggcttgtctagattacactgagagcattttaaagagtcattgccggctcgttcggcaagataggtactgacgggnanctggtctcaagggggttggtttgcagcttcacaagtagaggatgccaagctgccaagagcccatgaagacggtgaattgatgaaataagttacagcttggactgggcaaaactaagggtgaaggtggcttcgggggtcgtggtgaaggcagagncgctttgaaggacgaggtggtggtagagaaggccgagnaggatttggtggcagaggccgggnaggctttggagggcgaggaagcttccgaggaggaagggaatgtgaccaggtctaggtctggagtttcagcttggacactgagccaagcagacaagcaaagcaagccaggacacaccatcctgccccaggcccagcttctctcctgccttccaacgccatggggagcaatctcagcccccaactctgcctgatgccctttatcttgggcctcttgtctggaggtgtgaccaccactccatggtctttggcccggccccagggatcctgctctctggagggggtagagatcaaaggcggctccttccgacttctccaagagggccaggcactggagtacgtgtgtccttctggcttctacccgtaccctgtgcagacacgtacctgcagatctacggggtcctggagcaccctgaagactcaagaccaaaagactgtcaggaaggcagagtgcagagcaatccactgtccaagaccacacgacttcgagaacggggaatactggccccggtctccctactacaatgtgagtgatgagatctctttccactgctatgacggttacactctccggggctctgccaatcgcacctgccaagtgaatggccgatggagtgggcagacagcgatctgtgacaacggagcggggtactgctccaacccgggcatccccattggcacaaggaaggtgggcagccagtaccgccttgaagacagcgtcacctaccactgcagccgggggcttaccctgcgtggctcccagcggcgaacgtgtcaggaaggtggctcttggagcgggacggagccttcctgccaagactccttcatgtacgacacccctcaagaggtggccgaagctttcctgtcttccctgacagagaccatagaaggagtcgatgctgaggatgggcacggcccaggggaacaacagaagcggaagatcgtcctggacccttcaggctccatgaacatctacctggtgctagatggatcagacagcattggggccagcaacttcacaggagccaaaaagtgtctagtcaacttaattgagaaggtggcaagttatggtgtgaagccaagatatggtctagtgacatatgccacataccccaaaatttgggtcaaagtgtctgaagcagacagcagtaatgcagactgggtcacgaagcagctcaatgaaatcaattatgaagaccacaagttgaagtcagggactaacaccaagaaggccctccaggcagtgtacagcatgatgagctggccagatgacgtccctcctgaaggctggaaccgcacccgccatgtcatcatcctcatgactgatggattgcacaacatgggcggggacccaattactgtcattgatgagatccgggacttgctatacattggcaaggatcgcaaaaacccaagggaggattatctggatgtctatgtgtttggggtcgggcctttggtgaaccaagtgaacatcaatgctttggcttccaagaaagacaatgagcaacatgtgttcaaagtcaaggatatggaaaacctggaagatgttttctaccaaatgatcgatgaaagccagtctctgagtctctgtggcatggtttgggaacacaggaagggtaccgattaccacaagcaaccatggcaggccaagatctcagtcattcgcccttcaaagggacacgagagctgtatgggggctgtggtgtctgagtactttgtgctgacagcagcacattgtttcactgtggatgacaaggaacactcaatcaaggtcagcgtaggaggggagaagcgggacctggagatagaagtagtcctatttcaccccaactacaacattaatgggaaaaaagaagcaggaattcctgaattttatgactatgacgttgccctgatcaagctcaagaataagctgaaatatggccagactatcaggcccatttgtctcccctgcaccgagggaacaactcgagctttgaggcttcctccaactaccacttgccagcaacaaaaggaagagctgctccctgcacaggatatcaaagctctgtttgtgtctgaggaggagaaaaagctgactcggaaggaggtctacatcaagaatggggataagaaaggcagctgtgagagagatgctcaatatgccccaggctatgacaaagtcaaggacatctcagaggtggtcacccctcggttcctttgtactggaggagtgagtccctatgctgaccccaatacttgcagaggtgattctggcggccccttgatagttcacaagagaagtcgtttcattcaagttggtgtaatcagctggggagtagtggatgtctgcaaaaaccagaagcggcaaaagcaggtacctgctcacgcccgagactttcacatcaacctctttcaagtgctgccctggctgaaggagaaactccaagatgaggatttgggttttctataaggggtttcctgctggacaggggcgtgggattgaattaaaacagctgcgacaacaaaaaaaaaaaaaaaagtacct

SEQ ID NO: 10124 - DNA, 332 bp, Homo sapiens
acttaatgaggctgtattaaggagagtaacaagttctaattcttgacccatcaaattcttaaggtgaagctgaggaccaggaagagaaagaagatgctgagaaagaaaacattgaaaaagatgaagatgatgtagatcaggaacttgcgaacatagaccctacgtggatagaatcacctaaaaccaatggccatattgagaatggcccattctcactggagcagcaactggacgatgaagatgatgatgaagaagactgcccaaatcctgaggaatataatcttgatgagccaaatgcagaaagtgattacacatatagcagctcctatgaa

SEQ ID NO: 10125 - DNA, 878 bp, Homo sapiens
  misc_feature 876, 877, 878: n = A,T,C or G
ctactatagggcgaattggagctcaccgcggtggcggccgccgggcaggtacgcgggggagtcccctcgccagattccctccgtcgccgccaagatgatgtgcggggcgccctccgccacgcagccggcaccgcgagacccagcacatcgccgaccaggtgaggtcccagcttgaagagaaagaaaacaagaagttccctgtgtttaaggccgtgtcattcaagagccaggtggtcgcggggacaaactacttcatcaaggtgcacgtcggcgacgaggacttcgtacacctgcgagtgtcccactctctccctcatgaaaacaagccctggaccttatctaactaccagaccaaaaaaagccaagcatgatgagctgacctattttctgatcctgacttgtggacaaggcccttcagccagaagatgacaaagtcatcctccgtctaccagagcgtgcactgtgtgatcctaaaataagcttcatctccgggtgtgcccctgtgggggtggaacggggcaggattctgcagctgctttggcactttctcttcctaaattccatggtgtggtttctttccttcccaataggtgaccttaattacttgcagacatattttgcaacaatagatatattttgagaatccctaagaaagaaaaagaaagacgagagaaaaattgtgtggcggcctcgcgctagaaaagtttttagacattggtgtgggcggggggccaggaggggagtgacactgtcctagcgcggtccagagaaactcgggcagaacagggtcggggtttcaccataaaaagcgcggcgcaaccggggttggacaacacagggggctggggataggtctacgggccggctacagagacnnn

SEQ ID NO: 10126 - DNA, 921 bp, Homo sapiens
  misc_feature 1, 2, 921: n = A,T,C or G
nncacaggggtgctcacctagagaaattgtttcaacccgctgtactaaagcttcggtgagaagataaaagattagctgggcatccatctacttcataaacaacatcaaaaatttgcttttgagcttctgtttttctcttatcctcattaatatgcgtcattacttccttcagtgatccaatagctttttctaaagtgcttttgtctggattttcatcagctgtatgcttcttaagatcatttaaaagtaatgcaacactgggtaacctctgtactggtcggataagaagttcaacaaggctctgccgtccacattctggttttgcttggtttatcttgagaaaagcatgaaatcttggtttctgtttttcacatttaataattgtttccttgctcatttcaaagaagtttacaaagggagggtaggtttttaccaaatcttttgaatatttcagaaaaatgtcaccaatgcttttgctctcatcccaattaactataaggtcttcaagatcatcctttatcttagtgtgtacatcaaagatatctgggatgctaccaaaaatagtcttaatctcctctggtgcaaggataggtccaccacgttgtccttcctcttccaatggtacttgaaataactgaataattgttgccaatatattaacataattactttcagtttgataaagctcttttgcaacttgccaccttgctgactgctttgaaggaactggagtggagcttttagaagacttagtacaagactttggggtgtctccatagttaatgctagactctggtgtgttggagatatctaggagtgaccctatggaaagggaatgctcagctgatgggcgcttacggggtggaaatggtgacacgtctgtctctcttgaaagctgagcaagtgtttcttttaaacgan

SEQ ID NO: 10127 - DNA, 2636 bp, Homo sapiens
  misc_feature 1, 2635, 2636: n = A,T,C or G
ncgcgtccggtgactgtgaagtctccagttttgccttctgggcatcatttacagattccagcccatgctgaagtgaaatctgtaccagcgtcatcattgcctccttcagtgcagcaaaagatacttgcaactgccaccaccagtacctcaggaatggttgaggcctcccaaatgccaaccgttatttatgtatctcctgtaaatacagtgaaaaatgtagttaccaagaactttcaaaacatttacccaaaacctgttacagaaatagcaaagccagtaatactaaataccacacaaattccaaagaatgttgctacagagacacaattgaaaggtggtcagcattctcaagctgctccagtgaaatggattttccaagataatctacagccttttacgccatctcttgttcctgttaagtcttcaaataatgtggcttcaaagattttaaaaacttttgtagataggaaaaatttgggagataatactataaatatgccaccattgagtaccatcgatcctagtgggacgcgatccaaaaatatgcctattaaagataatgctttggttatgtttaatgggaaagtctatctgttggctaaaaaggggacagatgttctgccatcacaaattgaccaacagaattctgtttctcctgatactccagtaagaaaagacacgttacagacagtgagttcaagtccagtcacagaaatatccagagaggttgtaaatattgttttggctaaaagtaaatcttcccagatggagacaaaatcactttccaatacccagcttgcttccatggccaatctaagggcagagaagaataaagtggagaaaccatctccttctaccacaaatccacatatgaaccaatccagtaactacttaaaacagagtaagactttattcacaaatccaatctttccagttggatttagtacaggacacaatgcccccagaaaagtaacagccgtcatttatgctagaaaaggaagtgtcctccagagcatagagaaaataagttcctctgttgatgcaacaactgttacttcacaacagtgtgttttcagagaccaagaaccaaagatccataatgagatggcatcaacatcagataaaggtgcccaaggaagaaatgacaagaaagattctcaaggaagaagtaataaggcattacatctgaagagtgatgctgaatttaaaaagatatttggccttactaaggatttgagagtgtgccttactcgaattcctgaccatttgacctctggagaaggtttcgattcctttagcagtttggtaaagagtggtacttacaaagagacagagtttatggtgaaggaaggagagagaaaacagcagaattttgataagaaaagaaaagcaaaaactaataagaagatggatcacataaagaagagaaaaacagagaatgcttataacgcaatcataaatggggaagctaatgtcaccggttcccaactcctaagcagtattttaccaacttcagatgtgtcacaacataacattctcacgagtcacagcaaaaccagacaagaaaagagaactgagatggaatactatacccatgagaagcaagagaaaggcactttgaattcaaatgcagcttatgaacaaagtcatttcttcaataaaaattataccgaagatattttcccagtgacaccaccggagttagaagaaaccattcgagatgaaaaaataagaagacttaagcaggtgctgagagagaaagaagcagctcttgaagaaatgcgtaagaagatgcaccaaaaataaaatctcctgtaaagacttcagtgaaatagctgttttttaaaatatacttcagcattaataagttaattgtaggtgtgttctgaaagtgtctttgaatatgaagcttgttttttcatcagtcgattgtacaactttaaggaatacagaaaaggttgattcacatatgacttgtgaataatttacatggggtatctatacctttgtcttagatacctttttttggaaggataaattttatatttttctattattttaactagaattctccaagtttgaatatttgggcagggtttttgttattgtttgtatctttacctaaattgctcaggcattattccagcagtagatagtgactgtgtattactgaaattttacaattcaagagaggaaatcagctccaaacttagcttttccagtggatttgtatatgtacttgctttatctctttacccttaaaatgatgataccttgtattcaccattgttttttttaatgtcgtgaaataatatgtattatggcaacattatttaaacattcaaacatttctcaagaatgagcaacatttgtaactttacaatgtaattttatataatccaaaggtattttagaaatcaggccactgagaaaggagtagtaaataaagagaatacccaaccaaagagtacataaacaagggagaaagaaagacacaaagagaagaatgaaagaaagaaactaagacaacgatatgtatataatgaagacaaatattagataatataataaaagaagaggaagaccagaacaaaatgaatgataataccaaaataaatgagtgacaacgacatann

SEQ ID NO: 10128 - DNA, 172 bp, Homo sapiens
  misc_feature 1, 2, 3, 4, 171, 172: n = A,T,C or G
nnnnggagacccccgcggtggcggccgaggtacaaagtgtctttatgtcctgtgtttaaccccttaacatacagaacctaattttactgcattttaatgttaattctccactcgaaggtgaacatgggatgtttgtaacacatattgttgcttatcaagcacacatatgann

SEQ ID NO: 10129 - DNA, 619 bp, Homo sapiens
  misc_feature 1, 2, 3, 4, 501, 617, 618, 619: n = A,T,C or G
nnnnacactttgcctgctccagccctggaatcagccattgctgctgtgctatccttgacagaactataacctgaatttaacaaggaggaaatatcaggcaaacacaaatggagtgacattctagtaaacaactgatcagcactctttaaaaatgaaagacaaagaatgactgaggaatgagttcagattaaaagagacgaagggacacgctccaactgtaactgcaacgcatgactgcgggctgcgttctgcattggaaaaaagtgttactgatgaaatttgaatatcgtctctagattgagcaactaagcaataatattgtattaaattgctagattgggcaatagtattgtaataaagttaatttcctgacacagttaaataattgtactgtgtatataagatgtcaaaattgagaagttgcaaggctaaatggaatttctcagttttttaaactcttactttgtacatctgaaattattttaaaataaaacccttcgnaaaaaaaaaaaaaaatgcggccgcaattcgagctcacttggccaattcgccctatagtgagtcgattacaattcactggcccgcgttttaccgtcgtgactgggcccttgcgttannn

SEQ ID NO: 10130 - DNA, 1696 bp, Homo sapiens
gcgtccgaaaggtgcataagttttgtcagtttgtaatgaagtcagcatttttaaactttttgttacaagaatagttttatgtatcatattcttcaaaacaatgtagtcaaataatgaatcggaaaagagcaaagaaccagtacttcatgaaaactaccataacgtaaattccccttctctcccctggatggaagtatcaatttggaagttactaggaaaaggtaagggaactgactgaggacactaggcttaccttttaatttcgaagagtaactggattatttcaggttgctacgatttctgcaaacggagacaaagaaattggcaatatcatctctgatgcaatgaaaaaagttggaagaaagggtgtcatcacagtaaaggcaagtgtgtttgtatttttaaagataattttgagttatcttatgatcaaaagtttgagttatctgatgatcaaaactgaatttttcaaacagaaaaattctgttttaaaaactgctttttttattccttcatatgtagtctcagcacatgtatagaataaagtacttactgtgttttatgtgaattagcctttgctgcatgaaatgaatccatcctaacttaaatgattattcaaataagcacttttgggattttttgcagaagtgtaattggatgtcctgggctgtttcatactctaccctgcatctcttatggccagaggggtctgtttttattaatctggcctgtaattccatgttttgtgttcaatgaaatccatatacctaattctttgacttttcataggatggaaaaacactgaatgatgaattagaaattattgaaggcatgaagtttgatcgaggctatatttctccatactttattaatacatcaaaaggtcagaaatgtgaattccaggatgcctatgttctgttgagtgaaaagaaaatttctagtatccagtccattgtacctgctcttgaaattgccaatgctcaccgtaagcctttggtcataatcgctgaagatgttgatggagaagctctaagtacactcgtcttgaataggctaaaggttggtcttcaggttgtggcagtcaaggctccagggtttggtgacaatagaaagaaccagcttaaagatatggctattgctactggtggtgcagtgtttggagaagagggattgaccctgaatcttaaagacgttcagcctcatgacttaggaaaagttggagaggtcattgtgaccaaagacgatgccatgctcttaaaaggaaaaggtgacaaggctcaaattgaaaaacgtattcaagaaatcattgagcagttagatgtcacaactagtgaatatgaaaaggaaaaactgaatgaacggttgcaaaatttcagatggagtggtgtgcttgaaggtgggtgggacaagtgatgttggaagtgaatgacagaaagacagagttaccagatggccttaatgctacaagagctggtgttgagaagggattgtttgggagggggtagtgccttctttgatgaattcaggcttggatcatgactcaggtatgtgtcaacatggttgaatttttaaaagatcaattcgggatggctggtaaaaccgggtcggctttgatggaaattaaagctcaagggtggagagtggatggtagtggaagattccagtggagttggggggggttaaaggaaacaaaaca

SEQ ID NO: 10131 - DNA, 950 bp, Homo sapiens
  misc_feature 1, 2, 3, 4, 949, 950: n = A,T,C or G
nnnnaaccgcgaggggttttccccagtcccgacggttgtaaaacgccggcccagttgatttgtattacgactccctataggccgaattggggacccgggccctgagtcagtctcgccagctgccggtctttcgggggctccgtaactttctatccgtccgcgtcagcgccttgccaccctcatctccaatatgcctggtccgacccccagtggcactaacgtgggatcctcagggcgctctcccagcaaagcagtggccgcccgggcggcgggatccactgtccggcagaggaaaaatgccagctgtgggacaaggagtgcaggccgcacaacctcggcaggcaccggggggatgtggcgattctacacagaagattcacctgggctcaaagttggccctgttccagtattggttatgagtcttctgttcatcgcttctgtatttatgttgcacatttggggcaagtacactcgttcgtagattcagttacatccatctgtcatctgaagaaggaggaaaaaacccaacatttcttggaccaaaagtatagtgactatctgttcatgagagaaattttctgtaagcttgctgttttacaggggatttatcaataattgattttgaggaatcagtttttttctatggctaataaactttttaattcacttaaaaaaaaaaaaaaaacaaaaaaaaaatttttggggggccggggacctagaaaggtttttaaacacatgtgtgggggcgggggccagtggtaatgtgaccttgccgtacgtgtccaaggaaacctggcatgaaatgggtggtttccaaaaaaaaagcgggggacgggggtctaaaacagcgggttgggctttggcttcaggctcgagtgctcccccttcggcgcggtgtgggtgaaagagagagagatagaaagtaggggaaacaatagtaaaagtgagnn

SEQ ID NO: 10132 - DNA, 1448 bp, Homo sapiens
  misc_feature 1, 2, 3, 4, 5, 6, 1448: n = A,T,C or G
nnnnnnaacggctagtagaggccgggtgtaataagtgcgttgattctcactgctgttattgttttctgacagcatgcctgaaccagctaagtcagctcctgctccgaagaagggttccaagaaggctgtgaccaaggcgcagaagaaggatggcaagaagcgcaagcgcagtcgtaaggagagctactccgtgtatgtgtacaaggtgctaaaacaggttcaccccgatactggcatctcatccaaggccatgggcatcatgaattccttcgttaacgacatcttcgaacgcatcgcaggcgaggcttcccgtctggcccactacaacaagcgctcgaccattacctccagggagatccagaccgccgtgcgtctgctgcttcccggagagctggccaagcacgcagtgtccgaaggtaccaaggctgtcaccaagtatacaagctccaagtaaatgtgtgcttaggtgctttaaaactcaaaggctcttttcagagccactcaagtctcacataaagagctttaatattgaatttcaccgttttctagggaataatttttccgattttgtaatcccagcactttgggaggccgaggcgtgcggatcgagaccagtttggctaacgtggttaaatctcgtttctactaaaaatacaaatattagccgggcgtggggcagtcgcgtgtcatcccagagactcgggaggctgccgcaggagaatcacttaaacccagcaagcaaaggttgcagtgaaaagacatggcgctttggcattctagcctgggcgacaaaggcgaggcttcgtctcaaaaaaaattggatcaggagatactcctgttctgtgttggcacagatccggtaatcctagcactttgggaggtcgatgcatgaggctttcttcagctcaggagttaacagatttgcctgggcaacatagaactcgtctcttgcaaaaaatgaagctaaccagggtgttgacggcttgcgtcctgtactatcatttactcggtaggctgaggtggtaggataagcttaaatctcggggctagagactgcgggaacatgtgattacgctagtgcaatccagcctgggccacacggcaagggtggaaacaagaagcctggaggccctaaagagtccccgggaacaagcttggccttctgagcccctgtggaaattgttgcggacggggacacccagggcctttgcaagcgaaaaaggacactaaacaacgtcgttaccgccacagcgaggggacaaccctaaatccacacttggagacgacagcggaacaagacagagagagacaacacgggaagtgaaaagcgtctaaaaaaaaaacgcacggggggcacacgaacaggacagcgggcgagccaccacgacgcagaagacagccaacgagcaaaaaaaagcgagcgacagcgacatcagatgcaagcacan

SEQ ID NO: 10133 - DNA, 1029 bp, Homo sapiens
  misc_feature 1, 1028, 1029: n = A,T,C or G
nctagacgggtgctagtgctgagcggggctcggagccagggacgtgggggcacgctacctactgagacacaaatggaggtggctaagggagtgctggtactaccccttccccaaccccagggaatgcagctcctgactccaaaagagacccttccttcctcttggggagaggagggagaagagtaaagaggactttgtcttgcattgaagtcctctttgatgagtggggattcctagctcccagaaaccatttttagaaacaccctgggccagaagggaacctgctgccatgaaggaaaggacccagtccttgcggaatacgtcacctgctgactaaagatcccttgggccttgaataaccagcagcaatatccaagtagtataccatgggccttgggtgagactctgagactttctggctccaggtgagacccagcatattgccagctgtggtggctatagtgagagacttcttctgcttgagaaaagctgaaggaaaaataaagcagtatttgccttgtaccttagctactaaattaaccacagttggggagggcaccaagcaggatcttggagtacccagttccaggccttgactcttggatggcatttctggacttgccctgggccagaaggaagctcactgccctgaatggagagttccaggcctggcagcattcaccacaaactgactaaagaggccctgggcctgaagtgaacatcagtggtagtctggcagtattccttatggacctgtggtggtggtggccatagggtgaggctcctctgccagtggaagggggagggaagagtaggaaggactgcatctcgcaagtctaacgttcccagctcagcatgcagtcaacctcgagccttgccggtagatttctaatatttttcactccagtccctggctcctggcaagacccacttggggcatgggggaattcactgccataaagggaaagacaggagtctagctgactttgccacttgctgattgtagagccctggggtctagaacatann

SEQ ID NO: 10134 - DNA, 1230 bp, Homo sapiens
  misc_feature 1, 2, 3, 4, 5, 6, 7, 8, 9, 10, 11, 12, 13, 14, 15, 16, 17,18, 19, 20, 21, 22, 23, 1226, 1227, 1228, 1229, 1230: n = A,T,C or G
nnnnnnnnnnnnnnnnnnnnnnncacagtaacatcaaaatgtttattttttggatatagacatttaaaacattcatctccaagaacagcttcaatcaggtatacaataagaaatagactttaaatcctaatacagaaaaggtaacagaatttttttgaatgctgctgtagacactagtgttagaaaaaaaagtttataaatggttttgcaccaaaaaaatatgcaaagaaacttgaaaatagaaattgtttgccatttgttgctctggttgctgtttaatatagacccagtgactgattgtcttcagcacacatctaatttggccatttactgcatttggctaatgtgatccaaaatgtgatctagatagtgcttttcactggaggattgacaaacacgctacatacattagtgaatcttcataccacctcagtgaggtagcttagaaatattatacagaaattgaggcacaaagaggtaagtgacttgcccaaagttcccaacagcacagtccctggaagaggaggtaactctccacacaggactcatgtgccagaaagctggacagggacaccctcatgtagcatttagtaaatacttagataaagctgtagctgatcctttgagttttcagtaccctaaagtagtaggggaagtcttttgggcaactctcctacccttggctctcaactttcctactgttgttctcttatgaactccttcacctctttgaagactgtagcagccttcaatggggaccagacctctcacctttattctgatctgtcatctatttggtagttttgtttgtttgaggtgtgtccgttggacagacaatggtcaaaagcaacaggattgggaaggtgcctatcagggtagtaactgcttattttctctgatcagtttgttgaggtgtcacctctctcatgcttttccagataatacagaagcaaaaaggaattgcctttaagacaaattcatatttaaatcctaatgctccatacagtgttggtaaatgatttcaaggaatatgtgatcaatgttatttgacttgaaaaaattttctttcctagatgggggatttggagcaccaagggtaaaaggtgcctgccacaagaaaagctcaagagttctcgtgccgaattcctgcagcccgggggatccactagttctagagcggccgccaccgcggtggagctccagcttttgttccctttagtgagggnnnnn

SEQ ID NO: 10135 - DNA, 834 bp, Homo sapiens
  misc_feature 1, 2, 3, 4, 5, 6, 7, 8, 9, 834: n = A,T,C or G
nnnnnnnnngtaacaaacagtaccaatttattttggccgtgggtttttgctttttttccagttgatgactttgtgaacattcccaggtattggagcctctgtggccttaaatgtggctcagtggagggagacccagcatagccccaggccagtatggagcacctcgacgcacagctctcagaagctgcaggcggacgaacatctgaccaaagaggtgtggtcgaggctcccccaggatgtgtacccggttgtagtaggagctgaaatccatgctgagctgtaccaggaacttgcatatcatctctgtgcgtacagcaatgtggagccccggggctgtgcagtccagcactgctgtccggctcagcagatccggaaaggggaggatactcatcatgtagcagtgagaagtccagactgctcacaggaggaaaagtggggtacagaccttgttccatactacacttgtaactctcaaagagtgtggcaagacgggcacaattatacatgacaaaggtgccactctttgtgcccttcgtggagatactgctgtcagccagagccaggaagagctgactctgtggggctgtgctcagcatctcaaacttgatggtggccacagagagaacaccaaagatctctgtccaggctgggtcttgtgccagatccccaccatgcttcagtgctgaggccttgcacacctgggtatgccggaacctgtgtttggaagagaggaaggccagtgggcagggtcctgggtaaagagtcccccctcattaccctggcttaggttggtgttcctcccagcctcactcactcgtagtacctgcccgggcn

SEQ ID NO: 10136 - DNA, 2968 bp, Homo sapiens
  misc_feature 1, 2: n = A,T,C or G
nnagacgacccacgcgtccttaactgtagaatgttaattccgctgcagtgagaggcatgcttccttagaccaggcaacatttcatttgttgcatttccagtttccaataccaactcacctacaaagattttaccaaaaaccttaggaccaataaatgtgaatgttggaccccaaatgattataagcacaccacagagactaaccagttcaggaagtgttctgattgggagtccatatacccctgcaccagcaatggttactcagacacacatagcagaagctactggctgggtccctggtgatagaaaacgggctagaaaatttatagactctgatttttcagaaagtaaacgaagcaaaaaaggagataaaaatgggaaaggcttgagacacttttcaatgaaagtgtgtgagaaagttcaacgaaaaggtacaacatcgtacaatgaagtcgctgatgagctggtgtcagagttcaccaattcaaataaccatttggctgctgattcgggcttatgatcagaagaacattaggcgaagagtttatgatgctttaaatgtgctaatggcaatgaacataatttcaaaggaaaaaaaagaaatcaagtggattggcctgcctaccaattctgctcaggaatgtcagaatctggagatagagaagcagaggcggatagaacggataaagcagaagcgggcccagctgcaagaacttctcctacagcaaatcgctttcaaaaacctggtacagagaaatcgacaaaatgagcagcaaaaccagggcccgccggctctgaactctaccattcagctgccattcataatcatcaatacaagcagaaaaacagtcatagattgcagcatctccagtgacaagtttgagtatcttttcaattttgacaacacctttgagatccatgatgacatagaagtactaaagcggatgggaatgtcgtttggcctggagtcaggcaaatgctctctggaggatctgaaacttgcgaaatccctggtgccaaaggctttagaaggttatatcacagatatctccacaggaccttcttggttaaatcagggactacttctgaactctacccaatcagtttcaaatttagacctgaccactggtgccaccttaccccagtcaagtgtaaaccaagggttatgcttggatgcagaagtggccttagcaactgggcagttcctggccccaaacagtcaccagtccagcagtgcggcctctcactgctccgagtcccgaggcgagaccccctgttcgttcaatgatgaagatgaggaagatgatgaggaggattcctcctccccagaataaagacaagagaaagcctacgtttcaatatgtgatgctcatgtgtgtttgtagtgtgagctcttgtttttgaaatgattgcttcagtctttgcctttgtttgcactgtgtgttcagtgaaaactagagaaacacaataagcaaatcacatgaaggctgagatgattgagatgaaagttaacatagtgtgaatgaaagtctggccaacagagcagtagatgatataacaaagaaagcatgctttctgaggagatagtggggataatccctgaagagttggcagtgtgagtgcaactcatttatcttctgtgaggtgggatttttgtgttcctcacacccatgtaattattcttagaattgagattgctacacggagcagtccttgacgatcgtgtttctgacgtttctcttccttgcctggactgcctttgacaaggcagaaatgaacatgaaaagtccccaggagaggggagctgtgtagtgagggatactgagggcagtcctgtggctgaggggcacagattgaactgctgaactagttggaggtctagatgaggtgctttacgcatcagctgccttagacagcttctagaaaggagcgagcgctacttcttaagtacttaagtgacatttagataatttatagtaaaactgaaattattattagccaatgcattggtgcatagaatttactagggctacttctggaagccaaaatagaatagcatttccatgtgcattaaatactttgccagcactgcctttgccagcatcctaaatctggagttttacaaagaaggaaactgtatctttaggttaatcaaagctatgcatttcatatagctttttcatttaaaacaagacaaagaaacaaattcctatgaccaaattgcttgcctacagttccctgcagtaattgtatgatctcacccagtgtgcaatttgtgaaaatgaaccaaatgtcattacttttgtcttaaagaaaagtctatttcaagaatatggacagcagtgtttccttgtacatgtcaccttttttcacattttcattaatcagaatgaccttattgagcctactcctggggtcaattgcatttcaaactaatccaatatttagtgtttcacagaaacactagaaaacgttgaacactcctactgcctggatatatggtagtgcagttatgttgtttatggctcaagatgtcattagaaatactgcagtggtgtattcacagctgctccttctctgaatgaaagagtgtagggacacctgccaccatggccagaccctgactgaatttcacattaaggctttggaaaggagcaaataataatgggagaattaactccaaaactttgacctgaatcatgtggatttgtcccaagattatgctagatgcaccaagcatggcccaaattggttcttttttaaatcccatgggggaagtgcaggctccttcctgtggtgcctctttatagcctcaccaccatgctaacactgagcatggtgaggaggaggaagctttggctagctaaacatgtttaataaggccataaaaactgagaaagaaaaacattcaactttagctgaagctcctttgatacaaaagtttcattctgtcagaaataagccatagt

SEQ ID NO: 10137 - DNA, 1414 bp, Homo sapiens
  misc_feature 1413, 1414: n = A,T,C or G
tataaagaaacataacgagataaggaacgacgcaggcgaaaccacaaggggcccgccgggcccgcccttttgtgcaccaatggtgggcccccctacccccggccccaccagtgaggaaaatcccgcccgggcccacaatgcaaagaacccgggccgtgtctcctgaaaggataccccaatgcggattggagggcaattgggagacatcgaccccaatggaaatatagctaagaaagaccatgatagtgagtcctaccataaaggttcgaagagcttctcaagacagtcgttcatttaaaagggaagatataaagagctaggttatctcaaaacaatcctgtgaaagaagtttaaaaagatttaagaaggagaaagagggaagggaagcttcctgggtatgacaccatttgcaaggtcacaacgaacaccccaacggagtgcagaccttttcttctctgttggtactagataattgtttgggacatatatatgctgaggtttggattggggttctgctcgacaaagcatctgctctcggacaccccagcgtaattcctttctatgatcttcaccaggtaaacgtattgagtcccagtcccgtttgtactcaaaataccgggctacccggtctgtcttgccccggtttcggcttaactggtccagctttgggagaataaaggacttgggtctgctggcaacaatcaggtcttgttcgtaagctggagagcccattccttctctttgtagagagcaaatgagctgatcttgagaaattccttggtattcatgtggtaggttaaatttttgtgaaacatcaaatgaagattccttgtcttcctggaactgtacattcatcagcctttgtcttaagtcccagagatcctgatcattttctgtaccagattctgattcactgataatcgactcatctgttactaatacttccccatctggctttctgcgcagcacctttctcttcatcactggctttcggagtctttgggaggcctcagagactgtttctgaagggacattactttctacatgtgggtactgtagttgcacaggaagagcaggtcgcttccctggggctactgaagctttactgtagggatcatattggatagattgggcttctctcctgacatctccttcaccctgccctgcacagatgtgggtaaaagctgtagcagctgccaacattcgttcttctggatccatattagcccatatttgtccatcaggtagaagttcttccattgcttcccctacactgtaggaccttcttatttcaatgtatcttgattggtatttacattcaagtaaaaaaaaaaacccgccgcgggggaccccgctctccgccgcgtcctgccagtcgccagcagagcaccgcagattctgttggtttcgcgnn

SEQ ID NO: 10138 - DNA, 401 bp, Homo sapiens
  misc_feature 400, 401: n = A,T,C or G
ccgggcaggtacagagtggtgcaggatggaagccattcagagcctgatgaaatggaacagaaaactcccattttctgtcacctgtcaacttcctgtaattcaaatcacccttgaataaaattaaatgtgccttctgtagttcagcatataagtcaggtgcaacctgaggcattgcacagtacctgcgccgccgcggcggtaatatatgattgtggtcaacccatttacccattttaatatactcttcccagtcagtcccacacttggacatccacttatgatcagtgtgttttgcctgttcgattcccctattaaaatcatgtatagtagtatcagacactaaccatgcaattgtttttccataaagatgaaccgcagaagccagttcaaggaccggacnn

SEQ ID NO: 10139 - DNA, 938 bp, Homo sapiens
  misc_feature 936, 937, 938: n = A,T,C or G
acgcggggccttcagcataaaagctgatccacaaacaagaggagcaccagacctcctcttggcttcgagatggcttcgccacaccaagagcccaaacctggagacctgattgagattttccgccttggctatgagcactgggccctgtatataggagatggctacgtgatccatctggctcctccaagtgagtaccccggggctggctcctccagtgtcttctcagtcctgagcaacagtgcagaggtgaaacgggagcgcctggaagatgtggtgggaggctgttgctatcgggtcaacaacagcttggaccatgagtaccaaccacggcccgtggaggtgatcatcagttctgcgaaggagatggttggtcagaagatgaagtacagtattgtgagcaggaactgtgagcactttgtcacccagctgagatatggcaagtcccgctgtaaacaggtggaaaaggccaaggttgaagtcggtgtggccacggcgcttggaatcctggttgttgctggatgctcttttgcgattaggagataccaaaaaaaagcgacagcctgaagcagccacaaaatcctgtgttagaagcagctgtgggggtcccagtggagatgagcctcccccatgcctccagcagcctgaccctcgtgccctgtctcaggcgttctctagatcctttcctctgtttccctctctcgctggcaaaagtatgatctaattgaaacaagactgaaggatcaataaacagccatctgccccttcagaaaaaaacatgcacatttaactcaaaatcaaacaaaatggggccgcccggaatcaacactgtgggggccagaagacggtacgttcagacacgcacgggggtccaaagcggaggtgcacccggtggttggttcccgcccccccgcgggggacggaaacagctcgcgacannn

SEQ ID NO: 10140 - DNA, 662 bp, Homo sapiens
  misc_feature 1, 2, 3, 396, 655, 659, 660, 661, 662: n = A,T,C or G
nnnacgcgggggtcggcgccattttgtctcggcagcggtggccggtagctccatcgcattttatgtttctggcgagaagggaacggagtttttcatcagggtagaattggtttttgtgcggccgtcctccaccgtttcctccaggacagcacctagtcgtggccggaggagtctcagagctgtcagaaagaataagactgattttatgggaaaattaagcagatgctccagtttgagaaacctggatctgcgatctgtttgtggctgggtgcagtggcttgtgcctgtaatcccagcactttgggaaagaaaagcaaatagaatcttatcagataagtgcttttataagtctaaatatattctttggaatctctaaagcaaaacttttaaactttnttttttttttttttttttttttaggtaccagcatcaagatgatttatggtaataaggtactcagtctttgcttaaaataaattttacgtttaccaaaaaaaaaaaaaaaaaaaaaaaaaaaaacatgtcggccgcctcggcccagtcgactctagactcgagcaagcttatgcatgcggccgcaattcgagctcacttggccaattcgccctatagtgagtcgtattacaattcactggccgccgttttacaacgtcgngacnnnn

SEQ ID NO: 10141 - DNA, 808 bp, Homo sapiens
  misc_feature 1, 2, 3, 4: n = A,T,C or G
nnnnctacaggtaccgggctatgattatccgcgcccccttttgggggccccgccggtttccccctggacaaagaaaattgggtcagggacacttatggccaaggccaatcgagaccccgtttgtccggcccccggcatgtgaggcccggggttttctttctttcttttgtgagattagaagtgactgggtttttttttaattaattataaacttattacattgattttttacaacagacataactaaacataaaacaaaaaggagcaaaagactttgctgaaacatcttcataggagtccagaatataaactgaaacagagcacatacaccagaaagaccttcccggaagattgtggaaccaggtccccagagcagaaagtacaggagagactcataactctccaggcccagtgctgggggaacccctcatgggagcagctgtaatgaggcctggaaactggacactgctgagccctgacatccagacctcaatgccctgactcagcccatggcagcgaccccttcaaacaggctccatgtgggcctgtaatcaggaaagactagagcatccaggagtggagatttgattctgagatgctgggagttgttcctggttcttgctcctgtctggctggtgctgacagccaaaagcggggagttgtgtgagctttgtccttcagcactagaggcttcacccaacccatgagaaggggatgccccaggcttgcccatcacaagcactggccaagctgactccccgctgctgagggaaagagaaagaagccagctgctcaagtcaaaacacac

SEQ ID NO: 10142 - DNA, 477 bp, Homo sapiens
  misc_feature 1, 452, 453, 454, 455, 456, 457, 458, 459, 460, 461, 462,463, 464, 465, 466, 467, 468, 469, 470, 471, 472, 473, 474,475, 476, 477: n = A,T,C or G
nccaaggtactgctgactgccctggctggtcagtggggcaaagccaggcatgaagaagtgcaggtaggggaatgggatgatgttcatggtcagcttccacaggtcagcattcagctggcctgggaatcgcaggcaggtggcgaacccatttatggtggcagatactaggaggtttaggtcactctaggtgggcatgggcagctttagggttctgaagcagatgtcatagaaggcttcataatcaatgcaaaaagtctcatctgcatttgctatgagacttggagggtgacattgtggggctctagcatggtgcctgacaccttgggcaagagcagaatgctgaatgtgtttatgatcctatttaaatggtctgaataactgtgatgaatttacttgtataatcagaattcagattaaaaattaagacaactcttttgtttccaacagaaagnnnnnnnnnnnnnnnnnnnnnnnnnn

SEQ ID NO: 10143 - DNA, 1313 bp, Homo sapiens
  misc_feature 1, 1308, 1309, 1310, 1311, 1312, 1313: n = A,T,C or G
nccactatctatttattttctagtcatcattgttggcaataccaaaacgtgtgcagttttgttttttgtttttttgtgtgtggactgtgtattattctttgttgttattcatgtttcttaaaccaaaacagaccttacaagaaaacttaccattttagtatattatgtggcttactgggtgtcttgattgagctttgagaataagacaggcatttcatacccaaacactggttgtctcttaatgacatagagtatcaaaacttattttcaaggttgtgaccaaagaaatatttctaatttatttgcttcaaacagcccatccttttagccttatcttcctcaaatgaataaaaaggcacgttaaaggcagttctaaagagcctgacctaatttcatccagtttcttcagcttcccaccagaacagaccatagccaactctaaaacaggtttcagtccattacccagatgggggaaaaatatgattaaaggggtaaaatggaggaaaaaaaaataacaagttgcccactgtttaaacaattcaacacagttagaactgcccccatccagtttcctcctgtttgctggtctgctccctaagagaggagtctccaaaagagagtgcacaaaaagaggagcagaagcgagagcagtttctgtagcaccaaaatctccaagctgtggggttgtattttttatttgtggaaaatacaacatgtttctgaagttctgtttggttcttgtaggctggttggtttcaggtacctgagacaatagcaccaaattcaacagagagaaagaatgagtgagagagcactttacaccaaggctctgcacataattggtgcaatttgaaattgaatggctcagaagactgctctgtgaggagcagattggagaggataaaccactcatcttgaaaagttcataggaatgtctcaaacatatgaactgttctttccatctcctctacaagttgtgatttgtcataatctttacgatgacggtagatacactgactaagaagagaatataatctctcaagctgatcaactgccagattgttgcttttatccaccaacaaatcaagcaatttcttcaatctctcacgatcaactataagaggaggcacaggctcagatggctcttctggaaccagttccaggcttgtcgtttttgcctgctctaaaattaatttaccggatttctttactttagaagcaccttctttatccaggtctgcatcttttacctacacatcagaaccaaggtctaacctctcatttttgctacactccagagcctctagnnnnnn

SEQ ID NO: 10144 - DNA, 1236 bp, Homo sapiens
  misc_feature 1, 2, 3, 4, 5: n = A,T,C or G
nnnnnataagaagagcgacagatgtgatatctggtactgtactgttggtctacggctgtaccgcttcggatgagcttgtcatctgcgtttccagcggcttggtttgcgaatcccaccagcgttttatggcgaggtgtgctgtcgtcggccggtatgttgtggtgtctcctccggttgtgacgttggtctgtttcagtgtcctagtatgctgtggtgcccttttgctgcctccacagtgttcatgcctacttgggctcgtatgttgtactttgcgggcttcatgtgtcccttgttagatccgtgttccgggcaccatgtggtccggcaccgctgtttccgcaggcgtcggttctcgttctgtggccgcctttcaggcccagtcgttgccatgtgcctcttgtgcagtcacagttgtgttctcctggtgtgctctggtgtcctggccctcagtcctacatgattcactgcccctcatgctctgtccacagctactctcaaagaggtgcctgccatgtctccctctgacacacacacatacacacactacccactcttggaacccacaatgcactgctgggcaaacaggaaaaacacacacacacacacacacacataaatgccacaccagccctgaatggcgtggccagctagtcacagttgttgggtcagtagtacagtgctcaagaacaattcagactaacatgccaaggagcctgaggaaaagtctggtagtcatggctctcccagccagcattcccagtgggggaaactagaagacaccagcctggagaggctgaatattcaggagtccctgagatggggaatggaacagaggaaagtgtcttttgactcatcttaagtactcccctccccaaatagaaacctcaaagactgatccatttcccctagggcctgggccaggagtagctcactgctcactgctgaggagaaaggcacaagatataatgtcataagagcaggacagtggctcagcctacagagttccctataggggaaagaaggcaggaaataggcgcagggtctggtcctgtccctgcaccaccctgagcagctagtcttgggaagggattacaggccctgggccataggctgctcgccattctgctttcctatcctgtttctctccctgtgctgctcccttttagccagggctgagaaatgttcagcacctgaggcaaaactgccatagtacctgcccggccggccgctctagaa

SEQ ID NO: 10145 - DNA, 637 bp, Homo sapiens
  misc_feature 1, 2, 3, 4, 5: n = A,T,C or G
nnnnnaaaagtaagcatctctgcagaaagccaacaggtactcttttgttttgggcagagcaaaagacatcaaataagcatccacagtacaagccttgaacatcgtcctgcttcccagtgggttcagacctcacctctcagggagcgacctgggcaaagacagagaagctcccagaaggagagattgatccatgtctgtttgtaggacggagaaaccgcttgggtaacttgttcaagatatgatgcatgttgctttctaagaaagccctgtattttgtgattgccttttttttttttttaagatgctttcattttgccaaaataaaacagataatgtggatggtttaagggttatagtattatagtttaaataataacaacaaaattcttcccaggaactctgctggaaggtaaattaaaatacttgtttttccattggtaaaatattgttgcactctgtgaaccaaaagacagtctaagttggaggacatagaacggaactcatcttaaacatactccccaccccgtcttggcctcctcagaccactttggccatccctgcatttggggccgctatggtaatgtgaatgcactgggtacctcggccgccaccgcggggagctccaattcgccctata

SEQ ID NO: 10146 - DNA, 1680 bp, Homo sapiens
  misc_feature 1, 2, 3: n = A,T,C or G
nnngtcttcagatttgggggtctggagagatctcgcaacaacctcgtccgcaactcagaacagcaactgctaaggctgccttgggaagaggatgatcctaaacaaagctctgatgctgggggcccttgccctgaccaccgtgatgagcccctgtggaggtgaagacattgtggctgaccacgtcgcctcttatggtgtaaacttgtaccagtcttacggtccctctggccagtacacccatgaatttgatggagatgagcagttctacgtggacctggggaggaaggagactgtctggtgtttgcctgttctcagacaatttagatttgacccgcaatttgcactgacaaacatcgctgtcctaaaacataacttgaacagtctgattaaacgctccaactctaccgctgctaccaatgaggttcctgaggtcacagtgttttccaagtctcccgtgacactgggtcagcccaacaccctcatctgtcttgtggacaacatctttcctcctgtggtcaacatcacatggctgagcaatgggcactcagtcacagaaggtgtttctgagaccagcttcctctccaagagtgatcattccttcttcaagatcagttacctcaccttcctcccttctgctgatgagatttatgactgcaaggtggagcactggggcctggatgagcctcttctgaaacactgggagcctgagattccaacacctatgtcagagctcacagagactgtggtctgcgccctggggttgtctgtgggcctcgtgggcattgtggtggggaccgtcttgatcatccgaggcctgcgttcagttggtgcttccagacaccaagggcccttgtgaatcccatcctgaaaaggaaggtgttacctactaagagatgcctggggtaagccgcccagctacctaattcctcagtaacatcgatctaaaatctccatggaagcaataaattccctttaagagatctcctccaaatgtttctcctctcacctcttctgtgggacttaaattgctatatctgctcagagctcacaaatgcctttgaattatttccctgacttcctgatttttttctttttaagtgttacctactaagagttgcctggagtaagccacccagctacctaattcctcagtaacctccatctataatctccatggaagcaacaaattccctttatgagatatatgtcaaatttttccatctttcatccagggctgactgaaaccgtggctaagaattgggagactctcttgtttcaagccaatttaacatcatttaccagatcatttgtcatgtccagtaacacagaagcaaccaactacagtatagcctgataacatgatttcttagctgacattaatatttctttcttccttgtgttcccacccttggcattgccacccacccctcaattaaggcaacaatgaagttaatggataccctctgcctttggctcagaaatgttatagcaaaaattttaaaataaaaaagtaagtctgtactaaaaaaaaaaaaaaaaaaaaaaaaaccctgtcggaccgcctcggccccaggtcggactctagactcgagcaagcttatgcatgccgccgcaattcgagctcacttggccaattcgccctatagtgagtcggattacaattcactggccgtcgtttta

SEQ ID NO: 10147 - DNA, 2122 bp, Homo sapiens
aacgatggtcctcagactcacagctgctttataaagtagctgatggcacaccctggggtcagaacaacaggtttttatggctagtttaacttttttataatgcagagcaggtagtctctcctacaagtctttgtccaagttggtaagttggtccttatattatacccagctctgtgcttcttgtaatataccagtaggccagggtgtcatgctcaagagagatgaggatgtttgaacaagttgattacgaaagctgacatggagaatgatgttatggaagatggcagtatgtgtggttggggaattcatgtggaggtcagagtggaagcaggtgtgagagggtccagcagaaggaaacatggctgccaaagtgtttgagtccattggcaagtttggcctggccttagctgttgcaggaggcgtggtgaactctgccttatataatgtggatgctgggcacagagctgtcatctttgaccgattccgtggagtgcaggacattgtggtaggggaagggactcattttctcatcccgtgggtacagaaaccaattatctttgactgccgttctcgaccacgtaatgtgccagtcatcactggtagcaaagatttacagaatgtcaacatcacactgcgcatcctcttccggcctgtcgccagtcagcttcctcgcatcttcaccagcatcggagaggactatgatgagcgtgtgctgccgtccatcacaactgagatcctcaagtcagtggtggctcgctttgatgctggagaactaatcacccagagagagctggtctccaggcaggtgagcgacgaccttacagagcgagccgccacctttgggctcatcctggatgacgtgtccttgacacatctgaccttcgggaaggagttcacagaagcggtggaagccaaacaggtggctcagcaggaagcagagagggcgaatgtgcgggcaagtgcgacagaaaaaggcggccactcgcgggccccaggcgggggcacaccgcgccgaggaaacacacgcgaggacgaacccacccgcgaccaccgggggccgcagtagcgtcgggtgttatgcagtatgaataataattagcgcaacacacagagtcacgacagcgagctagttctcacagaagcgacgagctggcaaacgacatgcgacacctgaagatcgctgaggtgtcgcgacacgccaccgcaacgcacgctagcgacgacgagcacggcgcctacatcgtacggaactaagtcacagcagacgactagactccatgtactcggacaactcaacagcactacaagcagcagctagcatcagacgacggactgcgagctatgagcactcaagaccatagtatggcgactgcatgaaagatcgatatatgaccgagcacactatgacaacactgaactactttagcgaatccgagcactacaagaaagcgagaactacgaggcagagtacaccaacaaacataagtatacgatgagtactatgcgttcaaagtcaacactcactagctagcacgcagaccaacgacaatcctacatacatactcacgaagcatctgcttatgtatcacaccagtacccgacggtacggatcacaatcaagattaacatccaatgcctactagattcacaaaaactacactaaaaacacaccaaactacacgcacaaacacatcaagacacgcgaacacaatcacagcatctaaaacaacaccacataccacaaactagataccacacaatgaaacaatacaaccatcagtacctaagtagacagatctacaggacaccacgttaacacgtaaccaatacataccacattctgcatataacaatacattcataagcatctacaaaatctaacactcaaaaagcaatatataactatctcacgtaaactctatacaaacccaacaacaaaacgcacaacagctatataagctaatccaacacatacacaccatgacaaagcatccaacattaactcaatataccataactcaataatcatcaataatcggaataagagacaagactaacacagcaataacaaaacagcaaatacaacaaactccaacttatcaacaagaacatactagactac

SEQ ID NO: 10148 - DNA, 736 bp, Homo sapiens
  misc_feature 735, 736: n = A,T,C or G
cgcgtccgcccccgcgtccgctgaagatggatcgagtaagcaggtttgtggtgattatttactgtctagaatggatgttaccagctgcatctcttaccgaaattttgcaagttgtatgggagactcccgtttgttgaataaggttgatgcttatattcaggagcatttgttacaaatttctgaagaggaggagtttcttaagcttccaaggctaaagttggaggtaatgcttgaagataatgtttgcttgcccagcaatggcaaattatatacaaaggtaatcaactgggtgcagcgtagcatctgggagaatggagacagtctggaagagctgatggaagaggttcaaaccttgtactactcagctgatcacaagctgcttgatgggatcctactagatggacaggctgaggtgtttggcagtgatgatgaccacattcagtttgtgcagaaaaagccaccacgtgagaatggccataagcagataagtagcagttcaactggatgtctctcttctccaaatgctacagtacctgcccgggcggccgctcgatattattcttcaattcagcttgttaaacctccttcaggattctaaaaccttttagactcttaaattgcagccttccatgtcccttgtcctgcctccagcacactcttcaataaacaaaagtcaacagcaccagggcaaaactaaaggaagtgctggatggtctcagaattcaggatgacagnn

SEQ ID NO: 10149 - DNA, 1671 bp, Homo sapiens
actttatttttgaaaagggaagagatgggtgtggggtggcaatagcattgtgccattttgtcatagaatgtaaaaattggttaactttacaaatgtcagctagttttgactactaattgggggaaattttagataatttttaaattcaaagttatttataaaatgctagaatttgttttaattttttgtattttgaaccacttcacatgaagactcagttgcatttttatcgaatacatttttatcaacagttaaagactatggtggttttttcagagtttggctaagaatgttgttaccatcttctttgtttgtggtacctgcccgggcggccgaggtacagatgatgactgcaaaatgaagacctactttcaactcctttttcccccctctagaagaatcaaattgaatcttttacttacctcttgcaaaaaaaagaaaaaagaaaaaagttcatttattcattctgtttctatatagcaaaactgaatgtcaaaagtaccttctggtccacacacaccaaaatctgcatgtattggttggtggtcctgtcccctaaagatcaagctacacatcagttttacaatataaatacttgtactaccttaatgataaggactccttaaagttccatttgctaatgattaatacactggtttgggctggccagtttttcatgcatgcagcttgacgattgagcacagtcaggcctttgtattaaaaatgaaaaatgaaaaaacaaattcaaaacctattcaaatgggttctagttcaatttgtttagtataaattgtcatagctggtttactgaaaacaaacacatttaaaattggtttacctcaggatgacgtgcagaaaaatgggtgaaggataaaccgttgagacgtggccccactggtaggatggtcctcttgtacttcgtgtgctccgacccatggtgacgatgacacaccctggtggcatgcccgtgtatgttggtttagcgttgtctgcattgttctagagtgaaacaggtgtcaggctgtcactgttcacacaaatttttaataagaaacatttaccaagggagcatctttggactctctgtttttaaaaccttctgaaccatgacttggagccggcagagtaggctgtggctgtggacttcagcacaaccatcaacattgctgttcaaagaaattacagtttacgtccattccaagttgtaaatgctagtcttttttttttttttttccaataaaaagaccattaactcaaagtggtgttaaatgctttgtaaagctgagatctaaatggggacaaggcaggtggaggggaggccagtgtacatgtaaatgcccacagcccagcattgggtttccctcccaaggccccagcaccaacctctgagcccaagaccttgcctgaaaacaagcagatattgatggagacggacaagtcaactatgaagaattcgtacagatgatgactgcaaaatgaagacctactttcaactcctttttcccccctctagaagaatcaaattgaatcttttacttgcctcttgcaaaaaaaagaaaaaaagaaaaaagttcatttattcattctgtttctatatagcaaaactgaatgtcaaaagtacgtgccaagcatcctcgtgcgaccgcgagagcccggggagcgggggcttgc

SEQ ID NO: 10150 - DNA, 2846 bp, Homo sapiens
  misc_feature 1, 2, 2844, 2845, 2846: n = A,T,C or G
nnagtcgacccacgcgtccgatttgttctggaagctcgtatttacattttaagtgtatctggtgagtgggctggagccctcgtctgggccggaaaaaaaaaagccctccgatccgtcttttagttgcttctcttccttttttctctccggtttctcatcactccaaccagccgcgaccatgcccaggaagaaggcggcggcggcggcctgggaggagccgagctcgggcaacggcactgcccgcgccgggcccaggaaacgcggcggcccggcgggcaggaagcgcgagcggcccgagcgctgcagtagcagcagcggcggcggcagcagcggcgacgaggacggcctggagctcgacggggcccccggcgggggcaagcgcgcggcgcggccggcgacagcaggcaaggcgggcggcgcggccgtggtcatcaccgaacccgagcacaccaaggagcgcgtcaaacttgaagggtcaaagtgcaaagggcagcttttgatttttggggcaaccaactgggacttgattggtcgaaaagaagtgcctaaacagcaagctgcttaccgcaatctcggtcagaatttgtgggggccccacagatatgggtgcctggcgggggtccgggtgcggacagtggtctcgggctcgtgtgctgcacacagcctcctcatcaccacggaagggaagctgtggagctggggtcgaaatgagaaggggcagctgggacatggtgacaccaagagagtagaagcccctagactcatcgagggtcttagccacgaagtgattgtgtctgcagcatgtgggcggaaccacaccttggccttgacggaaacgggctccgtgtttgcgtttggggaaaacaagatggggcagctgggccttggcaaccagacagacgctgttcccagccccgcgcagataatgtacaacggccagccaattaccaaaatggcctgtggggctgaattcagtatgataatggactgcaaaggaaacctctattcctttgggtgccctgaatatggtcagctgggacacaactcagatgggaagttcatcgcccgggcacagcggatagagtacgactgtgaactagttccccggcgagtggccatcttcattgagaagacgaaagatggacagattctgcctgtaccaaacgtggttgtacgagacgtggcctgtggcgctaaccacacgctggtcctggactcccagaagcgagtcttctcctggggctttggtggctatggccggctgggccacgcagagcagaaggatgagatggtcccccgcctggtgaagctgtttgacttccctgggcgtggggcttcccagatctatgctggttacacctgctcctttgctgtcagtgaagtgggtggtctgtttttctggggggccaccaacacctcccgtgaatctaccatgtacccaaaagcagtgcaggacctctgcggctggagaatccggagcctggcttgtgggaagagcagcatcattgtggccgccgatgagagcaccatcagctggggtccgtcaccgacctttggggaactgggctacggggaccacaagcccaagtcttccactgcagcccaggaggtaaagactctggatggcattttctcagagcaggtcgccatgggctactcacactccttggtgatagcaagagatgaaagtgagactgagaaagagaagatcaagaaactgccagaatacaacccccgaaccctctgatgctcccggagactcctccgactccacacctctcgcggcagctgtcatttccatgtgcactgggacgggaagtcaaacgaggaatttaaaaaagcaaaagttgaccgaaggtgcatttttgtttagactccctgaggttccgttttacacatgatccaacgttaactacctttttttctgtatgctttccaaagtccttttttttcccttaatgttgaattaaaatacttgctcatagttgatttaccattcctacaaaagaggcagaaactttgagcaatctaggttttttttttttttaagttttttctttcttcctctcctgaatacactccccaaaacacccctttccagttacaattagcatcgtgatccaagcagatgccacatggaagaggaatcgccatttactcagaaaaaatgtcccttacaggaaccggcagcagctaggcagtcaccggcccgcctccatccaaaatcacgctcgcgtgcttcggaagcatccgggtcactccttctccgctttttcttgcagatgggcctaggccggtgtcggttctgtttctccccttggctgcctgtacgcccacagccttctggctgcgacattatagaatcggccgtgtccccctgtgggggattgggactctgtgtaacgccaaattaaaattaaccatacagcggtcaaagagcgccccatgagacatcaccgcgtgtggggcaccctgagcgcactatggcgtaggggcaaacagtggagaaacatgtacacatacagcaacaatgaagggaccccaggagatgacacggggaccacttagaaaacacactggacccaatcaagagagtgcagccgacaaaaagggatatactcacctcgtagaaaggaagacgaccctttgtgtgagcacacacacaaatgtgaggaagataaacaccaagccgaagaagagcggggacgaaaaaatgagagacgaacgatacgacaaactatggatggcggcatacaacagagagaacaacaaagaagaagacgaacagaccagcgagcagtaagtactaagctccgtcggcctcgtcgttattactcttcacgnnn

SEQ ID NO: 10151 - DNA, 170 bp, Homo sapiens
  misc_feature 169, 170: n = A,T,C or G
ccgggcaggtactttagatgcaaagttttagatgttggtatttgaatgggatacaaaattgggaacttggaatttgggttgagacatctttcctatgcagttgggaacttggaatctgggttgagacatctttcctatccttgcaaaaaaaaaaaaaaaaaaaaaagtnn

SEQ ID NO: 10152 - DNA, 1013 bp, Homo sapiens
  misc_feature 990, 1011, 1012, 1013: n = A,T,C or G
acgcggggaggaattaacatacactaactttgaggaagatgtgctcatatacattatttttataattcagtcatatgaggcattttattcacatcctacatgaggagattgagaacaaaatatgtaatgtagattcaagttgcacagtgagtgaggccagagttcataccccagtctcgtggtctttctgcagcctcatgatagagcaaggatattgtcacctgagaaaccaacattgaacctccttctctgaagcccagtgagtgcccttcctctagactctggccacagctgggcctccctccatcagcccacataactcattgcagtgtgcttatctgttcactactccttgtcttcaaaggaaactccagaattgtaatagctgtatcctcttcatctctgaacctccaggacttcaaaagaagtgactggacgtagtaggtgcctgggaaaggtttttgaatgaatgtttgaagacagcatctaggtgtccagctcctagacctttctttgagcgacagtgggtctcagtctcatccattcaagctcctgtttgggttcatatttatcccaacccaaccttctttctctggcccttgagtctctcttcattaagactaatgttttcccagctcaccaaacttgcagtctcctgggattctctgcttccccctattattttccactagtctaaggtgctgcttcataggctttcacagtcccatctgcagttcaagctatttggctgtatctgctcatcagccatcaatgaggactccaggaaaccaccgccccaaacaccctccaatcagtccccctacttctgggggctggagctctgttagcccacaatggctatgcagcacccaaggtttgccacaaggatggggtgagtgcgtggtgtgttacacggataagtgcaaggctataagggtggaaacttccatcccacttctgcttcttaccagctatgggacactgcactgngagaaggctgtgtgtgaaagnnn

SEQ ID NO: 10153 - DNA, 1294 bp, Homo sapiens
  misc_feature 1, 1293, 1294: n = A,T,C or G
ncgtgtgttattccagacagtgtgtttccttttgttgtccctcccacgggattgttgtgctctcaggcggttttaacacatggggtttgaaacgtctttaagaatgaggatttcgggctttcacaagaagtgggaaaacccttgtcccctatgccccccctcttgtaagttcatatttcaagttacatggttcatgccaataaataaaccacacttgctttaacatcgttcagaatggtacatttaacaattggacatacagcactgtaaacaattcaaagtccattgagcttaccatgaaagaactgaaacgtatgtaggaactgtgtcctgctgcagacaagcagctgctctggctctggtgcggtgcggtgcggtgaggtgaggtgaggtgaggtgggcaggtgtggaagggagaattcctgaggccagtcacaattattgaagctaaattaatttcttcctgacactttagcattaattctaagtagttctaagttctaaaccattaactgtatagttaatttttttaaatcaaagaagaaaaaggctttcacacagatgaatgtataggaaaacacaagtaatgacaattttcaagagccttattgtaaaaaaaaaaagaaagaaaaaaggacaattatttttggagttactgtctctaattcttaaaaagtaagtacagtgtctgtatctctaagttttagtgctatacagcactaaatgtactttatgaatttggggtaggtaaagtttgtattttatcttaaacatgttttctatgatgaaaaggaacaaaattgtaaaaaatgaggatcttccctctaaaggtttcaaagcgttagaggacatgcaattaaatgttgttacaccttgaacaatgagcctcttgagtttgtaggaagggcagaccggctccattaccaacaactttggggtagaaagcacagctctcctcttttacccagcacaaatgcaatcctgattataaaactatttgtgtttctaaatacaaccaaaggaaatcttagagaaacataaattagaaacctcttttattaaggggaaacaacaaaaaaaggtgcttttttaaaaaaaaaaaagaaaagaaaagaaaaagaaaaaacaagctgtaaaaccatgaagttaaagagctgggtctggagcagatgtgcataataactagttagttgctcccagcaggatcagaaacagctttgggggagcagaggaatatgggttggtgtgtttcagaagaggcaccagttaatactcttccaataaaaatgatgnn

SEQ ID NO: 10154 - DNA, 228 bp, Homo sapiens
ccgggcaggtactcatcagatggaatgttttaccccgccgaggttttagtcatgatgtgctgagctctctgcgtctgacgtgactgactggtagctgggcgttggcgtgacccttctttccctctaggatcacatcatggagatattttccacctatgggaaaattaaaatgattgacatgcccgtggaaaggatgcatccccatctgtccaaaggctatgcgtacct

SEQ ID NO: 10155 - DNA, 486 bp, Homo sapiens
acctggttttaacttcatgtgtctgaaagcagcactgaagaggttagaaaagaccatcttgatctgaggatgccacccctctcccatctcccagcagcagccacgtggcatggagagaatctgtgtgctagggagagggacagcacagtgattgtgagatactgctttgaactcagtgctgccctgtcacagctgaaagcaaaactgggctgaactcagccagcacccatccacacagggagcatttagatgagctctagccagagaggaatcgcccatcccagcagtctgaatatgagttccagcaagccccgtcactgtgggctaaattggtccaagaccttaaataaacttgaaagggcagtctaggccataaagactacaacccctagacatgtcctagtgctgagctgggcttggagccagtggacttgggggcacgctacctactgagacacaaatggaggtggctaagggagtgcttgt

SEQ ID NO: 10156 - DNA, 164 bp, Homo sapiens
  misc_feature 1: n = A,T,C or G
nccgggcaggtactccgccattttacgtgagagacttgagcattcttggatttggtatcctcaggagtccgggaaccagtcctccatggatatcaagggatgactgtttgcccgtgtttttagcctttgtatctttgctcaagaaatcccctaaaacctggagt

SEQ ID NO: 10157 - DNA, 379 bp, Homo sapiens
  misc_feature 1, 2, 71: n = A,T,C or G
nnacaatatcttcacacattccatttctgtccagaatgtcctccccttctctgtaaccctgagaacccccnattcttcaagattcagccctgtgagccttcccttgctcttctggttttttgttttttctttttctttcttttttttcttttcttttttctttttttttttgagatggagtcttgctctgtcacccaggctggagtgcagtatggatttatgtcgtctgtatattatgcatttatttgtcttcttcgttgtgatggtaagctcctggagggcaagtcttgcatccactgctttgctggcaacccgactggtaagcttctggaaggcaaggcttgcatccagtgctttgctggcaacccgattgctaagt

SEQ ID NO: 10158 - DNA, 1074 bp, Homo sapiens
  misc_feature 1, 2, 3, 4, 5, 6, 7, 8, 9, 10, 11, 12: n = A,T,C or G
nnnnnnnnnnnnctcccacattaatgaaatggataacaagccatcctttcaagggcgaacagagcccctgtaccctcccccaaaacccggttttttttttgtcggacccaagaatattagggttattgatcagaaagggcttacctgggggagaggagaccctcctgatccgccagcttatttcctgggggtgaggcttagaactatgacattcggtagggcccacttttttccccgtgctccttcatgcgtgactgcagctgtagcttctgtgggacttccactgctcaggctcagctcaggtactgctgccgcgtacttgttgttgctttgtttggagggtgtggtggtctccactcccgccttgacggggctgctatctgccttccaggccactgtcacggctcccgggtagaagtcacttatgagacacaccagtgtggccttgttggcttgaagctcctcagaggagggcgggaacagagtgaccgagggggcagccttgggctgacctaggacggtcagcttggtccctccgccgaacacccataagtaccactgctgtctgctgattgacagtaatagtcagcctcgtcttctgcctggactccactgatggtcaacgtgactgttgtccctgagctggagccagagaatcgctcagggatccctgagggcctctcactgtctttatatatcaccaacacaggggcctggcctggcttctgctggtaccaataagcatattgctttggcaatgcatctccagagcaggtgatcctggccgtctgtcctggggacactgacaccgagggtggctgtgtcagctcataggaggcctcagagcctgtgcagagagtgaggagggggagaagtagagggatccaggccatggtgagacacccagagttctgcctcctggacccacccccgcgttacgtgccaagcatcctcgtgcgaccgcgagagcccggggagcgggggcttgccggccgtagcactcatttacccggggacagggagaggctcttttgcgtgtggtggttgtgcagagcctcatgcatcacctcgcgt

SEQ ID NO: 10159 - DNA, 1255 bp, Homo sapiens
tggagatacctgtgacaacaatcaggatattgatgaagatggccaccagaacaatctggacaactgtccctatgtgcccaatgccaaccaggctgaccatgacaaagatggcaagggagatgcctgtgaccacgatgatgacaacgatggcattcctgatgacaaggacaactgcagactcgtgcccaatcccgaccagaaggactctgacggcgatggtcgaggtgatgcctgcaaagatgattttgaccatgacagtgtgccagacatcgatgacatctgtcctgagaatgttgacatcagtgagaccgacttccgccgattccagatgattcctctggaccccaaagggacatcccaaaatgaccctaactgggttgtacgccatcagggtaaagaactcgtccagactgtcaactgtgatcctggactcgctgtaggttatgatgagtttaatgctgtggacttcagtggcaccttcttcatcaacaccgaaagggacgatgactatgctggatttgtctttggctaccagtccagcagccgcttttatgttgtgatgtggaagcaagtcacccagtcctactgggacaccaaccccacgagggctcagggatactcgggcctttctgtgaaagttgtaaactccaccacagggcctggcgagcacctgcggaacgccctgtggcacacaggaaacacccctggccaggtaagaagcaagccctgaaggagctgtgtttcaacctttccttttccttttccttcaggtgcgcaccctgtggcatgaccctcgtcacataggctggaaagatttcaccgcctacagatggcgtctcagccacaggcggtgaaatctttccagcctatgtgacgagggtcatgccacagggtgcgcacctggccaggggtgtttcctgtgtgccacagggcgttccgcaggtgctcgccaggccctgtggtggagtttacaactttcacagaaaggcccgagtatccctgagccctcgtggggttggtgtcccagtaggactgggtgacttgcttccacatcacaacataaaagcggctgctggactggtagccaaagacaaatccagcatagtcatcgtccctttcggtgttgatgaagaaggtgccactgaagtccacagcattaaactcatcataacctacagcgagtccaggatcacagttgacagtctggacgagttctttaccctgatggcgtacaacccagttagggtcattttgg

SEQ ID NO: 10160 - DNA, 3699 bp, Homo sapiens
  misc_feature 3259, 3676, 3677, 3678, 3679, 3680, 3681, 3682, 3683, 3684,3685, 3686, 3687, 3688, 3689, 3690, 3691, 3692, 3693, 3694,3695, 3696, 3697, 3698, 3699: n = A,T,C or G
ccacgcgtccgcggacgcgtgggattttattaataaatgaggctagaatggcataaaaatatgtttttactttctctttcaggaaattttttaaattaatattttatatctagatctaatgctatggaaaagtgcctttttatcatttataatttcatttttcactatttccaaaaacacataaacaaatagtttcagtaggtcccagcttttactttttccatttaaaccttcttttctccatttcttccctttggcttaagaataaaagaaaaggtacattgctagaattgtttctttgggagagggtaaaagattacagaattagactgttcagcctttatataaactaaatttgtcttcatctcaaccagctaatggtaggtcttatctgaatactcatgagaattttagcatctgtgaaactccatgcaccagatgtgtgtaaatttcaggaagaaagtgttgaaagcattttctctgatgttaattagatggaaataaatcactaaaacatagtttaggtaaagcctgattatgccacttttttttaactagacagggcaaagttgtttatgttagtgtacttcttgtctatcctcagttaatttacctagacaaaaagtgtcaaaggaaatgagaaaaaggttatatctgactccctccagacctaagataattccttttgatcagatacagtcagatggagtgccttggtttttgttaattttgcctctattccagctccttaccacagcggtggtgcttaaagaaaggatcatcagcaacaggtcaggatagttctacctttgggatagggctgctttccccgtgctagtatttctgtgactgttagtggcactgaggactgcaaacttttatgcaatattcttaataccctattgatattatgcactttaatcattccaaagaagccaagaatgctgtatagtgatgattccttcctaatgaattcatcttaactatttagaatgttatgtcccttttcttttggatagccaacttggtataaatgttatatggatttttctaaaatgactatataggacttaagactttgaaatgtaatttacttataaggggaaataattatgctttagcacatcattttagaaacgtcacattttagaaacattcagcttgctaacctacatgtttgggaattcattaaaaccagttgtctatatattttgtgccatgtatataagaacattacaatatatctttttctacatatgtagtatgtgcaaccagtggttctcagagtatggttctcagcccaccagctagtatcagtatcacctgggaactagttagaaatgtaaattctttggccccatcccagacatactgagtcagaaactctggaatagggcccccgcaatctgttttcacaagccctccaggtgattctgatgcacactttaaagtttaggaaccactgggctaagactctgttgagatatagagtttttcttccactcagactgatatagttatacattgttcttcatgtaaattcagcttaacctggttatctataatcttttattggcaaaagttaattctcagtactgcctatagagatacagtgtattttatgtacatacacaattagtctaattcttgataattcagttaatttagtttggcattttcctaccacttactaaaaggtttacattaaatgactgatttaaatatataggtgcaatgttctatgtttattttaattgttatgacatttaagtagctaatataattgaccggtgctaaagtctcctgtttatccataaaatgggtacattatgggcagtgtaatacaagctttcttttcattgcctagtactttaccagcagaccacagttttgccctggctagaccaaccctcagaacaaaatcatcattccttgtatttatatttgtatctgagatagtaaacaagatggctggccaggtcaacatggcaccttaacttatttttttaataggtaaaacttcttcaaaagtagcttgctttgtataagaactaagctatcagtatagatatagctatccttggagcttatgtttcagacaagaattatttactaaaataaataataaacaagataatgcattatacaatttgggcatttctcgtttctcaagtgtatgcatcatggtaaatataaactaaccacaagataggtagattgattcatttcattttaatctccttgtgtaattcagtacctccataattgttctaatcttcttcccactgtttacaaattaccagttaattaactcgtgaaagaaaaattcacatatcagaataaaaataaatgtatactcactttataaaaatcaccactgctgtctttccttaatactagcagtggaaatgtaagtggcttactctacaaattttggtgctggcaaatacataggcaaactgttgggagctgctctagttacattcctcccttcttattccctttttctcttcctcactttattgcataacatattcctgtacccaaagcattctaccacagttctatttgactcccacttgtaataactcctttaaaaaattccatgtttaaccatatgaccctgcttgcttactcatattctccctccctctccccttcctttctctctcttccagaagtcatttgcctggtttgaaatattttgtagggattgcttattatattattttagctgatgaacctcaggacaacgtctacacacacacacatacatacacgcacacaaaatctcagctgttgaagagtgggcttggaatcagacttctgtgtccagtaaaaaactcctgcactgaagtcattgtgacttgagtagttacagactgattccagtgaacttgatctaatttcttttgatctaatgaatgtgtctgcttaccttgtttccttttaattgataagctccaagtagttgctaattttttgacaactttaaatgagtttcattcacttcttttacttaatgttttaagtatagtaccaataatttcattaacctgttctcaagtggtttagctaccattctgccatttttaatttttatttaattttatttgcttgagcacactgatcaaccactgaactgcttcttccatgtcgacgtataagggactgggttgcaccgggcacacggcaacaaatagtccgggtttttttcttttctccttctctccttctcctcaaacttaagctagtgctnccaccaaacacaaacagagctggacaaaacaaaagacgacacacgcagaaatacgaaaagtgaagcgcgcaggaagaaggacacgagcaagaagacgaagaaaacaccgcgacgagaaacaagaaacagaaaaggagaacgacaagagagacgaccgcgaagaggagagagacaaacgaagaaaaagaagacagcacgcaatgcggaaaagagaaagagagggagcgcataacaaaggaaaagaaagaacaggactaaacgacgaccagagacaggaaggcgaagacgaaacgaaaaagcacagagcgagaaagaccaaaacgcgagacacaaacggagagcaagaacgagaaaagaagaagagacaagacaagaagacaagaagaaatagaagaaaaccagaagagagagccagannnnnnnnnnnnnnnnnnnnnnnn

SEQ ID NO: 10161 - DNA, 997 bp, Homo sapiens
  misc_feature 990, 991, 992, 993, 994, 995, 996, 997: n = A,T,C or G
actttttttttttttctccatggttctttaggtatctctccttcctttccctgtcagccacagttctttatattaaattcttttgatggcgagaatcctggagtaggagtgagaactggactgtaatgcacccgtccgactaaccacctgtttggggcaaatagtctgtctcgttgggagatgaactttacaagttcaattactaaatctgaaatatctggattagaatatttctaggttttttttctgctcttgacattctatgataactccatgacaaatgttctttttccaaataattaaaacttaaaacatttccgtttaaaccttcaaagacaaagacaacttcttctttctgcatttgagtcataaacatctaaactaataagttagatgttttagggagaatctatttgcctacaataaccaccccccctccaaaagccaagccagcagatacgtggaaatgggaacctgcaatattctacctccttccttttaatctcagaagaatttttataactagagtaaagccacattatgacaatgagaaaaagttggattacttttctttatttaggctaaaatttagacttaaaaaaagaatatgctaacgcatagtatatacagtattgctccttgagggtaacactggcacataattcttcttagcatccccaaatcaatttgttggagattagcacatagtaggcactcaatagatattagtatgtgttccttgttcaatacaaacatgttcatcagtaaaagaaaccatactgctaataattttatttcttgatttagaagcaaaatataggcgcctaatattaatctcttcaattttaggttctaattcacaacagtccaagtttagcaagtctagtagttttcatataaatacctcatacagttgcaggcagatggcatctatgaacccaacttgcatacttgggattttgtttttcttctccctggtcattagatcannnnnnnn

SEQ ID NO: 10162 - DNA, 385 bp, Homo sapiens
  misc_feature 382, 383, 384, 385: n = A,T,C or G
acgatggtcccctttgacttgatttaggagctctcagttgcatagaaagatctggtgagcaccttttcatccccagaaaaggagcacgtgaattgagtcgcctggcggctctgtacaacactggtgactccaggaaccattttcacctattaccagtgttccctggggactcctcttaatgttccaaatgggaaggacagttgatttccaacatgaggttttttgttttttatccagaaatattttcagcaaaactttccaactgagtggagtctgattaaaaatttatttgaaaatggtgggattcattgaagtcatttaatgtagaatacttttaatttcactttctgtattttaattttgttgaagggctgattgggannnn

SEQ ID NO: 10163 - DNA, 915 bp, Homo sapiens
  misc_feature 1, 8, 10, 41, 915: n = A,T,C or G
nctagcantnttttgaacatttaataatgtgctgagcaagntgctgaagcacttcacatacattattttattcagtaggtatattattatgcccgttttatagatgaggacactgaggcttagggaagataagagcactgtccatggtcccaacgctagtttaaaagaattggcatacaaactcaggggggatagacacatgagtgaccagaggcacagaaaattcccccgccagaaccactaccaacctggagaatgtccatgaaggaaagagaagccctttccaggagctccgacaaagtggctgacaccttgatcaaggatctgcgggcctttatcacatgtcctgggcaaaggcagctgcagcctgggactgccgtcaggctcagggaccgagccgtactcagaagtgtctctaggaggctgggccagtttcctctcttttctgcaggcgtctccagagcaccctctcaccagctgtatctactcacaatcgtctggcatttggaatctggttgagtttgggtccctcaatacccagaaaatagagcctccaggacccgcccctaagcaggaatttttcagatctcccttctgggtcctttggtccctaagtctctggctttggcattcctggtgggaatccttgcggagagccatcctggtaccttcaggcaaaggcagatgatggcagagctggggagcagaacttaactgaagccatggggcacagcaaatccctgccattagtatttagggaatgtgagtcccagaggatgagggggagaaagaggcagtgggagaggaaggcggaggtgctcagagactcagagatcaccaggaggggttgcagagagacagaagaggagggtgtgaaggaggaaaagaaagactgaagtgccctgtgccgaaacn

SEQ ID NO: 10164 - DNA, 309 bp, Homo sapiens
  misc_feature 309: n = A,T,C or G
tagggcgaattggagctccacgcggtggcggccgcccgggcaggtacaatttaatacattaatgtagtaagttattaaatggtgcccctatgatctgcgagaggtaatacactatcacgtgttccaaattttcacaggaaaagaatcatagaatcctatagctgaagggggctttagcggggatctctacaaatgcctgccaggtgcttggatatcctccatcacatccagccatgagaagttacttgtgtcatggtacctcggccgccaccgcggggagtccaattcgcctataggagtcgatacgcn

SEQ ID NO: 10165 - DNA, 316 bp, Homo sapiens
  misc_feature 1, 2, 3, 4, 40, 66, 67, 124, 142, 178, 179, 252, 253, 316: n = A,T,C or G
nnnnaattatttaagcctggtattcagcagaaaccagggnaaagggcccctaagctcctgatctannttctgcatccagtttgcaaaggtgggggtcccatcaaggggttcagtggctctggantctgggacaagatttcanctctcaccatcagcaagtctggcaacctgaagattnnttgcaacttaactactggtcaacagagttaccaagtatccccctcactgtcgtgcggaggggaccaagggtgnngagatcaaacgaacttgtgtgcttgcaccatcttgtcttcatctttcccgccattctgatgan

SEQ ID NO: 10166 - DNA, 408 bp, Homo sapiens
agggcgaattggagctccacgcggtggcggccgaggtacgcgggggctgcgtaaccatgtggacatgaaacaagccagccagcgtgaggtagtgcacaatgagtgtaaggccattatcatggactttttccccagctgcagggttatctacaactccgggtggaagtcaaagattggaagaggatgacctctgatcctggaactgcattgcttggtggtcaggaggggttcttagtaagcaaactcagtttaatcccagagtcggaagtgggtgtcaacaagccaaagcaacatcctttcagctctgctgcttttttgtcttggtggaggaatagccaatggaagaagatggagagtccggaccagaaaaaaaaaaaaaaaaaaagtacctgcccgggcggccgctcg

SEQ ID NO: 10167 - DNA, 944 bp, Homo sapiens
  misc_feature 1, 2, 3, 4, 5, 6, 7, 8, 9, 10, 11, 12, 13, 14, 15, 16, 17,18, 923, 935, 936, 937, 938, 939, 940, 941, 942, 943, 944: n = A,T,C or G
nnnnnnnnnnnnnnnnnnagtatgataataaagatagaagggaaaaaaaggtaagggagattaagcaggcggagagtgaaggaagaaaagggatgaggagcactagtgaagaaagaaggcgaggtcgaaaagactgcctcttgaaatgcacacaataaggtatgcacacttttttatttgagcttataagattggctcctttgcatatataagatacaagccatctggcacgatcaccccctcatttccctatctttgttccgacatggttcctctttacaacacaagagcaaattaccctcttatttgaaagcacccttgtcttcaacacgcgctcaatgacaattttatttaccatattcgatcctttgaatgaagagatcaaaagggcatgcacaggtcaatcctctgcacacatataaaaaaaaaaaaaaaagctttctttgtgtttaatgaaaagggttttaccatgaaagagatgcctaactcaatcagcaacagaagtggatctgaagaacacctatcaacaattacttctattagagtcacatagaccttcatttgttccatactgcctgaagctgcaaaaggccacctgcaggaattccagatgtggacaatagttagcggtgtttgtacccagtgcattcacattaccatagcggccccaaatgcagggatggccaaagtggtctgaggaggccaagacggggtggggagtatgtttaagatgagttccgttctatgtcctccaacttagactgtcttttggttcacagagtgcaacaatattttaccaatggaaaaacaagtattttaatttaccttccagcagagttcctgggaagaattttgttgttattatttaaactataatactataacccttaaaccatccacattatctgttttattttggcaangagaaagcatcnnnnnnnnnn

SEQ ID NO: 10168 - DNA, 1595 bp, Homo sapiens
  misc_feature 1593, 1594, 1595: n = A,T,C or G
ggatcttcggcaagactcacgtctccaacaaccaagctccccaagctgagccgggctggcggaagaggcacgtgcgctgctgaatggagctggtcgctggttgctacgagcaggtcctctttgggttcgctgtacacccggagcccgaggcttgcggcgaccacgagcaatggactcttgtggctgacttcactcaccatgctcacactgcctccttgtcagcagtagctgtaaatagtcgttttgtggtcactgggagcaaagatgaaacaattcacatttatgacatgaaaaagaagattgagcatggggctctagtgcatcacagtggtacaataacttgcctgaaattctatggcaacaggcatttaatcagtggagcggaagatggactcatctgtatctgggatgcaaagaaatgggaatgcctgaagtcaattaaagctcacaaaggacaggtgaccttcctttctattcacccatctggcaagttggccctgtcggttggtacagataaaactttaagaacgtggaatcttgtagaaggaagatcagcattcataaaaaatataaaacaaaatgctcacatagtagaatggtccccaagaggagagcagtatgtagttatcatacagaataaaatagacatctatcagcttgacactgcatccattagtggcaccatcacaaatgaaaagagaatttcctctgttaaatttctttcagagtctgtccttgcagtggctggagatgaagaagttataaggttttttgactgtgattcactagtgtgcctctgcgaatttaaagctcatgaaaacagggtaaaggacatgttcagttttgaaattccagagcatcatgttattgtttcagcatcgagtgatggtttcatcaaaatgtggaagcttaagcaggataagaaagttcccccatctttactctgtgaaataaacactaatgccaggctgacgtgtcttggagtgtggctagacaaagtggcagacatgaaagaaagccttcctccagctgcagagccttctcctgtaagtaaagaacagtccaaaattggcaaaaaggagcctggtgacacagtgcacaaagaagaaaagcggtcaaaacctaacacaaagaaacgcggtttaacaggtgacagtaagaaagcaacaaaagaaagtggcctgatatcaaccaagaagaggaaaatggtagaaatgttggaaaagaagaggaaaaagaagaaaataaaaacaatgcagtgaatcacagatgtctcctgaaagaactcttttagatgaaatcattctactcaaatgtaccttaattttttttttttccctgagtaaaagcaagaaatttcttcctttggaaaaaatatatatattaaaaaaccacttttagatggttttttttaaaaaaaaaaaaaaaactggtaaaattacttttggcagacagtgttttatgaattatgtatcatgttgatatataatatgttaatgtgtcatgtaatttttactttgtacaaagcaaataaagatctttctcaaaatatactgtaaaataatataaaatattgaacacattctttatcannn

SEQ ID NO: 10169 - DNA, 1123 bp, Homo sapiens
  misc_feature 1, 1120, 1121, 1122, 1123: n = A,T,C or G
nacgagtggtaggagtcttcttgcccctccttcccctttacccttcccttcccgggagaggctgggacccggcaccaggcagtactgtggccgctgcggactcagctccgagctgggtcaggttgcggagactccaggccgcttccagggcgagtactcctgattgtgacatcacattcatcccctgggcgatggagcttgtcactgggaaggaatactcagtcggagaatagccaacaagatgggttactgggagaatctcttcagtggcactgagtggaggcatcagggggttggagccttgtgaacagggaacctggcccccaacacttggaaggacctgggtttcagtgatgagacatggggtatgatgtaacccgtttccagggggatgtggacgaagatcttatctgccctatttgcaggggagtcttggaggagccagtacagaccagctttggatagcagccatgcactctgcattgtgatgtgaaagctgccaccttcaataggtcatttctctgccagccttgccagaccagagtcagttgtatcatcctggggcaagtatgaggagaagctcacgattaccaggcacctcattgtgaacatgctttctgcaacgcctgcatcacccagtggttctctcagcaacagacatgtccagtggaccgtagtgttgtgacggtcgcccatctgcccccggaacctcggaatcaagcgggaacacggtggtcaaaagtggacaatggctgggaacacgcgaggacagggcggaaagccgagccgggtgggcaacgccaggtcacacccagggggagggggaacaaaccgggaagggcggggcccggtgaccgggcgtgggccgcggaagcccagcagcgcagggccccaccaaatgtgcataaagcagagagggaagaggataaccacaagaaaccaccaccacaggcggaaacacgccgcacacaccaaccggagggcagaagacacacctgccaggaacggcagcggagacaaccaaacacagaaggagaagacacgggggcgcagcacaaagcacgagagcgtgaccgaacaaacacggaaggtgagaggccgggctcgcagccaacagaannnn

SEQ ID NO: 10170 - DNA, 337 bp, Homo sapiens
  misc_feature 1, 2, 3, 4, 5, 6, 7, 337: n = A,T,C or G
nnnnnnncaggtacgcggggagaatcaaaagaggaaaccaacccttaagatgagctttccatgtaaatttgtagccagcttccttctgattttcaatgtttcttccaaaggtaagcataagagtcaaagaagtcccaacccagctttccctgaaagtgactctcagtaactcttttgctttttataggtcagtctccaaaagattcgaatgccttggaaacctggggtgccttgggtcaggacatcaacttggacattcctagttttcaaatgagtgatgatattgacgatataaaatgggaaaaaacttcagacaaaaaaaaaaaaaaaaaaaagn

SEQ ID NO: 10171 - DNA, 911 bp, Homo sapiens
gctccaccgcggtggcggccgcccgggctggtgcgcgggggagaccaagggctaaagctgggaggtgagtctgtcaccttgagccgggcgagcgctgtgggccaagcaggggttgcagggcagtaggagtgcagactgaaaaaatgcagaccgccggggcattattcatttctccagctctgatccgctgttgtaccagggtctaatcaggcctgtgtctgcctccttcttgaatagcccagtgaattcatctaaacagccttcctacagcaacttcccactccaggtggccagacgggagttccagaccagtgttgtctcccgggacattgacacagcagccaagtttattggtgctggggcagccacagttggtgtggctggttcaggggctggcattggaaccgtgtttggcagcttgatcattggctatgccaggaacccgtctctcagcagcagctcttctcctatgccattcttggctttgccctgtctgaggccatggggctttgctgtttgatggtcgccttcctcatcctcttcgccatgtgaaggctccatggggggtcaccggcctgtttgctactgcaagctccacaccattcttggtgctggggtgtgttaaggctttaccattaaacacaacgtttctctcaagaaaaagtaattgctgtgtgacgatgatgacgatgatgatgaagaggattgttggttgcggctgccggtgctaatgatttgttgagacacaagttgggagacagcgccggagaaattaaactgagaactccggcaaaaggaacaaccgtcagcagagtgggagagaccacacataataacgccgggggagacggggtgtcctcaacacgggagccgagcacaggcacacggcgaacataggatgtccccagagg

SEQ ID NO: 10172 - DNA, 1321 bp, Homo sapiens
acgcggggagaagaaactgagttcaagagagagaaacattgctaacaggaattagattcacaaggccaacagacaacccaaagtcattaagccatgagagtggaatgaatctatgaaaactcaatgaagacagaacaagagaaaaatcttttcagccacgatgaattaggagaacaagatgtcaaattacactgatgctgagtcaagcttctcaaagcaagagataatcagagttgccatggagaaaattccagtgtcagcattcttgctccttgtggccctctcctacactctggccagagataccacagtcaaacctggagccaaaaaggacacaaaggactctcgacccaaactgccccagaccctctccagaggttggggtgaccaactcatctggactcagacatatgaagaagctctatataaatccaagacaagcaacaaacccttgatgattattcatcacttggatgagtgcccacacagtcaagctttaaagaaagtgtttgctgaaaataaagaaatccagaaattggcagagcagtttgtcctcctcaatctggtttatgaaacaactgacaaacacctttctcctgatggccagtatgtccccaggattatgtttgttgacccatctctgacagttagagccgatatcactggaagatattcaaaccgtctctatgcttacgaacctgcagatacagctctgttgcttgacaacatgaagaaagctctcaagttgctgaagactgaattgtaaagaaaaaaatctccaagcccttctgtctgtcaggccttgagacttgaaaccagaagaagtgtgagaagactggctagtgtggaagcatagtgaacacactgattaggttatggtttaatgttacaacaactattttttaagaaaaacaagttttagaaatttggcttcaagtgtacctgccattgcggggacctgtaggtgggcatgctaggtccagccccacccattatggtccccacccctccagtgcctagcagggagttcagaccactgtaatttacataggtcagccatttcctgaggcaacaagaatcctttggtgaataaaggagtatcaagaatatacccagccacatgagctacagctggctcttacctataagtaccatctactggcttgttggttgaactgcgcagcccaatattaagcctaccaaaagaagtggatagggctatagaagcaaagacaaaagactctacccagtattctctatcacataaggaagaaggaaaagggaaagagaaagagcaagaaaaaacccacaaagtattata

SEQ ID NO: 10173 - DNA, 447 bp, Homo sapiens
  misc_feature 1, 445, 446, 447: n = A,T,C or G
ncttaccgccgtggcggccgcccgggcttgtacctacttatttccagctgatggtagaccaaagaatttgcaggtggatggtttggtatcactgtaaataaaaagagggcctgaaaaaaaaaaaaaaaaaaaaaaaaaggagtacccaagatccccaaataaattagtaaaagtgccattaagaattatcagacatagaatgtgtttcaaatacaaatttgttaaatccaaaagatacagtaattttattacataaaatttctcctgcgtgctaaaaatgctaacttacaagacataatatttgtagtagagggaatcacggtcggctcgttgaattctttttcattattgaagaatagaacaataggtagtggacatagaagcactcagagtcctttgaaattcaaggttgttacattatgttccaccaaaataagactaccannn

SEQ ID NO: 10174 - DNA, 355 bp, Homo sapiens
acttttttttttttttttttttttttttatcatgaagaacacaaaatattacccaaagatgaagatttaacaaaattaataatttttactgtttcaccaaggactttatagtgaaaccgactttttttttttttacactgcaagtatgtggcagtcaagaacgcaatggctactaactagcaccgtttcatgccactaatgctgattcacactacagtgcaagtaatttaattttacccatggtgctcttgcaccatcagcacaaatgtcaacacagtggaagagccaaacaacattttagttttttgttttgtgtcattggggggctacatatgtcaagcagtatgctataggt

SEQ ID NO: 10175 - DNA, 944 bp, Homo sapiens
  misc_feature 1, 944: n = A,T,C or G
nctggaattcggctttcgagttgctgccgtgggaggtccctgaggccgctgaggtcgttcgtgtctgttgaacggctgtgggcgtcttgctgccttgggtagggggttaaaatcgttcttgagaggaacgtctctgtgcgaagagataatgagtttagctctgagaagtgagcttgtagtggacaaaacaaagaggaaaaaaagaagagaactgtctgaggaacagaaacaagaaattaaagatgcttttgaactatttgatacagacaaagatgaagcaatagattatcatgaattaaaggtggcaatgagagccttggggtttgatgtaaaaaaagctgatgtactgaagattcttaaagattatgacagagaagccacagggaaaatcacctttgaagattttaatgaagttgtgacagactggatattggaaagagatccccatgaagaaatactcaaggcatttaaactatttgatgatgatgattcaggtaaaataagcttgaggaatttgcgacgtgttgctagagaattgggtgaaaacatgagtgatgaagaacttcgagctatgatagaagaatttgacaaagatggtgatggagaaataaaccaagaggagttcattgctattatgactggtgacatttaaagaattacaaggataaacactaagaatgttgcagttaccatcttatattctattttgtgtgcctggagccatgtgaaaaaaccaacttagttcttttatctaaaggaccaaaaataagctcttatatatctgggttttactacggtaagtttctggtatgaccgggtggcagaccgaacgtaggtggtattaaaagaggttattaaggttaatgctaaaaaaaaaaaaaaattgggcgcgcccaaatttaaattgggcgccagagagggacggattgaaggcgggggtcaan

SEQ ID NO: 10176 - DNA, 618 bp, Homo sapiens
gctttagttatattgttatgccatattatggtcagtaacacgagtaaaggcctaattcatctgctttctaaattggttctgtacttttctagaaaagcctacatgtatatacttagttacagctgcacttccccattacttatttttaggaaggttatagagatggaatagatgctggcaaagcagttacctcttcaacagggcttcaatcaaggttataagaaggtcacaagtcattataaactatggacgactccgaggaacattgaggtaatttttaaagtctaaatgctgaatcattttaacctcaatactactggaggatgtttctgtataaataaagtgtttaaactgaaatgcttttcctggtgctaaatacactaaagcgtgtcgcagatcatagaattatattgccttcaaaaaggcaaaatcttttatcacctcatctactttaatgtgtgaactacatatcgccttttcgtgcacagaaatggtaagaagatgtatacttctgctacctgaacaattatctatctcattgaaaggtcttcagattttgaataaaacttgtagtacatggcaagaaagaaatgggcaaaaacgggcaatgctgtgaga

SEQ ID NO: 10177 - DNA, 490 bp, Homo sapiens
  misc_feature 150, 151, 490: n = A,T,C or G
acgcggggtttttagctttttaaatctgctttggtatactccataaagtttgtgccattggattattctgttcctatagaaatccccactataaaatgtaaaccagacaaacttccattattcaaacggcagtatgaaaaccacatattnntgttggctcaaaaactgcagaatccttgctgttacggtcacacccagtttcatctgttacctgacaaattaagaagggaaaggcttttgagacaaaactgtgctgatcagatagaagttgtttttagagctaatgctactgcaagcctttttgcttggactggagcacaagctatgtatcaaggattctggagtgaaggcagatgttactcgaccttttgtctcccaggctgtgatcacagatggaaaatgcttttcctttttctgctaccagctaaatactttggcactgactacacaagctgatcaaaataaccctcgtaaaaatatatgttggggn

SEQ ID NO: 10178 - DNA, 1913 bp, Homo sapiens
  misc_feature 1: n = A,T,C or G
ngatgctaagcagaatagacgcagtgtggtaacacttcgactgtgatacatacttgtacaatagtctaacgactctgttgtgaaagaaggggacctatgggcttcacacagggttttttcggttcagccttccatcggtgcccccatagatgaccaagggaatgctgaccaggagaacaacacccccagcccaagaaaaggcagcccaaattctttggtctttatcccacctggtctggattttaaataagagatgaagaagaatggaaaataagcatgtagcgatgtactcctacgactccaaaaatatccttcatggagggtatgaagatcaccaacaagttgataacaaccaagagtatgcaggtaaccacggtatgacgacataaattaaactttgttttcttagccagttcaaataaagatgaacgaaccgtgaaaaataacaccggcactgtgaggatcacagcaacaatgacagccagccgcactgtcaggatgagaatgtcatctttactctgatatttgtgaaggaggtcggactgcacgttgtcatagaatgtcaagtagccaaaaatggcagtcaagaagtacataacaaacatggcgaaaaaggagatgtttgaaaccatctgcatttttttctgtgatcggtctttaagctcactgtaaattggcaggactgacgggtggcaaacaaatgcaaatgcaatggtgggtaaagcatacacggtctttgaattgaaggtaacatattttggcgtacacgtgtcagcatttgttgaattagcacttattgttgaatttagctctggaacaatgcagggaatttgaaatttcttgtaaataaccacaattaggaaaaaaaccatacagctcaaggaaaatccactagtatagccaagataccctaagttcttcaagagacacagagggagaattatgccaaaggtaactatcaccaccagaacgcggccatccacgtaccaggctgaaaatgtctcttcctttcccattagaaactttatggcagagggtagttcattttttacgatgaagaggtagctcagcattgctccagtgttctgtagagaggtggctccaaagattacgaacttccctgtggtgccaaagacttgttcccccagcttttcatacaccatgcagcctgtttcttttgaacagatcaataggaggtttattgaatatatagacagcaatgtcactgaagtcaaaagtaccagaaaaagtaggattccagtgtttgccagggcaaaggcgagtcccaaaatcccactgcccataatggcgttgcttaggttaaaaacagacatgcctaaggaggttgtacctggaatatactcatcacacttctttttttccaaatggctgtttgtgagacttcttctactttcacgatcagaaataaacttgctatttatctgaccattttctacttcggtgaaatcattggagtcattgctaatgttatcatcctcgggcactgtcatgttttgcaactcagttaattcgagtccacttttgaaatgcatcatgattagaaagtgtctgtagtttgaaaattagtccaaatttctcctgttctgagtgtatttagaagtagataccaaaatggaagcttgacacccctgttagctcagcaagcagagacgatcactctatatatattgttgtatggccttccagggtttttctatgcacatagatatagtgcctggcacacagtagacactcaataaatatctccggaaataaagggaaaggtggcaaaaggcgatgtggaggtgtccgcccttccggggtttttaccctcggcagtttgatgtcctttgtgtcaaggtctggctgcggaggccgggaaaatgtggcccccgtcagtaagggttcggacg

SEQ ID NO: 10179 - DNA, 2098 bp, Homo sapiens
  misc_feature 1946, 2009, 2069, 2078, 2096, 2097, 2098: n = A,T,C or G
tcgacccacgcgtccgggcggatcaggagaccggatttccctcggggttacttttgttcactagaaatttggtctaggaggttgtgatccagcctagcgggagccagacgccgacccaagcggaagggacgttaggtgtccgccggaggtgtcgttggtgtgttgcgcgactggccttgagggagagctggggcctgctcccggagagatacggctatgtcgatcgaaatcgaatcttcggatgtgatccgccttattatgcagtacttgaaggagaacagtttacatcgggcgttagccaccttgcaggaggagactactgtgtctctgaatactgtggacagcattgagagttttgtggctgacattaacagtggccattgggatactgtgttgcaggctatacagtctctgaaattgccagacaaaaccctcattgacctctatgaacaggttgttctggaattgatagagctccgtgaattgggtgctgccaggtcacttttgagacagactgatcccatgatcatgttaaaacaaacacagccagagcgatatattcatctggagaaccttttggccaggtcttactttgatcctcgtgaggcatacccagatggaagtagcaaagaaaagagaagagcagcaattgcccaggccttagctggcgaagtcagtgtggtgcctccatctcgtctcatggcattgctgggacaggcactgaagtggcagcagcatcagggattgcttcctcctggtatgaccatagatttgtttcgaggcaaggcagctgtcaaagatgtggaagaagaaaagtttcctacacaactgagcaggcatattaagtttggtcagaaatcacatgtggagtgtgctcgattttctccagatggtcagtatttggtcactgggtctgttgatggattcattgaagtatggaactttactactggaaaaatcagaaaggatcttaagtaccaggcccaagataactttatgatgatggatgatgctgtcctctgcatgtgtttcagcagagatacagaaatgttagcaactggggcccaagatggaaaaatcaaggtgtggaagattcagagtggacaatgtttaaggagatttgagagggcacacagtaagggtgtcacctgtctaagcttttctaaggatagcagtcagatccttagtgcttcttttgaccagacaattagaattcatggtttaaaatctgggaaaaccctgaaggaatttcgtggccattcctcctttgttaacgaagcaacatttacacaagatggacattacattattagtgcatcctctgatggcactgtaaagatctggaatatgaagaccacagaatgttcaaatacctttaaatccctgggcagcaccgcagggacagatattaccgtcaacagtgtgattctacttcctaaaaaccctgagcactttgtggtgtgcaacagatcaaacacggtggtcatcatgaacatgcaggggcagattgtcagaagcttcagttctggtaaaagagaaggtggggactttgtttgctgtgccctctctccccgtggtgaatggatctactgtgtaggggaggactttgtgctctactgtttcagtacagtcactggcaaactggagagaactttgacagtgcacgagaaggatgtgattggtattgcacatcaccctcatcagaacctgattgctacctacagtgaagatggactcctaaagctctggaaaccataattcaacttttctttttaaatcagctcgaaagcatgtacttaaatgaagcatattcatgtaatgtgcttttttttttttttgccagcttttctaagcaaatagattgtctgaattagtcacagaaaaactttgggaaattctgtttggtggacttactcttctttatattttaaggatatttttaaggnattagtttatcttcttctaactggtgcagtcacttaatggtttcattaatcttcgacctgganagggaaatactgatatttctagaaaaaaattctactcctctgattatttgaaatgctganggaaaatgncccttccatagtaaaacnnn

SEQ ID NO: 10180 - DNA, 257 bp, Homo sapiens
acttttttttttttttttttttgcagaaaataattttgtaaactgtcacttcgcgggcagggaggatcgatgccacgtgggccccaaccgcctgggggtagtgacattccaggccttcattgacttcatgtcccgcgagacagccgacacagatacagcagaccaagtcatggcttccttcaagatcctggctggggacaagaactacattaccatggacgagctgcgccgcgagctgccacccgaccaggctgagt

SEQ ID NO: 10181 - DNA, 1693 bp, Homo sapiens
  misc_feature 1, 2, 3, 4: n = A,T,C or G
nnnncttccggcggcgtgacctgaccgcaagaggccaatggagtgtgggagctgaaagggtcttcgctggcggccggtaactggcggcggttgggaacggccgagtgtggctcttctggtgtttcagcttggggagagaggagtggccttcctcttgcagttgaggccggcgccgagccggacttcagccggatctcgtggcggagcccatcttgctccctctcccaggcctttacccgctccctaggattcccgggccctgtaggtgggagttgggagacgacagtactgcttttaaagagacagtgttagggatcttggaagcacagccaacatgtgtgacattgaagaagccactaaccaactcctagatgtgaaccttcatgagaaccagaagtctgtacaagtgacagaaagcgacctcggaagtgaatctgagcttctagtcactattggagccactgtacctactggctttgagcaaacagctgcagatgaagtcagagagaaacttgggtcatcatgcaaaatcagcagagaccgtggcaagatatattttgtcatttcagtggaaagtctggcacaggttcattgtctgagatcagttgataacttatttgtggtggttcaggagtttcaagattaccagttcaaacaaacaaaggaagaagttctaaaggattttgaagacttggctggaaaactcccatggtcaaaccccttaaaagtgtggaaaattaatgccagttttaaaaagaaaaaagcaaagcgcaaaaagataaatcagaattcaagtaaagagaagattaataatggacaagaagtcaaaatcgatcagagaaatgttaaaaaagagttcactagccatgctttagattctcatatcttagattattatgaaaatccagccatcaaagaggatgtatcaacattaataggtgatgatttggcatcttgcaaagatgagactgatgaaagctcaaaagaagaaactgagcctcaagtgctgaagtttagagtcacatgcaacagggcaggagagaaacattgctttacctcaaatgaggctgcaagagattttgacttcttgtccattattaatcttctctttacttgaattctgatttatctttttgcgctttgcttttttctttttaaaactggcattaattttccacacttttaaggggtttgaccatgggagttttccagccaagtcttcaaaatcctttagaacttcttcctttgtttgtttgaactggtaatcttgaaactcctgaaccaccacaaataagttatcaactgatctcagacaatgaacctgtgccagactttccactgaaatgacaaaatatatcttgccacggtctctgctgattttgcatgatgacccaagtttctctctgacttcatctgcagctgtttgctcaaagccagtaggtacagtggctccaatagtgactagaagctcagattcacttccgaggtcgctttctgtcacttgtacagacttctggttctcatgaaggttcacatctaggagttggttagtggcttcttcaatgtcacacatgttggctgtgcttccaagatccctaacactgtctctttaaaagcagtactgtccggccgccagcgaagaccctttcagctcccacactccattggcctcttgcggtcggacgcgtgggtc

SEQ ID NO: 10182 - DNA, 1707 bp, Homo sapiens
aacacaggggcagtctccaggacctccacaccattaacaagatgagccttgtgctcccttgggctctagagaggaagcccctctgagccctcagcccctctttcctccctctcctaaagtaatttgatcctcaggaatttgttctgccctcatctggccctggccagctctgcatttgacaaatgccaggaagaggaaactgttgagaaaacggaactactggggaaagggagggctcactgagaaccatcccggtaacccgaccgccgctggtcaccatgaaccacattgtgcaaaccttctctcctgtcaacagcggccagcctcccaactacgagatgctcaaggaggagcaggaagtggctatgctgggggcgccccacaaccctgctcccccgacgtccaccgtgatccacatccgcagcgagacctccgtgcctgaccatgtcgtctggtccctgttcaacaccctcttcatgaacacctgctgcctgggcttcatagcattcgcctactccgtgaagtctagggacaggaagatggttggcgacgtgaccggggcccaggcctatgcctccaccgccaagtgcctgaacatctgggccctgattttgggcatcttcatgaccattctgctcgtcatcatcccagtgttggtcgtccaggcccagcgatagatcaggaggcatcattgaggccaggagctctgcccgtgacctgtatcccacgtactctatcttccattcctcgccctgcccccagaggccaggagctctgcccttgacctgtattccacttactccaacttccattcctcgccctgtccccggagccgagtcctgtatcagccctttatcctcacacgcaccttttcttacaatggggcgctccacacacgcggcacactcgtccgggaccacagaacacacacgacacaaacacacacatgtgtgccacagccccagaaacttaacacgtggggcggcccaataaaacgtccacgcacaacagcgcgacaggggcccaccaaaccggcgcgggcaacacacggagagcgcatagcagcccacctccccccacccccccacacccccgacccgccgacagccgccaccacaccacacacacacagcgcaccccgccgaaccaacacaacccgcaccgccgccacaccacccgccgacacgacagccaaccacccgccacacccccaccacccccccacaccccaccacccccaccaagtcgctccgtacggaggccggaggtggccgcgcgacagcggtagggagcacttctgcccggcctgccgacaagcccgacggcacacgagacgccaggagccagacgcacgaccggcgcgcccgcagccaccacaaccgcaacgaggcgcgcgcccaggcccacgtgcccaccacacgcgcgccaaccacaccgcgtcaccgcagcgacccaaaccccccgacccccccaacacgacaacaagacaggcacacaaaccagcagcacaaaggactgagccagcagaagaaacgcgcccagcaacagcgggcgaagaaccgcaacagtaggagggaggagaacgagtccgcaccccacgcgacgagacggcgtagaactggggacagaggggacggcggacggaagccagaaggagatgcgacggacgaggccgcactaggtgaacaccgccgacagcaaagcgac

SEQ ID NO: 10183 - DNA, 1611 bp, Homo sapiens
  misc_feature 1: n = A,T,C or G
ntccaccgcggtggcggccgccgggcaggtccttgaaattgaaacatatttgtgcaatgatcattaagctttttgtccttgttgttttaaaatgaggcttatacagagtgagttgagagtcaagtagccttcgctgtgagacggtaatgcagttatataatagatacccttgactttgccagattcatcacaatactgcttatacaggaaagttttctcagaaaggaaaatccattagtatcagtcccatcaagccaaacagaatgaagacctttgatagtaatagcaagaggttacaaatagcagggaggaggcgagtagtgaatgtcactgtgattgcaaacccttacctgtattatcacacgtagtcctcacaacaaccttgtgagacaagtgttgtgttcctcattttttcagaggggaacacagacccagagaggttaagaaatttgcccaagataacaagtaaaaggcaaagttggttgcaaaagaggtgtttctgaattcaagggccatactctctctctgacaacatgctctaagtccatagagtaagcactctagtatgaaaaaaagtttcaaggaacgaggccatgaaaatgagactatttgacatctcagatctgtctgggatgttatggaggtttttaaaaataaagttgaaaaaagaaaatgaatcatgtttatacataaaaaaaatcacatgtaacacatttcaagtgtttgaaaataaaaccaaaatctaaactttagtcttcaagcagacattcagtgttactttagaaaactcactgaattaggtggaaatgatggaataatactattcatggccagctattaacacagaagaacatggcagtgtgtgtctggaacggcatgcacaatttgtaaacctttttcaaatatcatttaatcaactcagaataaagtgccctgtagccaacagtgcctctttacttgcttctctgggaaatacatggtactaaattagtatcacaaagtttgggaatatgcaaaataatggataaccatttttcaaaatgtacattctctgaagaggaagcagctggttggacaggatttcttgaagagccaggtgctaagggcatcaggtcgacatccatagtaaccatgtgccataacatctacacatttccacttgttttacagacaaggtaacaggcagaaggaaaatccagagtcttgcagtaagcagatgacaaaacttcaatatgcttgggcaccacttaggtgaccccagggagatttagtgtggccttaggaaagcaaaagagcactttttattggaaatatgagcttgtcactgggaaagatttgtaaaattgatcaagaacttgatttataattatgcctcaaaaaaaaagttctcatttagtagtggagcaatctagaaaacataccttttttgtttgtttggaagatcctctttccctggctgtattgtagtgtttgctatttgatgtggaaataactaataacttaagattttggaacagaacaccctttagatttccaaaacacaattcttatttcagggaagacagaccaaaaatatctcctgagatcattggtttctttataaattgtggt

SEQ ID NO: 10184 - DNA, 2864 bp, Homo sapiens
gtcgacccacgcgtccgggacagtccgacccccacctctccctcctccttccccagtcgttcgccggaaagcatttgtctcccacctcttcataacaacaattaatttcctctggggcctgaggagggcagaatttcaaccttcggtgtgcttgggagtggcgattgtgatttacacgacaaaatggtcaggtttagaatagttgttcgtggttgaaagacttggataaatgtggatgagatagaaggggaagccgaggtgctcggtggagctcatggcagtgccctttgtggaagactgggacttggtgcaaaccctgggagaaggtgcctatggagaagttcaacttgctgtgaatagagtaactgaagaagcagtcgcagtgaagattgtagatatgaagcgtgccgtagactgtccagaaaatattaagaaagagatctgtatcaataaaatgctaaatcatgaaaatgtagtaaaattctatggtcacaggagagaaggcaatatccaatatttatttctggagtactgtagtggaggagagctttttgacagaatagagccagacataggcatgcctgaaccagatgctcagagattcttccatcaactcatggcaggggtggtttatctgcatggtattggaataactcacagggatattaaaccagaaaatcttctgttggatgaaagggataacctcaaaatctcagactttggcttggcaacagtatttcggtataataatcgtgagcgtttgttgaacaagatgtgtggtactttaccatatgttgctccagaacttctgaagagaagagaatttcatgcagaaccagttgatgtttggtcctgtggaatagtacttactgcaatgctcgctggagaattgccatgggaccaacccagtgacagctgtcaggagtattctgactggaaagaaaaaaaaacatacctcaacccttggaaaaaaatcgattctgctcctctagctctgctgcataaaatcttagttgagaatccatcagcaagaattaccattccagacatcaaaaaagatagatggtacaacaaacccctcaagaaaggggcaaaaaggccccgagtcacttcaggtggtgtgtcagagtctcccagtggattttctaagcacattcaatccaatttggacttctctccagtaaacagtgcttctagtgaagaaaatgtgaagtactccagttctcagccagaaccccgcacaggtctttccttatgggataccagcccctcatacattgataaattggtacaagggatcagcttttcccagcccacatgtcctgatcatatgcttttgaatagtcagttacttggcaccccaggatcctcacagaacccctggcagcggttggtcaaaagaatgacacgattctttaccaaattggatgcagacaaatcttatcaatgcctgaaagagacttgtgagaagttgggctatcaatggaagaaaagttgtatgaatcaggttactatatcaacaactgataggagaaacaataaactcattttcaaagtgaatttgttagaaatggatgataaaatattggttgacttccggctttctaagggtgatggattggagttcaagagacacttcctgaagattaaagggaagctgattgatattgtgagcagccagaaggtttggcttcctgccacatgatcggaccatcggctctggggaatcctggtgaatatagtgctgctatgttgacattattcttcctagagaagattatcctgtcctgcaaactgcaaatagtagttcctgaagtgttcacttccctgtttatccaaacatcttccaatttattttgtttgttcggcatacaaataatacctatatcttaattgtaagcaaaactttggggaaaggatgaatagaattcatttgattatttcttcatgtgtgtttagtatctgaatttgaaactcatctggtggaaaccaagtttcaggggacatgagttttccagcttttatacacacgtatctcatttttatcaaaacattttgtttaattcaaaaagtacatattccatgttgatttaattctaagatgaaccaataaagacataattcttgtgacttttggacagtagatttatcagtctgtgaagcgaagccagcttcaaaacatatccccaagatttgtacttatattttcaaaagggcctggccagttatataaacctgtttttgaattataatgattaattaaaattgcaagtaggtgttttttccagtgtagttagtaaaatacttgtattttacagtgttgcataaactctagtgcttaactaactttactctaaaaattactgttgaacatcttaaatatttttctatattttctactttcatagccatattttaaccttttcaacttactggtgaccaagcttttaggtgataaagaataaaagagggaagggaagagtaaggaagctataagaaaaatagatctgattctttgttcctttacctgttagacttacaaaaagtttgtttttctaataaaatttgtatcaactttggggcatattaggttgaggccttggctcctgcctgtagtcccagctacttaggaggctgagagaggaggatcgcgtgaacctggaagtttgaggctgtagtgagctatgattgcaccagtgcactccagcttggatgacagagtaagaccctacctctaataaaaatttttaaaattgtaaaacattataaaattaatcagttattttaatctgaagccaagaacatgtagaatgttatgattagagtttatcacatattaatgtatactggcaaattgtgttact

SEQ ID NO: 10185 - DNA, 771 bp, Homo sapiens
  misc_feature 1, 2, 759, 760, 761, 762, 763, 764, 765, 766, 767, 768, 769,770, 771: n = A,T,C or G
nnccgtcgtctctattgacggtttcagccatccggcggggggttcctggaatgcatccttgtgggaagcgtggccgggcgcacgtcgcgctgcgcttgcgcactgaggtttcgcgtaaggaaccaataggacggaggagtgggcgggctgttggcattaacccggggggattccggttccggtgggcctccatcagcaagctccagtgctacgtgtccctggcattttaggtgtcggttgggtaggcagtcatggatcaggtaatgcagtttgttgagccaagtcggcagtttgtaaaggactccattcggctggttaaaagatgcactaaacctgatagaaaagaattccagaagattgccatggcaacagcaataggatttgctataatgggattcattggcttctttgtgaaattgatccatattcctattaataacatcattgttggtggctgaatacattttggaagagagtttttcatcttagagattggtgaacaagtgtgagggtgtgagaaactcacagaatacaaatttgcctgtatgttttgtgggtttttttttttcctttcaagatgttttctatttctaaattaaagtaatttcaaagtaaaaaaaaaaaaaaaaaaaaagcggccgcgaatttgggggggccctttattttttttaaaaaaaaaccccccccccccccccccgggccttgaaaaaaaaaaaaaaccccaaggggggggaaaacttttttttgggcccttttaannnnnnnnnnnnn

SEQ ID NO: 10186 - DNA, 2017 bp, Homo sapiens
  misc_feature 1, 2007, 2008, 2009, 2010, 2011, 2012, 2013, 2014, 2015,2016, 2017: n = A,T,C or G
naacaaatcacccagccgatcactggagctgacttccgcaatcccgatggaataaatctagcacccctgatggtgtgcccacactttgctgccgaaacgaagccagacaacagatttccatcagcaggatgtgggggctcaaggttctgctgctacctgtggtgagctttgctctgtaccctgaggagatactggacacccactgggagctatggaagaagacccacaggaagcaatataacaacaaggtggatgaaatctctcggcgtttaatttgggaaaaaaacctgaagtatatttccatccataaccttgaggcttctcttggtgtccatacatatgaactggctatgaaccacctgggggacatgaccagtgaagaggtggttcagaagatgactggactcaaagtacccctgtctcattcccgcagtaatgacaccctttatatcccagaatgggaaggtagagccccagactctgtcgactatcgaaagaaaggatatgttactcctgtcaaaaatcagggtcagtgtggttcctgttgggcttttagctctgtgggtgccctggagggccaactcaagaagaaaactggcaaactcttaaatctgagtccccagaacctagtggattgtgtgtctgagaatgatggctgtggagggggctacatgaccaatgccttccaatatgtgcagaagaaccggggtattgactctgaagatgcctacccatatgtgggacaggaagagagttgtatgtacaacccaacaggcaaggcagctaaatgcagagggtacagagagatccccgaggggaatgagaaagccctgaagagggcagtggcccgagtgggacctgtctctgtggccattgatgcaagcctgacctccttccagttttacagcaaaggtgtgtattatgatgaaagctgcaatagcgataatctgaaccatgcggttttggcagtgggatatggaatccagaagggaaacaagcactggataattaaaaacagctggggagaaaactggggaaacaaaggatatatcctcatggctcgaaataagaacaacgcctgtggcattgccaacctggccagcttccccaagatgtgactccagccagccaaatccatcctgctcttccatttcttccacgatggtgcagtgtaacgatgcactttggaagggagttggtgtgctatttttgaagcagatgtggtgatactgagattgtctgttcagtttccccatttgtttgtgcttcaaatgatccttcctactttgcttctctccacccatgacctttttcactgtggccatcaggactttccctgacagctgtgtactcttaggctaagagatgtgactacagcctgcccctgactgtgttgtcccagggctgatgctgtacaggtacaggctggagattttcacataggttagattctcattcacgggactagttagctttaagcaccctagaggactagggtaatctgacttctcacttcctaagttcccttctatatcctcaaggtagaaatgtctatgttttctactccaattcataaatctattcataagtctttggtacaagtttacatgataaaaagaaatgtgatttgtcttcccttctttgcacttttgaaataaagtatttatctcctgtctacagtttaataaatagcatctagtacacattcaaaaaaaacagaaaagggcggccgggcgggggcccttaaaatttttaaaaaaaaaaacccccaaaccccccccgaaaacgaaaaaaaaaaaaaaagccccgggggggggaaaaccttttttggggccctaaaaagggggaaaaaaaaaaccaatccccccaaaatttcaaaaaaaaaaccttttttccccgggcctccaggggggggggggccaaaacccaaaggggtttttaattgtgggggccccccgggccccccaaaaaaaaaaaatttttttccccccccaaaaaaaaaaaaannnnnnnnnnn

SEQ ID NO: 10187 - DNA, 2658 bp, Homo sapiens
  misc_feature 1, 2, 3, 4, 2650, 2651, 2652, 2653, 2654, 2655, 2656, 2657,2658: n = A,T,C or G
nnnncgtccggtccccggcgcgccgcggggtgagcggcgccgggcctgaggtcgcccagacgccgtccggggcggagcggggtcgcgaggctgcatcccggccggcggttccggagcctcgcggctggggaggcgcggcccgggacgctcgagcttagggagatctgccttctggagactgcgccgtcctcccgggagagccagaaagaggacatggctgctgggcagcgggaagcgaggccccaggtgtcactgacgtttgaggatgtggctgtgctgtttacccgagatgagtggagaaagctggccccttctcagagaaacttgtaccgggatgtgatgctggagaactataggaacctggtctcactggggctcccatttaccaaaccaaaagtgatctccctgttgcagcaaggagaagatccctgggaggtggagaaagacggttctggcgtctcctctctaggatcgaagagcagtcataaaaccacaaagtcaacgcaaacacaagactcttcatttcagggactgatactgaaaagatccaacaggaatgtaccttgggatttgaaattagaaaagccttacatatatgaaggcagattagagaaaaagcaggataaaaagggaagttttcagatagtttcagccacccacaaaaaaatccccactatagaaagaagccataaaaatactgaattgagccaaaacttcagcccaaagtcagtgcttattaggcaacagatacttcccagagaaaaaacaccaccaaaatgtgaaatacaaggaaacagcctcaaacagaattcacaattacttaatcaaccaaaaattacagcagataaacgctataaatgtagtctgtgtgaaaaaaccttcattaacacttcatcccttcgtaaacatgagaaaaaccatagtggagagaaactatttaagtgtaaagaatgttcaaaagcctttagccaaagttcagctcttattcaacatcaaataacgcatactggagagaaaccctacatatgtaaagaatgtgggaaagcctttactctcagtacatccctttataaacatctaagaacccatactgtggagaaatcctacagatgtaaagaatgtggtaaatccttcagccgaaggtcaggcctttttatacatcaaaaaattcatgctgaagaaaacccttgtaagtataatccgggtaggaaggcatctagttgcagcacatccctttctggatgtcaaagaattcattctagaaagaagtcctacttatgtaatgaatgtggcaacacctttaagtctagctcatcccttcgttatcatcagagaattcacactggagagaagccttttaaatgtagtgaatgtgggagagccttcagccagagtgcctctcttattcaacatgaaagaattcacaccggagaaaagccctatagatgcaatgaatgtgggaaaggctttacttctatttcacgacttaatagacaccgaatcattcatactggagagaagttttataattgtaatgaatgtggtaaagccttaagctcccactcaacacttattattcacgagcgaattcatactggagaaaaaccatgtaaatgtaaagtatgtggaaaagccttcagacagagttcagctctcattcaacatcagagaatgcatactggagaaagaccctataaatgtaacgagtgtgggaaaacattcaggtgtaactcatcacttagtaatcaccagagaattcatactggagagaaaccatatcgatgtgaggaatgtgggatatcttttggccaaagttcagctcttattcagcatcgaaggattcatacaggagaaaaaccctttaaatgtaatacatgtggaaaaacttttagacaaagctcatcacgtattgcacatcagagaattcatactggagagaaaccctatgaatgtaatacatgtgggaaacttttcaaccataggtcatcccttactaatcattataaaattcatatcgaagaggacccctagaaagtagatttgtatgtgtgaaagccttaaaccaaagctcatcgaagaatacatccttgagagagatgtaataaatgtaatggatgtgaaaaaaactgtaataatttagccctcattaggtatttaattccatggataaacctcagctatataatagatatgaggaaagtgtttgtgcctgtcagacacttaaaaaaataacctgagatgaagaatttacaattgaagacattgactttagccatttgtgaaatgggtttgctttttcccttttcctacagacgtatatgctagatgtcacgtgatcatcagaaacagatatccgagtgggtggggaggtgtgctttagatttctcattagaagaccaccaaactggtaatatttttatagcattttaatagcttgatcaaattgtacctttttagagaaaaggaccaaaataaaagaaaaatgaattatgaactacctctcagtctccggggtttgtcttttctaactgatgtcaacttatgctgggttcattaaagaaagaaaacgaaaaaaacaattcgggcaacgccaaaaaaaaaacgacaagagacacaaaaagggggcgccaaaaaaacgggggccaaaaannnnnnnnn

SEQ ID NO: 10188 - DNA, 5987 bp, Homo sapiens
ccgctccctgcgctccgcccctccggctagctcgctggctcccggctcctcccgacgtctcctacctcctcacggctcttcccggcgctctcctggctcccttctgccccagctccgtctcggcggcggcgggcagttgcagtggtgcagaatggctgacctcagtcttgcagatgcattaacagaaccatctccagacattgagggagagataaagcgggacttcattgccacactagaggcagaggcctttgatgatgttgtgggagaaactgttggaaaaacagactatattcctctcctggatgttgatgagaaaaccgggaactcagagtcaaagaagaaaccgtgctcagaaactagccagattgaagatactccatcttctaaaccaacactcctagccaatggtggtcatggagtagaagggagcgatactacagggtctccaactgaattccttgaagagaaaatggcctaccaggaatacccaaatagccagaactggccagaagataccaacttttgtttccaacctgagcaagtggttgatcctatccagactgatccctttaagatgtaccatgatgatgacctggcagatttggtctttccctccagtgcgacagctgatacttcaatatttgcaggacaaaatgatcccttgaaagacagttacggtatgtctccctgcaacacagctgttgtacctcaggggtggtctgtggaagccttaaactctccacactcagagtcctttgtttccccagaggctgttgcagaacctcctcagccaacggcagttcccttagagctagccaaggagatagaaatggcatcagaagagaggccaccagcacaagcattggaaataatgatgggactgaagactactgacatggcaccatctaaagaaacagagatggccctcgccaaggacatggcactagctacaaaaaccgaggtggcattggctaaagatatggaatcacccaccaaattagatgtgacactggccaaggacatgcagccatccatggaatcagatatggccctagtcaaggacatggaactacccacagaaaaagaagtggccctggttaaggatgtcagatggcccacagaaacagatgtatcttcagccaagaatgtggtactgcccacagaaacagaggtagccccagccaaggatgtgacactgttgaaagaaacagagagggcatctcctataaaaatggacttagccccttccaaggacatgggaccacccaaagaaaacaagaaagaaacagagagggcatctcctataaaaatggacttggctccttccaaggacatgggaccacccaaagaaaacaagatagtcccagccaaggatttggtattactctcagaaatagaggtggcacaggctaatgacattatatcatccacagaaatatcctctgctgagaaggtggctttgtcctcagaaacagaggtagccctggccagggacatgacactgcccccggaaaccaacgtgatcttgaccaaggataaagcactacctttagaagcagaggtggccccagtcaaggacatggctcaactcccagaaacagaaatagccccggccaaggatgtggctccgtccacagtaaaagaagtgggcttgttgaaggacatgtctccactatcagaaacagaaatggctctgggcaaggatgtgactccacctccagaaacagaagtagttctcatcaagaacgtatgtctgcctccagaaatggaggtggccctgactgaggatcaggtcccagccctcaaaacagaagcacccctggctaaggatggggttctgaccctggccaacaatgtgactccagccaaagatgttccaccactctcagaaacagaggcaacaccagttccaattaaagacatggaaattgcacaaacacaaaaaggaataagtgaggattcccatttagaatctctgcaggatgtggggcagtcagctgcacctactttcatgatttcaccagaaaccgtcacaggaacggggaaaaagtgcagcttgccggccgaggaggattctgtgttagaaaaactaggggaaaggaaaccatgcaacagtcaaccttctgagctttcttcagagacctcaggaatagccaggccagaagaaggaaggcctgtggtgagtgggacaggaaatgacatcaccaccccaccgaacaaggagctcccaccaagcccagagaagaaaacaaagcctttggccaccactcaacctgcaaagacttcaacatcgaaagccaaaacacagcccacttctctccctaagcagccagctcccaccaccattggtgggttgaataaaaaacccatgagccttgcttcaggcttagtgccagctgccccacccaaacgccctgccgtcgcctctgccaggccttccatcttaccttcaaaagacgtgaagccaaagcccattgcagatgcaaaggctcctgagaagcgggcctcaccatccaagccagcttctgccccagcctccagatctgggtccaagagcactcagactgttgcaaaaaccacaacagctgctgctgttgcctcaactggcccaagcagtaggagcccctccacgctcctgcccaagaagcccactgccattaagactgagggaaaacctgcagaagtcaagaagatgactgcaaagtctgtaccagctgacttgagtcgcccaaagagcacctccaccagttccatgaagaaaaccaccactctcagtgggacagcccccgctgcaggggtggttcccagccgagtcaaggccacacccatgccctcccggccctccacaactcctttcatagacaagaagcccacctcggccaaacccagctccaccaccccccggctcagccgcctggccaccaatacttctgctcctgatctgaagaatgtccgctccaaggttggctccacggaaaacatcaagcatcagcctggaggaggccgggccaaagtagagaaaaaaacagaggcagctgctacaacccgaaagcctgaatctaatgcagtcactaaaacagccggcccaattgcaagtgcacagaaacaacctgcggggaaagtccagatagtctccaaaaaagtgagctacagccatattcagtccaagtgtggttccaaggacaatattaagcatgtccctggaggtggtaatgttcagattcagaacaagaaagtggacatctctaaggtctcctccaagtgtgggtctaaggctaacatcaagcacaagcctggtggaggagatgtcaagattgaaagtcagaagttgaacttcaaggagaaggcccaggccaaggtgggatccctcgataatgtgggccacctacctgcaggaggtgctgtgaagactgagggcggtggcagcgaggctcctctgtgtccgggtccccctgctggggaggagccggccatctctgaggcagcgcctgaagctggcgcccccacttcagccagtggcctcaatggccaccccaccctgtcagggggtggtgaccaaagggaggcccagaccttggacagccagatccaggagacaagcatctaatgatgacattctggtctcgtcttccgtctcccccgtgttcccctcttgtctcccctgttcccctctcccttccctcctcccatgtcactgcagattgagacctacaggctgacgttccgggcaaatgccagggcccgcaccgaccacggggccgacattgtctcccgccccccacacttccctggcggccccaactcgggctcccgggtccttggccccctttcccgggctgtccactagaccagtgagcgcttgggcgccgtgctgggcagcccgctaggctcgccttccctcctgctttgcgtgcccggggcagcagcagccctgccccacacctcctctcactccccagcctgggcccatctccctgctttggtcttgccccatcactgcgccactgctccgtggaggaggttgggagggggttggggtggttgaggctaagttgggatctaggagaggagaaccagattctatcctcatctttttttggttctttggtccaaacccaaaagaaactgacatgccctcccttctccctggatctacctggagggaagagtggaggtggattccgagtggtgacaggacgctgaccgtggagcttaagccactgcctctccctctggtcccacaaatgggcgcccccccctccccatgcaggtggtgtcgggcccttcttgctgccctgccccaagttgggggtcagtgctgcctgtccccatgcttaacatacccgcctagctgctgtaacatttttcttgttttgtccttttatttttttctaataacctaaaaactggcaaaatagttctgcaggttgaagccatgtctacatgaaagtcctcagtaagtgttagagggaacagggcggagatatccttatgccacccccgctggaggatgtgggcagcttagggccctggaggcggtgcggcagggaagaggggtgcagaggctgtggctggtgagccggtcaggcacacaaggggcccttggagcgtggactggttggttttgccattttgttgtgtgtatgctgcttttcttttctaaccaagaggctggttttggcatctctgtcccattccctgggatctggtggtcagccctaggataaaaagccagggctggagaacaagaaagggccaggagatggaattccttcaggccggcacccacaccctaggacatgtaagccctcatgtccaagggagcctcatgcagatagtaggaaatcaggtctggaaatttaaaaataaaaggcatgagactaaggctatctgcttcccttatgccctgactggagaggggagggaggagaggcaaggcccacagagggcatcccagctaggccttgggatggctgcagtgaggagaaatcccgggaactgtattgacacaaagattcttattgcacttgtattttttgtattaaagtttgcatggtttctaataaaggattcaaacataagtttgtagtgaaatggcctgggagattccaagggcttctctggagggggattggctgcagtgtagatttgcctctgaggaggctgccccagacttggcctcctcatgccccctcctgacctctgcccttctctggtcctggcatccctggagaaggtaggggtcttgacctaagtttagatttgatctccatgtgcagggaggctgtcctgggcctgacaggtcctccccctttctgaggtagcagtgccttgtggaggtttgacaccatgtccctagctccccaagcacacaccaggaaactgcaggggctcacggaggaagtgctgcctgggccagggggaccagctttcctccgtagagaccatgtgcagaacacttctgctgtgccaagaacatgagggagccagtgttttgtcagcaggaagaaagggcctgctgggatgaaagtgggaaggaaacagggttgggtagtcaggagacacctcaggggcaacagcacaggcccagagtacctgctgcctccactgcgtctgtcctggggtcatgaggatgctgaggttgacgacaggttccaggtcctttcactcctttggccaaaggttgggggtaggtggcccaagtggcgtgctctctaggtagacaacaggagtggtcagagttccctcaaaggatcctccactccagagcacctgagaaggccgggaccagaggccctgtgtgatgtgtactccgcagctgtttggggtgggacatttctgtacttctcgatttgcttatggctcagccattacctgtgtcagtccatgattctgttgtaacagttttaagagtaaataaataaagctgcctgatgtcccatcaaaaaaaaaaaaaaaaaaaaaaaaaaaaaaaaaaaaaaaaa

SEQ ID NO: 10189 - DNA, 193 bp, Homo sapiens
acttgttattatcacaaatcttaaatgttttaccaagtgctgtcttgatgactgctgattttctggaatggaaaattaagttgtttagtgtttatggctttgtgagataaaactctccttttccttaccataccactttgacacgcttcaaggacatactgcagctttactgccttcctccttatcctacagt

SEQ ID NO: 10190 - DNA, 1314 bp, Homo sapiens
agtcgacccacgcgtccggaagaaaatctcatttgaaaagcccagaactattctgttacacagaagaccaggaaagagaagtttaaaaccaagtctaagaaaagtccccagggtcacacagttcataagcgacagagccaggattccagcacctggtctgaatgacccagaagccaggacttttcccccgcacctctacatcaggcgtgctggagcaggaagcggggagcagtggtgtgtgagagccaggcgtccctctgcctgcccactcagtggcaacacccgggagctgttttgtcctttgtggagcctcagcagttccctctttcagaactcactaccaagagccctgaacaggagccaccatgcagtgcttcagcttcattaagaccatgatgatcctcttcaatttgctcatctttctgtgtggtgcagccctgttggcagtgggcatctgggtgtcaatcgatggggcatcctttctgaagatcttcgggccactgtcgtccagtgccatgcagtttgtcaacgtgggctacttcctcatcgcagccggcgttgtggtctttgctcttggtttcctgggctgctatggtgctaagactgagagcaagtgtgccctcgtgacgttcttcttcatcctcctcctcatcttcattgctgaggttgcagctgctgtggtcgccttggtgtacaccaccaatggctgagcacttcctgacgttgctggtagtgcctgccatcaagaaagattatggttcccaggaagacttcactcaagtgtggaaccaccacccatgaaagggctcaagtgctggtggcttcacgcaactatacggattttgaggactcaaccctacttgcaaagagaacagtgcctttccccccatttctgttgcaagtgacaaccgtcaccaacacagccaatgaaacctggcaccaagcaaaaaggctcacgaccaaaaaagtagcagggttgcttcaatcagcttttgtatgacatcgaactaatgcagcaccgtgggaaggtagcacaaatggaatgaggggccatccaagcggactgccacaactgagcccacgacatgcaacgcaaccaaaaaaatgtccactacgccactgcactacgcaggacacagaaccggggcaggacccaggcaaacacaatcgggaagaacaataaaaaccgtctggtgcaaaggcccacattgccacagacaaacacgacccacaaaacacgacaccaagaggaagacggcaccaaactagaaagagagacgcaaaaaaacacaacagtaacaccagaacaccaca

SEQ ID NO: 10191 - DNA, 693 bp, Homo sapiens
acgcgggggcagcaggcgtgcagtttcccggctctccgcgcggccggggaaggtcagcgccgtaatggcgttcttggcgtcgggaccctacctgacccatcagcaaaaggtgttgcggctttataagcgggcgctacgccacctcgagtcgtggtgcgtccagagagacaaataccgatactttgcttgtttgatgagagcccggtttgaagaacataagaatgaaaaggatatggcgaaggccacccagctgctgaaggaggccgaggaagaattctggtaccgtcagcatccacagccatacatcttccctgactctcctgggggcacctcctatgagagatacgattgctacaaggtcccagaatggtgcttagatgactggcatccttctgagaaggcaatgtatcctgattactttgccaagagagaacagtggaagaaactgcggagggaaagctgggaacgagaggttaagcagctgcaggaggaaacgccacctggtggtcctttaactgaagctttgccccctgcccgaaaggaaggtgatttgcccccactgtggtggtatattgtgaccagaccccgggagcggcccatgtagaaagagagagacctcatctttcatgcttgcaagtgaaatatgttacagaacatgcacttgccctaataaaaaatcagtgaaatggaaaa

SEQ ID NO: 10192 - DNA, 1060 bp, Homo sapiens
acttttttttttacaagagtgcagaagagagcgaaaaactcgtgaaagctgaaagaaaattcattgaagatagggttaaaaaaataatagaactgaaaaggaaagtctgtggcgattcacataaaggatttgttgttattaatcaaaagggaattgaccccttttccttagatgctctttcaaaagaaggcatagttgctctgcgcagagctaaaaggagaaatatggagaggctgactcttgcttgtggtggggtagccctgaattcttttgacgacctaagtcctgactgcttgggacatgcaggacttgtatatgagtatacattgggagaagagaagtttacctttattgagaaatgtaacaaccctcgttctgtcacattattgatcaaaggaccaaataagcacacactcactcagatcaaagatgcagtgagggacggcttgagggctgtcatgctgttgatgatggctgtgtggttccaggtgctggtgccgtggaagtggcaatggcagaagccctgattaaacataagcccagtgtaaagggcagggcacagcttggagtccaagcatttgctgatgcattgctcattattcccaaggttcttgctcagaactctggttttgaccttcaggaaacattagttaaaattcaagcagaacattcagaatcaggtcagcttgtgggtgtggacctgaacacaggtgagccaacattctcttggttgatgagatcatgcgagctggaatgtcttctctgaaaggttgaattgaagcttcctctgtatctgaatcttgaagactgcaaagtgatcctgaggattacagctgtggaatttttgtccaagcttcaaataattttgaaagaaattttcccatatgaaaaaaggagagaacactggcatctgttgaaatttggaagttctgaaattatagtatttttaaaaattgcactgaagtgtatacacataaagcaggtcttttatccagtgaacaggatgttttgctttagcagcagtgacataaaattccatgttagataagcatgttactta

SEQ ID NO: 10193 - DNA, 1179 bp, Homo sapiens
  misc_feature 1, 49, 1174, 1175, 1176, 1177, 1178, 1179: n = A,T,C or G
ngtaatatgctgacaataattgtatggggatggtatttaaaaagtgttngagacttctcacctgtcctataaattttgaattgtgtatgtgatctacatagaaagaatattaaagagtaggttgaactctttatagccgaatacagccttaaatatgcttgtatagcatccactggcagaagtaatagttgtgcctcagacttgggggttgcatgtggccctgggggagttactacccttggtatgcatgagcggttcctattagcatcagtgggaactcagtactctgtatgtatccacaaaagggaacttgagacccacagttattcttaatttctgatattaacaaccgtacatactgctgaatttaactcaaaatatttcaggtaagtgaaagtggtgcttaatgtagactatagaatgactttcaggtgttttcaactgaaagtatatatccagaactgcatccttatagaaatacaagtaagacttaggataatttgccttcaaaacagttttcctaatctcagcagtatccagtgagtgaagaacacttgactgactcttgggccacctctgttacttactgtactatggaagctcctggtgaatgtttacaattatgggatgtagtatttctatttgtactttaagtcaaatgcttatatgaaatatgtgacaacaaatagagaagactggctctgttagtaattatgcagtatgtactctatttaaggatctgtggtagtataacatgagtgaatgtcattaattttgaagtaataactgccacatgtgggaagtaggggagtaaggagaatgaattccaatctgtgattaaaagtgtaaactatagactctactgtagtacatttcaggatctagaagttttacttttataaagatggtgtccggaagatgttgctaatgtattttacttcaacatagggaacaaactttttaagtatattaataaacctgtatggttagtttttaacagttttttaaaataaactatggatatgaaaaacaagaacaaaaaaaatttgcggcgcgcgcccccaaaaattctaaccttttgggccggccaggaaggaatggcagggtcagaaccgtccaagggggtctccaaaaacgggcggctgcacaaggcggtggtacagcggcccccgcnnnnnn

SEQ ID NO: 10194 - DNA, 673 bp, Homo sapiens
ttcaagaagggcagccagcagagcatgaacacaaaaccttaggtcactgggtgacaatcagtgaccaagaaaagaggacagcactgcaggtgtttgacccactggcaaaaacatgactgagcagctttgaaggctgcagtcctatagaatgcataccttcctccctctagacatccctccaccagaagagacatctatttaaaggcacactggccaaaacgtttgtgcatctgtcactctcgtgtagtttacaaaaatcgtgtctcttattcagtaagatggttactcagccaccaaaatatatttcactcaaggcttgtacatctgaagtttgctcttcaaggaatgggaaccttcctgttaaattcggtgtatggattttaagaaaggaatctagccaatgaggtccaagaagttctcacccattgaatttttaaatggctgttcagttcatgttgtacgtgatggagatttgtcttttgttttatttgcattttacagatttggtataacattttggggagccacctgaaggttgatgtataaagtaaggattagagaaagaggtcgttgtgaccattagtacctgtccactgcaatcgcgcacaggatcctcaagccgaattccagcacagtgccgtccgtccgagtgagggagccgagctcggacagc

SEQ ID NO: 10195 - DNA, 1704 bp, Homo sapiens
  misc_feature 1, 2, 1704: n = A,T,C or G
nngtcatggacatactgggcccactcctgcagctgctggcgctgcttcttaccctgtccctgcacctcatggctctgctgggctgctggcagaccctgtgcatggagagcaagaaacgggagctcttcagccagataaaggggcttacaggagcctacgggaaagtggccctactggagctgggctgcggaaccggagccaactttcaggtctacccaccgggctgtatggtcacctgcctagacccaaatccccactttgagaagttcctgacaaagagcatggctgagtacaggcacctccaatatgagcggtttgtggtggctcctggagaggacatgagacagctggctgatggctccatggatgtggtggtctgcactctggtgctgtgctctgtgcagagcccaaggaaggtcctgcaggaggtccggagagtactgagaccgggaggtgtgctctttttctgggagcatgtggcagaaccatatggaagctgggccttcatgtggcagcaagttttcgagcccacctggaaacacattggggatggctgctgcctcaccagagagacctggaaggatcttgagaacgcccagttctccgaaatccaaatggaacgacagccccctcccttgaagtggctacctgttgggccccacatcatgggaaaggctgtcaaataatctttcccaagctccaaggcactcatttgctccttccccagcctccaattagaacaagccacccaccagcctatctatcttccactgagagggacctagcagaatgagagaagacattcatgtaccacctcctagtccctctctccccaacctctgccagggcaatctctaacttcaatcccgccttcgacagtgaaaaagctctacttctacgctgacccagggaggaaacactaggaccctgttgtatcctcaactgcaagtttctggactagtctcccaacgtttgcctcccaatgttgtccctttccttcgttcccatggtaaagctcctctcgctttcctcctgaggctacacccatgcgtctctaggaactggtcacaaaagtcatggtgcctgcatccctgccaagcccccctgaccctctctccccactaccaccttcttcctgagctgggggcaccagggagaatcagagatgctggggatgccagagcaagactcaaagaggcagaggttttgttctcaaatattttttaataaatagacgaaaccacgaaaaaaaaaaaaaaaaaaaaaaaaaaaaaaaaaaaaaaaaagggggggcgcgcgcgcccaaaaaaactcccccggggggccgcccaattacggcggcccccagtttttgggcacaggggggccccaaaggggggccgcccttataaaaggccaacgcccgccggggcccctcgtttaaacaacggccgcgtggaggcgggaaaaacgaggtggacagccgtgggggaccccttgggggaacggagcacccctaaacacccgggggggggagaacaactacggtgcggccacaacctcacctccgtagcggaagtaattaacacgcccccagaggcgagaactataaacacattcaagccggggtactagggggggtaacacataagcggacataatgcgggcggcatgagagaactcggccccaccggaggcacgactccgcggcaaatttttaccgcn

SEQ ID NO: 10196 - DNA, 1403 bp, Homo sapiens
  misc_feature 1, 2, 3, 4, 5, 6, 7, 1402, 1403: n = A,T,C or G
nnnnnnncggaagtcgcctggtgttagcgcgcgcttgcggacgcggcggcattaaacggttgcaggcgtagcagagtggtcgttgtctttctaggtctcagccggtcgtcgcgacgttcgcccgctcgctctgaggctcctgaagccgaaaccagctagactttcctccttcccgcctgcctgtagcggcgttgttgccactccgccaccatgttcgaggcgcgcctggtccagggctccatcctcaagaaggtgttggaggcactcaaggacctcatcaacgaggcctgctgggatattagctccagcggtgtaaacctgcagagcatggactcgtcccacgtctctttggtgcagctcaccctgcggtctgagggcttcgacacctaccgctgcgaccgcaacctggccatgggcgtgaacctcaccagtatgtccaaaatactaaaatgcgccggcaatgaagatatcattacactaagggccgaagataacgcggataccttggcgctagtatttgaagcaccaaaccaggagaaagtttcagactatgaaatgaagttgatggatttagatgttgaacaacttggaattccagaacaggagtacagctgtgtagtaaagatgccttctggtgaatttgcacgtatatgccgagatctcagccatattggagatgctgttgtaatttcctgtgcaaaagacggagtgaaattttctgcaagtggagaacttggaaatggaaacattaaattgtcacagacaagtaatgtcgataaagaggaggaagctgttaccatagagatgaatgaaccagttcaactaacttttgcactgaggtacctgaacttctttacaaaagccactccactctcttcaacggtgacactcagtatgtctgcagatgtaccccttgttgtagagtataaaattgcggatatgggacacttaaaatactacttggctcccaagatcgaggatgaagaaggatcttaggcattcttaaaattcaagaaaataaaactaagctctttgagaactgcttctaagatgccagcatatactgaagtcttttctgtcaccaaatttgtacctctaagtacatatgtagatattgttttctgtaaataacctatttttttctctattctctgcaatttgtttaaagaataaagtccaaagtcagatctggtctagttaacctagaagtatttttgtctcttagaaatacttgtgatttttataatacaaaagggtcttgactctaaatgcagttttaagaattgtttttgaatttaaataaagttacttgaatttcaaacaaaaaaaaaagaaaggccatcgacctttttgcaaagcgcaagaggtaaaacggggggaaagcgggaaagaggtgagcacnn

SEQ ID NO: 10197 - DNA, 2521 bp, Homo sapiens
tgtacgtcccttttattatcctctcttgggtccccctcttcccccttcccaaagggtgcggacctatcccaatgcctcctttctcctttttcgccccccccaaaagccccgcctttttttattcattgatattttctcttcttctcttctcatcccagagagcaagtttattttggtgaatgctgacggcaaacatcatccaagagagacaagatgggaaagttgctgagacaagaaagcctaggggaaactttaggctagatacaaaattcacacagggaaaggcacggactctggggagactgggaaggtcctcagccattcagcaccatgcggacgagctccgccccatgggcccgtcaccccgacaggatatgcctcacaaacgcttcatagttgatacaaccattgctgtcctcatgccctgccaccagcatctctacttcttcctctgtcatcttctcacccagtgtgacaagaacatgccggatttcagcacccatgacggtgccatttccttccttgtcaaacacccgaagtccttcgacataatcctcataggtgccctggtccttgttcttggccactgtctgcagcatgggcagaaagtgctcaaagtccagcaccttcacattcatctcatcactcttggggttccccaggaccttgagcacctcggcgttggtagggttctggcccagggccctcatcacatccccacactggctgtacaggatcttgccatcacctgttcggtcaaacagctggaaggcaagatcctgtacagccagtgtggggatgtgatgagggccctgggccagaaccctaccaacgccgaggtgctcaaggtcctggggaaccccaagagtgatgagatgaatgtgaaggtgctggactttgagcactttctgcccatgctgcagacagtggccaagaacaaggaccagggcacctatgaggattatgtcgaaggacttcgggtgtttgacaaggaaggaaatggcaccgtcatgggtgctgaaatccggcatgttcttgtcacactgggtaaggttctgtgtccttgtccttgagctgagatggcaccctgaggtacctcacttgtcacccaattccaaaaatgctttctttccccctgcaggtgagaagatgacagaggaagaagtagagatgctggtggcagggcatgaggacagcaatggttgtatcaactatgaaggtaagaggtgaactgcgctttctcagagaaagcagccatatggggcaggtcaagtatagtgtctggggctttccctatccctggacttgggctccaaaaagagccaggaggcaaggtgcagggccctgcccagcccagcccaggagtgggaggtcagggcggtataacaggaaaggaagggggtagtattgtagagggtgggaaggaatgagaagtgaaataatggaatgtctgtccccactgcctgacccctcaccccatgtctttgtcttgtcttcaccatgaatgtctcttccttcctgcagcgtttgtgaggcatatcctgtcggggtgacgggcccatggggcgggtacggctcctcccagcctctcctctagttgatctccccagtgtttcttttttccccaacctgtgctctttatcccctgcccttaccctactaccatctgacttcctcctggcatgtttctgcatggagctgactagggaggggagggattcctcaaagaggaagacaacctgggggtacagtacctccttacctctagaatgggccctgaggttttacttatgcggccctgggtgctggtgtctgggaactctcaccagcctgtataccagtcttgctttagggtgaccttctggccctggagcatgggtagctggcatagaggggtatgggttgcctgccccattctgctgctatagctgaacagtcctttccccttccctcgctgggcagcttggaggtaccctaacccaaaactctgtcctctcctcccgccagtggctgacagtagctgtaggtgtagtggagaacttttctgcctctgctgtgttcttgctgcttaggtttgggtgggggactaacagctgctgggaggggagctaggggcatggagaactggtcagactcaaggtggctcctctgcaaactgaccccagggttggttgctgtgggcatgttcccgcttatgctacctttgcagtctggtagtcccctggcccttggcgtacccctccacagccctgttccctggctcatcccacctttcctttccacagagctcgtccgcatggtgctgaatggctgaggaccttcccagtctccccagagtccgtgcctttccctgtgtgaattttgtatctagcctaaagtttccctaggctttcttgtctcagcaactttcccatcttgtctctcttggatgatgtttgccgtcagcattcaccaaataaacttgctctctgggccctcaaaaaataaaaaaaaaaaaaaaaaaaaaaaaaaaaaagcttgt

SEQ ID NO: 10198 - DNA, 215 bp, Homo sapiens
  misc_feature 1: n = A,T,C or G
ngcggccggccaggtacctgaggcagcagtcactgtggcataaatttctaaacttacatagcagatacttgtaataagcaaaccttaaaaagggcaaggtacagaggacttaaaaatgaaaaaaaaaagcgatagggagaatgaagatttttttaaaagctgttttagatcagggtaagaccggaggcttaaacaaaaaaaaaaaaaaaaaggtc

SEQ ID NO: 10199 - DNA, 430 bp, Homo sapiens
ttttaaaaaaatttaacggcccccccttttttttttttttttacacacttcaaaaagcttttattggctttcatttccaaagtacagacatttgaagcaattctgtaaagaccctgagtttccacagggcttgttttggctaccgtaaaaaacaaaaacaaaaacacgcgcgcacacatcatagttttcctgcttgccatatgatgtctttgggagatggacaaccctcaaaggcactgattggtgacattgatggctttggtccttactcaggcagccagctcagccaaggcccggtccaagggatccaccgaccagtagtcgtcatcccagccgaggaaccagcccacgaaggaaggaggctcaaagccctgcctaacgactgtgatgggggtccgcctgtcccgatttgctggatctgtctcgatgt

SEQ ID NO: 10200 - DNA, 1372 bp, Homo sapiens
  misc_feature 1, 2, 3: n = A,T,C or G
nnngggtgtcttccatatacccagatacattagtgtagattctactgtataactttatttctaatcattaaaaagcatacagtttcaaaatccgcccccgctaaagagaaccaccctataacatgcaggaaagaaaaaaaagtattctataatcttcccacaaaggggaaaactaccactaacattatttttctagacatacacccatatacctcatttgatactgctttgttagagcactgtttgtctcagaatatataaattcactttggtacttaagaatgcagttattacaatgggtagttaatagaagaggctgattgtttattcagctataaaaactaacatgtcattctgtgctttcctggtactcaatctgctgatctctcctaccacgcagataaagccactcagccaacttctttactattagtctttgtcctctcttgtctcacaaaaggcatgcaagtaacaattctgagggtgccacaagtgttgacagagagtaccatgtttcacgttaaaatgccaaaatgtggtgccttcaaagaaacagtcaatgaaacagaaagcaaaaataagcagaaaattagaaacgttatttggcatcatgaagggcaacaccaaatttcactactaactgcaaggattgataaacaccatgatttcagatttgaaaaaaaatggaaaactgctaatgcacaatgttaagagatctccatgagaaccaggcattaatcccatatagcaatgatttaatattgttaccaatttcaggaaaatgattttttgataaatgggctattgtaagatatacctttttatttcttaggagcatgtgacctgcatacgtaaacaggcctctagagcacaacattgtatttattgtaaatgatgctcccccgcagatgtgcactggtggccttgctctaaacactcctagtaagtgtaacaggttagcccaagaggaaacaccttatccaagctggaacaaagaaatcttccctaggattttttgttaaactagaaatgagaaaagtggtagatgtttctaaaattcaaatgctgttaacagccatatttactgccttactgagaaactgcgccataaaacaacaacaacaacaaaagccactggaacagaggtaagcaagaccaagaagtaaagacaataatgaaggtattcaatatccagtcccaattgtttctgaagcctaactcatccttgccctctctgccatttggttatttgcttttcttcatggagtaacatggccaaaaaatgtttccatttacctaaagtgggttctaaaatcttcaattaaatatacctaaactggccgggcgcggtggctcatgcctgtaatcaagt

SEQ ID NO: 10201 - DNA, 3109 bp, Homo sapiens
  misc_feature 1, 2, 3109: n = A,T,C or G
nncgtgccgaattcggcacgagcgcccgctatccacatccttctagagtcagaatggtagggtccgttgacttcagcttttgattttgcaggatggccctgtgtcctcctctgccccattccctggttcattaaccagtttgaagtgtatgtagattgttgccccgtctttcccaggtcacatgtgtgagatgcctgggtgctgcttcagaaatcaagatgatctcctttaatttgcatgaaactacaccatgctgcgttccccaggcagacagttctgctttgacacaccaaagaatcctgtaggctagcagagccgccagcacaaaccaagggcgctgggtgtcgagactcagaggggtcagctgtgtccctcggcatcagcgtctaccaaggtgctgctaggtacagagccagccagtgttgggcagcaggctcacagcctcaatagggagaaaagacaaaggcctcaaaatgacaggcagcctgacagaggaaggagtctgacacctcagcttgaggcgtctttggaattcctagctcatctcagaattatatcttagagtgataatatgggtggtagccagtggccaaacagcaagaactaagagtggcccttgcaaaaaaaggttgggaaagctgggcccatattgcctgtaaacccttgagcctgatgctcatacagctgtcccttgttttagccaggtcttgacagaagggttaccagcactgtcactgctctacagaatgctctccccgtgcctctctggtgatttataacagttgggtaaccagatagcaatatagtggcaattgagtagccatatagtaatacaggggcagttggttaaacgtatagcaatatcacataatgatatgtttaatttaacctcagttttttaaaccagaatgcttctaccataaaagaattgtgatttcagttgtacttccatcaaggaatatgtgggaagatatacatattgtcaaaatggttgggatgggatagttacaaaggacacttttgtatgttgtatgggatcacttgcctgatagtataaggaacattgtatgaaaagatgaaaagatacttcatttttagaaactgatcagagatgtcactggtctttaagtgatgtcttgaaaatccagtatgtatttgcccaaaagttttagcctacatctagctagcttacacttagcagccaaaccatcattgtgtaggttctgttttggaggaagctcatgggggatctgtgtatttcttaggtttctccctgttctccaatgttttatccatttcgtagcttttttactgtctccagaaagtagtgtgggacctgcacttaggggaataccagaatcatagcgtggttctgccttcttgatgagtgattgtgaaaaacacctgcataagggtgctaattggttgtgtattttttcatttatttgaaatcaaactgagaacacctcttttcggtttacagcataacatggcttgaagtaaaaggcagtatccaagtccttcacctggtcttgccctgtctactttctgatcattctgatggtctgatgtggctgttgatgtggaactgcagaagagttcagagaagagtatgcaacaaagccataggaaaacacacaggagcttttccctccccttcaggtccccgccctctttccaagctggacaattttttattaagttgtttattccctgccttaaaactgaaacaggaaattttctggtagaaggagggtcatttagtcacgaacactgaagtgggtcaaaattctattctgggtcaaatccttgaattcaaacagatgtccataatcagtactgatggaatagagcaagtttttctatgtaagacaaataaatcaaacatcatgtgcatctcctcataagggtctgcaagggtctgatggtttaaagttcctaacagatctggttgcagcatctgccggagcttgcaccccatcatcggacggtcatcttcctgctgcagaagttaggtaacataagacttagatttcttcctgttctagcaatctgcaagaccaccaggcttaactttttagctgccagaagacaaacccccttttctgtttcggcaatttgtcctggcacgtgttttggacttcctccgatttacacgaaaagctctgatattcattggagtactttattttttttcctcagttttgtttcttttctcatgtaaaaacaaacaaaaaggtcaacaaaaaaaaattgaggtttttcttgtttctatctagttcatgctttctttgcggtgtttgaacagtagtctgttaacttagtaggtggtacctggaaaggtattttaagtatagtgactgtttaataaatacttaattggatgatggaggaggagaaattgttttcttcccaggattctctttgggggtcattttgtgtgacagatatattttagacatttggagaaacagtttcagatcctgccaggatatttttgtaaaaaaggaaaatggaagattccaataaactagaaacagtacgtatctaagatgctgacacagaagctaatgtgacttttcagcttatcaagaggatggccaataaaacttaaaggtgtggttagatgttttctcacttttgtgacattaatttatcactgagtctcattcaaccaagtaatctaaaatactgtgcaaattctagcagtatgtcttcgataacttggatgttaggatagccaatatgtacaaaaaattaaatcaagtattttgtcctatgtataacacaaattaattttacacagagaaagatgtttctaggcaagtgaaattctggtaattcatactatttctttgtatgaacaaataaaatatactttgccaaagagacaacaccaagaaaagaacgaacaaaccgctgtttgggccacgccctcggcgccccgtgaaaaaagcatgtgtgtaagagaacactttacgatagggtgccgccgggtgccccatgacggtatagtgaggacaaaaggggcacaacacgcggttccccagagacaaaaccgaggactaggaacgtggtggcgtggtagtttcacacaattaaagaagcn

SEQ ID NO: 10202 - DNA, 1685 bp, Homo sapiens
  misc_feature 1, 2, 1685: n = A,T,C or G
nngcgcgccgattatcgatgtggtgcttttaaccagtgtggctgttatttgtggcagtttagccttgatgcccccaggcgttttgaaaacgagtgtggttaaaagtgggacaatgtgccgcagtgttgacgaatttctgaacacgctgtgtggcccgcacgggtgtttaataggccatgtgcactttattccccgccctccggggagtgcgtaccagagaattcgtgtttacagttaaagtgtgacaaaacgtcagccctgaagtagtttttcccccaaaagttctgatgttaaaactttaaaaaaaaaaaagagagaggtagtgtgtaaaaatatttttacttaaaatgttgaacccctgcaccacttatattataaatgaaagttaaccttctacatactaacattattttgccattcaagagtcaaatttgtaagactcacagaatgttaaagccggaatgccattaaaaatagtatataaatggaagaacttcggtgaattcaacaaaaagtacaacgtattacataatgtgcagtcagttaatagtttactgataatatgcttagtggtaatgtgaacaaaatacattgaagtattctgagtcaagtgatcttcacgtaatcaagacttcttcatatatattttaccatatagagaaaacatccttcaaagcggagtcatttgaatcttcattgttgtaatagcacacaattgttaaaaaggtattcatactagccctaccataaagttaattaataaataactctccataagccatagggaacttatgtacttcatagtatttttagtttctatatacaagcataccattgtgcttgtgcacactgtacaataaaatcaggcaaggaattaaagttagcagccttactcttagcttgttctaagtggatgcactggaaagtaataaatagcctcataaaattaatagtgataaactctacctgtcacaggtgaatactatgtagttttcataaagtgtaggcagtgtttctagaaatcccatgaaggaaaacccaattttttttttttttggcataaaaagtgcacaagtttgtcctatgtgttaaaacatcttaatttggatgtattttttatccaaaatgatgcatacttggatgcattaaaagcacaccaacaaaaatacacacactaacaataaaaggaatgatttcaaatgagactgggaatgggaacaagaataggttaaaggagagacttccatatttccaaagtcaagagaattgccttttaaaacataaattatatagccatacagaattaatttgaaaatatgaaagctataggaaggacaaacaccaatttgaacaactgttgcaaagtttcataactcaagaaaagatagcttcctggctaggcgctcatgcctgcaatccagcactttgggaggagatgggcggatcacttgaggtcaggagtttgagacccacctgaccaacatggtgaaactccatctctactaaaaatacaaaaaaataagccagacgtgttggcgcacacctgtaatcttagctactcagaaggctgaggcaggagaattgcttgaacccgggagctgagattgcaccactgcactccagcctgggtacactccagcctgggcgatagagcgagactccatctcaaaaaaaaaaaagaaagn

SEQ ID NO: 10203 - DNA, 522 bp, Homo sapiens
  misc_feature 521, 522: n = A,T,C or G
acgcgggggggaggattgcattcagtttagttcctggtttccggctgaaataacctgaccgagagcatcaccccctgaacatggacttgcagaattccacagaagagaggagactggcctagacagacagccccaggagctgagggcccaccacaggctttctaccctggatgcctgctcccatgcccctgacacccgaggcccactacaatgctctccaaaatgtccacaaaagtgacttaagtcaggttcccccaaaccagacaccaagacaagaatccatgtgtgtgtgactgaaggaagtgctgggagagccccagctgcagcctggatgtgaactgcaactccaaagtgtgtccagactcaaggcaagggcactaggctttccagacctcctactaagtcattgatccagcactgccctgccaggacataaatccctggcacctcttgctctctgcaaaggagggcaaagcagcttcaggagcccttgggagtcctccaaagagagtctagggtann

SEQ ID NO: 10204 - DNA, 153 bp, Homo sapiens
aggtaccttcatgctctaaatcagatgatctactatctgaaaaggaaacgacaaatctgacaacaaatgaatttcacaacagataggcagttgatagcatgaggcactaacattaaacccaagtctttcaatggcacttggagtcccagggta

SEQ ID NO: 10205 - DNA, 803 bp, Homo sapiens
  misc_feature 1, 2, 3: n = A,T,C or G
nnncaagtgatccgcccacctcagccccccaaagtgctgggattacaagcatcagccaccacacccagccctaaccacacctcttattttatcctttaaggtcagaatgccaatccacatctattattaatggcacacaatcatttgttctaatttcatccaaaatgtctacaatgtgcttagtttggcatcttaaaataagaaaattatgtacatgtacaaattatagcgacatacacagagaatgcagttaaaaactctacctgtgatacatgaaagcttcagggggctatatatagccaacagtaattgactattacacaagaaccaaagaattggaccttgaaaggaaatattctatctggagattaacacaaactacttagtaacaaaaatgaactataacaaacattaaggataagtagtcttctgtggtaataaaactatcattttgaaaggacaaaaagattattttaaccctgcttaactattatgtgtaactacattccaatttaacagcaatcaattaaagaaaaggaaaaactgaaactcattaagatgggatacatctagacttgggttacagttaaggcacaacataatccctccgtaggacaaaataaggtacagatctaaaattattattttctgattgtatgtgtataaataggggcagggaatggtagaatcacattcctatctctctccctactcccctagcaaaaattaaaactgtaaaaaccaaatttttttttttttttgcacagggggacaaggtcttgctctatagcacaggctggagt

SEQ ID NO: 10206 - DNA, 299 bp, Homo sapiens
aggtacagcacaccaggagagaagatcattattaatgtgctaatagcagcattttattttgaaacccactctgcatggttacagggctcaaaacaacatattctaacaggaagatacattaccgaaatattttaatgagaatatttaatatgcattgagaggtccgcattttcttgcagagaccttgtaggtagctctttgagatttctgtctctatgcatttaagtgaaggagttggttgggtattttagttggcaaattttgcagacatgtagctttggtagtggaggggtaatagt

SEQ ID NO: 10207 - DNA, 591 bp, Homo sapiens
  misc_feature 1, 2, 3, 4, 5, 591: n = A,T,C or G
nnnnncgtccggtttgctccctctctagcatttaactgtttgataatttatatgtgaactctcctggaatccaaaccagatttgagtgtgattattaaggcttgaagttccttctcaagggaagttgtaggaactggagagaaatgttgctgggattggtagaaaatttcccctgcaaagggtcaactgtgaagctgaattttgggtaacacggtggatgaggggaagatgaaagaggaagcagaggtcaccatgtgtgctggtggcatttggaggctccctctagcccacttgagctttatcctgtggactcacaggacaccctgcaccctcttttggatcaatgtcaggagatgcttgcagtagttctcctgtgatcagctctaatccttaacctttcattggtgcttgacttacctcctcaatgggtaaaacattgaagtactgaactagctccttctggttaatttgttgattggattggaaattagaacatggagctggtcaatgcacggtatctggtaattgtggatgggggagatgactggggcagaactgagctctatttttgccaacatagtaccaatgtgn

SEQ ID NO: 10208 - DNA, 461 bp, Homo sapiens
actcacttatagatggttattggccaaaaatacagacaccatgctattatccacagactcagaaaagctacacaagaaggaatgcacaagtgaggatgcctgaatctcacttaaaggagtgcataaagcagtcctaagaggaagacggagggagtgaactgaatagagaagagatacggagggctatgggatgggtttggaatcaggtgtgggtaaggaagaggagagatggatggatggtcctgaaagtgaatggaaatctgcaactgacaagggtgaagttttttttttttaatgaaaaaagacaatgtgggatactattcacctactaaagacaaagacataatgacctttgcaggtgaatgaatagaacttgagaatatcttcctgagtgacataacccagacccaaaagacatggatggcgtatactcacttgtaagtggatattagcaataaagt

SEQ ID NO: 10209 - DNA, 322 bp, Homo sapiens
  misc_feature 316, 317, 318, 319, 320, 321, 322: n = A,T,C or G
gctagcttgagtcgacccacgcgtccgctcaaggagaaggaagaccaaagtatgcaggaaggaccctagggcctttcaccagcttacatccacccaccttgggcaaggataggttagattccagtttcctgcctcccgccatggctaggcattctcaatccacaggaacattcttgagtagaacattcccagaatgatctgactgatgcttgctagccaatagatttaaaggttaatatgcttagcctataagttagaaatgtaacctttctgaggtaacctgtgcccttaaaaagtataagagctacttctttannnnnnn

SEQ ID NO: 10210 - DNA, 426 bp, Homo sapiens
  misc_feature 426: n = A,T,C or G
cacgcgtccgctgctgggctgaaccaaccaaagatggagtggcagaaccctgggagctgatcggggttctttctagtaagtagttgccaggccttagaactgattggtgtcacctacttcagtgttcattcatttcaatgacaagatcaaaatcagattttacaggatgaccaagattctgagtttctcccatggcaacaagttctcaggttaaagtctaggaatggtcatacttgcagcttgttcttccagaagacctgactttggttcccagaacccatgttgggtggctcacaaccatctataactccagctcccgagagccaatgcctctgacccccaagagtgcctgcactcatgtgtatatatccacataattaaaaataataaaataaatattttaaagatctttgacctgcccgcgcn

SEQ ID NO: 10211 - DNA, 325 bp, Homo sapiens
  misc_feature 325: n = A,T,C or G
tgcagaaagggaagaaatgccagaaggaaccaatgaaggatgagcccagcttccaaattttgatgaaagctttcgtctctacatcagagaaattctgcaagatcttagaaggatgcgctcagagagattcacacctagaaacaccatactcaaagggtaaggagaagagagccccagggaagaatacagaaggggacacatgactggccacacagaaagctcatcaggaagaaaacatgactccctgtcagaaacccagggtccagaaggagtgggatgacgtttgctaagttataaaagcgagctgtgcacccagattctatan

SEQ ID NO: 10212 - DNA, 322 bp, Homo sapiens
  misc_feature 321, 322: n = A,T,C or G
acagctaggacaaaccttgactccgggtcgagcgctcattgtataacatgcagtggcatggcccgtggttaggaggagtctgaaatcagattgctgagggttccggatctggttctaccactcacaagtgacttcgtaggcctttcttatattctgatttcttatatctgaactggagcttacacatgcaccagaatcctacagggatactgtgggggacacacagcttgaggtaaagtggttaccaagaggccaggcagttggggatcacccatatcacaataatttgtcattgagcatgtagtttctctcttcatggann

SEQ ID NO: 10213 - DNA, 182 bp, Homo sapiens
aggtacagagctaacacttatcctccagtgctctactaattgcttggtgctatgttgactactgggaatgaaccacaagatacatcactgtaaactgcagggagtgcttcactgatcatgaggttaaaatctccccatcagcagaaagagaattctttacttaacttagtggtacctgcccg

SEQ ID NO: 10214 - DNA, 298 bp, Homo sapiens
  misc_feature 295, 296, 297, 298: n = A,T,C or G
acacattttttgttgcaaatagtcctgcagctggtttttctaaaaaaaaaaccccaagaatacatataaatctgagttccctatggcgctagtctactgggcagacttctggtctggggttctttctttcttttaatagccttctgaaaacctcagtgccaccaaatgcatggatcgtagcagtagttctaagtgtgtgctatgcttggtctaatatccaaagagatgtctaaacaatgtgctgctttcatgagaggaggcgcacgttgcaggaagctgtcaatctttgagtgannnn

SEQ ID NO: 10215 - DNA, 967 bp, Homo sapiens
  misc_feature 961, 962, 963, 964, 965, 966, 967: n = A,T,C or G
cgacccacgcgtccgtgtatctcctacagttcattatgcagcagacacggatgtaaatggggacaaaaagaaaataccaactcagactctttgtgagacgttcagcagttttctgaaatggcgcaatgtattcattttccatctgcatttccgtcccacgttttaaccttccctgctgaagtcaaacttccaaaattcctgggcttgcaaagcaactgactgtaagtatgaatcggctctttggaatcttgaattaaacaggaaataaaatgctgggattcaaatggaaaattacacccatgggttgacttgctctcaaaaggcataatcagtctgaggctttcttcggtcagctatgcctaaccatatggatagagacatcaagaaggagcccttgggacctctgggattttctctctcctgtatatactttatacctcgtcgtccatttgccagctactgggggtcactggggaacaagctgctttctttcccacttgaaactgttagaaaaaccctctaatttctctacttggtttaatctgcatggtagctatcacggaatcatcatgcttggttgatatagtatttctactaaaacgtaagtaaatttaggcccaaaatgataagataactcttttaaagtgttgaatacatagtttgcattgcattcccacatttagtaaattggtaatggatgccactaatagtaggtaaggaaagagaactcaaatagtccaggccagtataagaagagtctatgaaaattagtagagatttgcatgaaagcaacgcatagcgtgccctcagagcactatactctgtatacactgctctgtgttcgtttcccaactaaacaccaaaattgctctagcattagaaagcaggcttgagcgtccgctctagcattagtggatcccccggagctgcagcaactggacatcaaacttgcacatgccgnnnnnnn

SEQ ID NO: 10216 - DNA, 323 bp, Homo sapiens
ccgggcaggtactctacagtgaaactgtttctactgtggcttaatttgcaaaatccaagcagatattacttttaaaaatccaactatctctttcaaaggatttgtaaagttgcttacagacataaggtgacatcagaaaagcatgttggtataatgcaattagctaaggtttctaggaagctttggaatgttttgtttttaaagaaggcatagataagtgcaagtcctacaagtaatgaactgtcctagaagcaaagaaattcattaaatagatctccttgatttctccttcatggccccatgtccatagagattgggaatgt

SEQ ID NO: 10217 - DNA, 391 bp, Homo sapiens
  misc_feature 391: n = A,T,C or G
actgacttaaaataacagagtaacctgtctggcttacttgtctctgaaagtgaatgttcaaagtgggtggaatagaatcacatataacgaatagtccatacttatatgcaaagccatatgattccctaagctacttaaactggaataaagacactaataaaaatttcataaaacattgaacctggtgccagcctcacattaaacccataggttcttcacgattaaggctgacaattttagctactgcttagaaagttgcaaacacaaataggggggagtttaatgttccatcagaaattaacccaagctgtttgaaactctacttggcactcacaggagaaaatttgtaatattaaggaatattgtcttgagtcgactcaagctagcaccn

SEQ ID NO: 10218 - DNA, 485 bp, Homo sapiens
acagtagagacaccatctctgttaggaaactgttagtggctaccatgtgtccctaaactccctagcttggtagtcatagcctcacgttctgcttccagttacttacctgtcaatccttttcttcctactgatccctagtgcacttttaacacatccttatcctctttgtctatgtctgtttgtcctattctctgcacctgcctttctctcccctagtcctactcccgcataccttaaatgctgccataacttgattatggcttaattacttaattatgccaactgaagggtctacgtgttaaagggcttggcccctaatgtatagaactggggagtgcttcagaatatgagaagttcttaagtgctggatactcatcctaggacaagactataggccctagtctgtcctttctcttgtggtgtcagttccagatatgtctgttttgctcttccggacgcgtgggtcgactcaagctagcttgtac

SEQ ID NO: 10219 - DNA, 535 bp, Homo sapiens
actcttctggttgccttgactctagtcctgatcagagtgcccagcaaagaacattatacgcactgtcccggcactgtcctgtgacataaaagcaatgacctgatatcagattccctgggataggacctgaaaaagagttgagggcaggctctgcattttgtccttttctgatgcaaatgagaacgaaataatttttttcaacttactttatcctatggtgagtagaagccaccatgtttcctgtggaaaccaggcggtggcatggcttctgcttctgtctgagagaacattgcttcctggacttatcccccttttagcagcctcctgcaattctgggattgtggtggctttttagctttagagatgaaacccattcccaccgtcaccccgaccccattccacccttggcttctctggatgaccgtccgttcctccagcttgagtcgacccacgcgtcgctgacattgcttcagggcccaaactcatcctttaaaaaccttagcgtgacagaggtcctcaatataccacctgcccg

SEQ ID NO: 10220 - DNA, 347 bp, Homo sapiens
  misc_feature 347: n = A,T,C or G
ctagcttgagtcgacccacgcgtccgatttagaagagccagaaataaaataaaatatcttggtgtaactttaactaagtaagtaaaagaactgtatgacaagatcttgtctttgaattaaaaattctgaagatgacagtagaagatagaagatgctcatgaattggtaggattaacataataaacatggtgatcttaccaaaggcaataaacagactcaacacaataactatcaaacttccaacatttttttattaatcttgcaagaacacaacttaacttcataagttgaacaaaataaaacagtatatgtccagcctggcttggcccttcatggtacctcggccn

SEQ ID NO: 10221 - DNA, 184 bp, Homo sapiens
cgggctgagcgggagctgaagccagctcgagtatatgggacaggctccttggctctgtatgagaaggctgagattaagggacctgaggacaagaagaagcacctcattattggtgtgtcctcggatcgaggcctttgtggtgctattcattcctccgtggctaaacaaatgaagaatgacacct

SEQ ID NO: 10222 - DNA, 187 bp, Homo sapiens
cgggcaggtctttgtctctcaaacttttatactgtcatagttcatttttcttgtacagatgctctttcaactttttttgagagtatatacataacaattgcagttgaaagtagggtggggtttagtctcctggtcacagttcaataagtacggacgcgtgggtcgactcaagctagcttgtacacct

SEQ ID NO: 10223 - DNA, 751 bp, Homo sapiens
  misc_feature 1, 2, 747, 748, 749, 750, 751: n = A,T,C or G
nnactatagggcaattggagctcaccgcggtggcggccgaggtacgcgggggtagatggaaggaagaacttgtgtgcttagacctgacgctgggaggagatgctgccacctaggttacttgtaggaccctatacggcaacctcctttgccaggaactatttataaacatcctgcaggaaaatgcagtgaagtagaagagacagggatatcccagaaggttatgcaaaacatcaagagaagatgagaggagtctatatgtcagaatacacatttcccaccttgcccaacagtagaaaaacataagaagagaaaaacattaaaaaatgacaaggaagttaatggaagtcagcaatgtgatggtgtttggaggtggagccttcagaaggtaattaatgcccttgtaagaagaggccagagagcttgcgcaccttcttcctgccatgtgaggagccaagaagccggctgtctgcaacctgcaagaggaccctcactagaagctagccatactggcatcctcatcttggctttccaacttccagaactgtgagaagtatatgtttgtggtttagtcaatggtctatggtaatttttttatagcagtcccagccaagacagtgcctcatttactacataccatttatattattatataggctcctttcagaaacccatgttcaaataagagataggatactgaaacacattacaacttcactagtttttagtatacaaatattgagaaatagnnnnn

SEQ ID NO: 10224 - DNA, 980 bp, Homo sapiens
  misc_feature 980: n = A,T,C or G
acttgtcctgatgggtcatccagaagagtttcatggagatcagttcacaacattggacagactatgaaacaaagtctgtaatatcatttatactcagtattggtaggctttttccttaatacccccactccaacaaaacagacctgccttcacttctcttgaaaatattattaccatcagtaactgcttgtctactatgtctccaaggcaagccacaggctataagccaattctgcaaaaggagcagcaaaagaatgcttagtgcaattcctctatttaaagtttgcttgagttttgattattttgttatttggttttccttctattcatttgaagatttgttatttatgtgttgttgttgttttgttcattttgttttctattttgataaggatatagactgtatatattgactacctgcatctggttactatcaagtaaattggatgtattctggtaaataaaggagtaatctcaaactcttcactcttaagaaccttctttattgatcattagtgtcaacatctgaagtcccacagctatcagggagggatcgatctctgcattctcatgggcactgtgcatcagtcttacggagattcaaaggcaattatacagtcactgttcactgtgtttccaactctgtgaatttccagttcatcatgcatctcgtacccactgtgtatgcttgctgtcaaatatatagttacctctaaattatactctgtggatgagcatgttgaacaaattaatgggataaacattaatttttctgtaatatctcctaggacatataaacatggtataagggattttaaagcaatcggaaatcctgcacccaaatcccggggcagagggtgttgaacacccaggaatgcagataatcctgagaccacaggaaagaaagccacttctgaccagctcttcccatatctctgagcttgagtccggacgcgtgggtcgactcaagacctcggccn

SEQ ID NO: 10225 - DNA, 635 bp, Homo sapiens
  misc_feature 631, 632, 633, 634, 635: n = A,T,C or G
cacgcgtccgacctagcttgagtcgacccacgcgtccgatttctggtttctttggagactcggttgtgccatgtgatgcttttctggaaactgtcttatgagaggaagcttttgctgaagcagacacatgggagaatgttttgttaagaacagacatgtagtatttttctagaggcagcttgaataaagagcatgtggtattttgctagaggggacacttgagagaacatgtgacatttggaaaggatatatgtataacctaaaagacagtggccaatgctgtgtggtattggtgtgccttaccattctttgctggccatcattgggctttgctgatgctggtcttcattgaggatgctaggtgataatggtgcaccctaccatcctttgctggtcatcatttgttgtgacttcatagtgagaaacacaccaaaaagcttctggtagtgtttctgtgggctctggctcataggcagagccttatgtcttcttctggattgacccgcctttactacctcataaatgatgtttgtgagtagatcaaattgccactgctgattgatcttaactgaactactgataacctgacacacagattggatttgctccaaagaactattttttaacaggnnnnn

SEQ ID NO: 10226 - DNA, 430 bp, Homo sapiens
  misc_feature 1: n = A,T,C or G
ngccggaacagatatttggtagcctataaaacagacactgaagaaattcaaaaaattattagattatacttcaaaagcctgtaaactacaaaattggaaaatcggacgcgatctagatccctatagtgagcggacgcgtgggtcgactcaagctaggtcggacgcgtgggtcgactcaagctaggtcggacgcgtgaccttccccaaaattcttcttttttcagatgaaagtcatacactcagctttcatattttaatatacataaaacagctcagtgactgggacacttcctaacctccatttgggtaattcacttccctccaataatcctgagttatcatttattatattttgtattttaccttggctgcactggagccagttgggcagccctcttgggcctcactctcatgttcctacatgggcagt

SEQ ID NO: 10227 - DNA, 411 bp, Homo sapiens
  misc_feature 410, 411: n = A,T,C or G
cacgcgtccgcatgcctacccgggctttttctgactccgtgaagctgatctcttcctcattcgaggaagggtaaaccctttgtagatgggtaaacccttgtcagtcagagacagtagccatcccctgtaattccagagcgcaagagactgaggcaggataattacctaaacctaggagtccaagatttggctaacgtagtaagacctgtctcgaaacaaaacaaatcttgaggatgtgatgcttgcttagtgttagattgtgtgattaggatacacagggcactcagcttcctatctccactgaagcagtcaattagacaaaccaaaaccaaacacaaaacacacctgtttatattcataagaccctgtgcggtagtcctatgttacccacttccaggcaggttaccaann

SEQ ID NO: 10228 - DNA, 1021 bp, Homo sapiens
ggtggcgggcaggtactactgagaccattacaaaattaaaggtgactttttaatctggaattgcaaaccgacagcagcctgtctggggagctccatgtaatgagtgtatgtctccaacagtcttcaatgactgacaggtgaaaagctgtgccacagcctggaattattatgctgacacacaaaagagggcgggagtgacagcgtggtgatctaccagtgctgtctgtggggttaatggtaagctttcccactgctaatggtttataaaaagaacaaagaaaaggaaaacggtgcaggggaaaatcaatagtattaacagagtcatggtaatgaatgcaatcgtttatttctgggatggcttttattgaactggttttgaacttgataccttttattttaagtttatgagttagtgaataagaaattcagggaaaaaatcaactttctgccagacacagcagccatgttgtgttgatcaaagctaaagttttcagtctttgaaaaagggaattgagataggaatatataaatgtttatccataaggaggataccatggaaatgctggggaataaggtgtggtttttgatatcagaaagacctatttttgagtcctagttctgtctgttagctgcatgaccattgatcaatttctttttgcatgaaacaggatctccctagccagggttgttatgagactcaggtgacatcatgtctatttataaaggcttctaacatggtgcctggtaggtttcctacttaccaaaccacaggtatggtttgctgatgccatcattatcttggtattttatacttcattatagtctcccaattcaatgaactcttgagctgaaggccaagaaagagttgtatggtgtatgtgaccttttcaatctgttgattaacgatattcatattaatatcaattttcaggagagagcataaatttccaagagatagagaaaatcgttctaaaagatgacaatctctagaaatactcaagcaaatgtggtaggatcatgt

SEQ ID NO: 10229 - DNA, 179 bp, Homo sapiens
aggtacataaaacttgtagagatttacacacgccagccgcacatcgccccttcccaatggctttacatcttggtgacctttcagaagccaacggcacccttcctgttgttacccgtaattggaaaagcatcagagataaaaaaaagtgcggcgctcgtgatctagtccctatagtgagg

SEQ ID NO: 10230 - DNA, 479 bp, Homo sapiens
  misc_feature 476, 477, 478, 479: n = A,T,C or G
gaaacatttttattatttatttttctttgttacaaaaggactaagtggttctgaaagccaaggcagagttcatgtgtctgggctgacattcccatggcctatgagcactgagcagccacaggcttttccaaggaaggcccaaggccatcacatccccatctacatctacaatacttgaatgtatttacatgtgttgttctttaaaaaggattacacattttattctttaaaaatctaaaaaatgatggagaaaaggaacacagtttatcttacacatttgcaggatatacaagggtaacttgtcagaggagaacaccctcctattagcttcaaacaacccaggaaatcagatcacccaacactgcagaccaccgccacagtcctgtgctcgtttcctggtaatactgtctgggcatgcagcctctgagtgctcggacgcgtgggtcgactacctcggccggcaccgcgggggagcnnnn

SEQ ID NO: 10231 - DNA, 658 bp, Homo sapiens
  misc_feature 1: n = A,T,C or G
nctgcaaaaaacccctgcctgccaacggagcctgtgcctgaattttccgtgggctgtgtatagtactctgtgtttgtgattctgtgtcacgctctgtgtaagtgactccatgatcaaagctttcctgtcgtaattgtgtggatttacttgttgcccactgtccccataccctccacccccacatggtgtgcttcctccagaaagggactacttctgctgaccacacagaagacgtgtgtaaagtctgtgtatcaatgaatggattctcatctttcatagtttttttttaaatagttttatgtgtgtttaacttaatttcacttaaaaagatatttaccagaagctgaaagtacggtgtgatgaggttgggttcaggaaggactggtatcacatggcttccctaaggtgtatattacattgctaggacacctgacagagctgtggattagtgaatcttacggatggctcttttcagttgaatataattctgaagctctgcaccattcttcccactgtgttgctgttaatctaccataaaccaggtagattctgcatagtttggaagtgatggaaatcaaggtgaatgcctgattctttaaatctttttttttgagactctgtctcaaagaacaaaaaaaaaaaaaaaaaaaaaaaaagt

SEQ ID NO: 10232 - DNA, 329 bp, Homo sapiens
acttttctcttaacttacctgactgaaggcatccaatcagaaaggaaagtgaacaagtataatgtttctaagtgagtccagatggtaacaagaattcaaacattattctttttgtatgtttaaataaaacaaattttacattttatttgaccagcagatataacttcctgggcataattttattagcaaagaactgatgatactggtaataaaaaaaaaaaaaaaaatgaaaggaaaaaggagaatgcacctcaaaccagaataccataacatgttttgtggaagctgcattttatttgaaaacggacgcgtgggtcgactcaagacct

SEQ ID NO: 10233 - DNA, 819 bp, Homo sapiens
actttttttttctctgtaggaagtcaacgatagagtgacatgttggctctttcatttcaactgagacacctggtagctattggatggcatttctgtaattatgaatagtagttgtgataggcttatttgcaccttgtacattctcttacttgggaacgccatctcatgccatttctacgtttcttatgcagttagtttggggcatgtggtagtccactggaaaatgactcaagcgtggaatgtatttatgatcacagataaggaagtggccgtccacaaagctttggatggttggatttgtcatttgaacaaattataatagtttagctacatatatctaagtcaacaaaatttcactcaatgtaaagttgtaactaattttaaaaccaataaacggggcctcgttctcatttttctccacaatgttattccctttcattctctaactacaaaacttatgcactttatttctcaagtttgtgttttacatttctaatacatatgtgtgtttgttaacagtgtgtagcgctgcgttttttaaaatatatgccaataataaaacattgtaaacatcactgtgaagcttgttgtttttgctaaaataatttggagacatggaaaattaactataattcatttcagtatttttaactgctatgcatcatcccaattcaggaatatgtgacagtcactttgatggtcattagggcacatggcgctggcagaagcagtggcagtctaggtcagaggtcaggttcactaaggtcaacaggcccggacgcgtgggtcgactcaagctagcttgtacacctcgggccg

SEQ ID NO: 10234 - DNA, 224 bp, Homo sapiens
acctgctttgtgatactgtgaagattagataaagcaaatatccacacaggaaagccctgggtgttagcataaagccggagttgagaaggccagctttctatttacgtgctgaacgatgaatagttaaatagtttccgtctggcccacgtccttacacacaccccttgggttttcttctcttccctggtaggactgcatcggacgcgtgggtcgactcaagctag

SEQ ID NO: 10235 - DNA, 540 bp, Homo sapiens
gtccgctcactatagggatctagatcggacgcgtgggtcgactcaagctagcttgtacaaaaactttcaataaaatgcttcaaataatgattgtccgaagcttgctagacactttgtaaatgtcaggaacacattaaatatgttaaatgagcatgtccaatatccagaaaacaacacgaatgatttactatcaatttcacacatgcctgggaatgtctccctgatgcaagacaaaaaggtcctctttgaccagagcatactgaccccaagttttggtcctggcacagtattcatgggtgccattcatgctcaacatgaactgtgagatactttcttagtgttaagtagatatgttttggggctaaataagaatttcgagtttaaaatgccttttatggttgagtaaggactagaatagatgttgtgcttcattaacagtagataagagaggttactacactccttaaagttacaagttttctgactatatccttaaatctctcaagaatcttcggaccggacgcgtgggtcgactcaagc

SEQ ID NO: 10236 - DNA, 681 bp, Homo sapiens
acaatggaaaaggggctgtgttactaagactgaccaaagaagagattccaatatcttatgatttgtatggtcactgttaactgcaattgtaacatgaacatattgcctataagcctgtgctctcccctttaaacacaaaataaaaaacaagaaaaacaaaacaaaacaaatgaaccaaaatagaaaaccttttacagcgtgagttgtttctacttaggattggacatcagtgcattgatctgagtctggagatcttaggccaacttaacaacctgtgaaaacttctcaaatggggtaacaatatcctaaagcagagtatagtcagagctgaatgtggtttacacttcagacaagatactagctttgtgcctattccattctgggaagagagccattttcctaagagccttgaatgggctccattgctatcaccctagaatggtatgggtattgtctatattattgattattaaaaaacagaaagatgaccaattgctgtatatatttatcttccttccttctatcctaacgtccatataatttgcacaaaagaaactgaaacctcttttaacacatttgtgttattatatgtgtcacaatcatgacaaatagacacttgaaattaattcttacaatattttgtgtcgacccacgcgtccgccggagagaatacctgcccgg

SEQ ID NO: 10237 - DNA, 234 bp, Homo sapiens
cgggcaggtctccggcggacgcgtgggtcgactcaagacttttagcctctaagccatctctctcacccattgatttaaaatattttgctttgtgaattttgaattgtaatttttgctaatataattctatcattttctaccttcatttttctcctttcaatcgcttctatctattctccaattttgctggctttcaaactcatagcctctttttttcgctaactctttttacct

SEQ ID NO: 10238 - DNA, 404 bp, Homo sapiens
  misc_feature 356: n = A,T,C or G
acatgctgttctatatcttgatttttttttttctactttacacatctcatgagttttatccccagcactgggtatagaattgccccattcttttcaagggcttgctgtaaagtattctgggaactgggcgcactctctttaactcttcctctgttgattgttttcagtctccttctttctataaagcaagttaaaggaaacattcttttaacaatgtttttaacaagtcttagcaatggtttttattatctgtaggataatctaggagtagagttgccagtttttagagtatgtgcttttgaaattttgtttgtattcacttgggcagcagtaagtcatcttttgcttattgtcgncgctgtctcgacctgaaatcctttctttttatattcttgccttctttt

SEQ ID NO: 10239 - DNA, 260 bp, Homo sapiens
  misc_feature 260: n = A,T,C or G
actactggcactgagccaatgtatgctatcaaggaaagctttatctgtcactgagcaaaaggtgaagttcaattaggtcagttttatcacttcttttcctacacacaaactatgaggagagatcatttcttttctttcttttaattaattaattttttttggaaaacaggggtcccaactctgttcgcccaggttaagagtaccctgcccgggcgggccgctctagaaactaggtgggatcccccggggctgcaaggaan

SEQ ID NO: 10240 - DNA, 202 bp, Homo sapiens
tagggcgaattggagctccccgcggtggcggccgaggtacgcgggggctctctcagattaaggatatgtgtctgctaggtaaagcgacatctggattcattgtgtaggatgaaagaaaccaaattctgactgcttatttgtggatccgccaaatctggcacgatgcctatctcacgtgggaccgagatcagtacctgcccgg

SEQ ID NO: 10241 - DNA, 764 bp, Homo sapiens
  misc_feature 1, 764: n = A,T,C or G
ncgaattggtgctcgacaacggcggccggccgcccgggcaggtacttggaatgctgtgtggagtcctttttctacttttgttcctgagaaagagagattcacaaacttcccacattcttccagtggcatctaaggatcccttcctaaatggcctttctcccagccaatagactgaagcaaaccatgtccctgatgcttcctgcccaccaccatccattctttcaaccaacagcttctccgggctttcacgtgccatgcactttgctaagagcttgagggaaatacagcaatgaagaagagatgatttctgtttggaccagtgctcagggattcctcctattagaaatcaaagaggcttccaaaagccctacaattttttccctgtaactaaagaaaatagcttctcaatgtaactaaattttatctcatacgcaaattggaatgtataccctttcactctgaattgcttgaaatattccaggagaaataaatacaactctgtgtaaggtcttctaaaaaagcagaagtcaaagtcaccagaaagaacctttaaaatcaactatgtttctgacaatgttgctttcgaaactgttaccccactcccgcaaaatcaccattgaaaaatacctttgtggtgtaattaagattaatcatgaatgcactgaatgttcagaaatgagtgtttttgtttttgttgattaagtgggaagttacagttagcaaaaatgccttgtacctcggcggccatcgcggtgaattccaan

SEQ ID NO: 10242 - DNA, 723 bp, Homo sapiens
  misc_feature 1: n = A,T,C or G
ncaagttgtcttttagcattcaagcccagtttttctaatgttctaggaatgccagaaccttaccttgaagcaaactagtatttttgttgaaaatgtatatcagcatcagttaaagttgatttttcagacctgctcctcagtaataatactagctagtcagcattcacgcctaccaggacacaaaaatcctcttcaaaactactcagaaaagaaagtcattactcaggaatgatgtccattcaggagaaatcaaaagagaattcctccaaagttactaaaaaaagtgacgataagaattcagaaacagaaattcaggattctcaaaagaatctagcaaaaaaatcaggtccaaaggagactataaaatcacaggctaaatcttccagtgaaagtaaaataaatcagccagaattggaaacacgcatgagtacaaggtcatcaaaggcagcatctaatgataaagctactaaatccattaataaaaatacggtgactgtgaggggatattcacaagaatctacaaaaaagaaattatctcagaaaaaattagtacatgaaaaccctaaagcaaatgaacagcttaaccggagatcacaaaggctacaacaattaacagaggtttcaagaaggtcgttacgcagtagagaaattcagggtcaagttcaagcagttaaacagagtttgccaccaactaaaaaagagcagtgtagcagtacctgcccg

SEQ ID NO: 10243 - DNA, 196 bp, Homo sapiens
aggtaccccctctcgttccctttcagctttatccgtgctacatagggttcacgtcacccatctgaatgtccatcacatcataacatcagatcatggttgagagctgattacatgctaattgcataaactcattgaattttcacaaccaacagacaagatagatatggactgacatcgcctccattacactcatggt

SEQ ID NO: 10244 - DNA, 1067 bp, Homo sapiens
  misc_feature 1, 2, 1065, 1066, 1067: n = A,T,C or G
nnagctccaccgcggtggcgtcgcggccaggtaccctgaaggccgcttacttggaaccgtatcttctaaatgctctgaaaacctatccaaaggcaattaaaatcacaaatatcattgaaaacatctaagaactacgtgtaagcacttcgggatagtcaggtaaaggcggccctctaattatgaagcattttgataattaatagaattctaagccaaagcttaaatccggatacacatcataatggttaagccaaataacacttaatcattttaccttttattattgataaagacaacacactgaagtagacagacagtaaagaaaaagtccacatctttttattgggtccaaataacctgattgtaaatacttagcctctgattttcatgtttcagaatttgtatgttaatgaccttagtagatgtggctttgtccagcctcaaaaagggttgctctccagccagggccccttttttccagttactgctcccatctcctttaagtatattcaactggtgagtgaactctttatcccgtgtgacaaatgcgtattgaggccctaacatgccccagacctcagatgtgctgctcatacatttgaggtagccctgacttgttttgggggtgggggtgggcttttccatcagttgtcttggtcgatgtagccagtcagccaattccaaattgcactgagttttcttcattttacttttggatattaaaaactaaatagttttctgcagcatcgtagactagattagaaaccaagacttctgtttcacaatttataaaattggacaaatgtattctcagtgattctgcaatgtttctgcccatttttccctcttcaggaagttgtagaggtaagatgccctattcctgctatgcttatgttgggcattattccagaaactgaagattcaaaggtgggtccccactcctagaagcccttcaaggggcagaggttcccagagaggaccataatccagtgtgaaaactgttgtactgtgtgtggatcaagtgtcaagaaaacccacataagagcatggctgattcttgttgannn

SEQ ID NO: 10245 - DNA, 671 bp, Homo sapiens
  misc_feature 668, 669, 670, 671: n = A,T,C or G
agggcgaattggagctccccgcggtggcggccgaggtacaatactagagaagggagagaatatagttaggacaataaattattgaacaagtgatttttctgtgatgactatacccattttccaaaaactaatttcatttttggtgtgtgtgtgaagaaagtttggaggcttcagtttcaatcactgtgctcaatacttaattttccattattcacagagaaattgtttttctggaaattggcaagaggaaggaagtaataataaaagatgacttatgcagatcccatgtgaccatcttacattcttactcttgtgccactgtttccctggcagtccgttactggtttaaagagcactgggatataactctagaaatacggattattttctcacctctgacactcattcatggtggagccttaaccttagtgccaaggttattggcatttaactttactatttaaccttgctgaactacagtgtccttcctcaatgtcagaagaagcttagatagttaaataacttctaaggattatctatctggattattaggatttttcatcattcttggcgtgattgtcacaagaaaacaggacatagctagtggcaagtgcatcctcactcaaagttactgtttttttttttaatacagagtcttgctctgtcannnn

SEQ ID NO: 10246 - DNA, 242 bp, Homo sapiens
  misc_feature 236, 237, 238, 239, 240, 241, 242: n = A,T,C or G
aggtaccagtgaggcatttcctgatttttactcataatatttacaaagattaaaagagataaaattccaaatgtgaaggcttaaattgttcaaatccttactcaaagaaatagtgggaaaggtgggtaagtcagagtctgctgccgatgaaggaaaaaaatcaagttaatctcttctgaaattatcatgatttgtttggtttagattcccagaaacaaaaaagactaacaaaaagnnnnnnn

SEQ ID NO: 10247 - DNA, 302 bp, Homo sapiens
aggtactcaaaaggcatttccgcttacaatttgtagaaacacaaaatgcgttttccatacagcagtgcctatatagtgactgatttttaactttcaatgtccatctttcaaaggaagtaacaccaaggtacattgtttattgttgttcatggcacatactgaaaagaacttaaactacaggcctaaacttattgaagggcatgacattcagtgtatactccttacttggagatttctgtcactgcaggctatagctcattctgtacctcggccgccaccgcgtggagctccaattcgcccta

SEQ ID NO: 10248 - DNA, 180 bp, Homo sapiens
aggtacaccgtagcttatttcaagtgacacagaccaggcaactgacaaataccgacaagtaaatattgttcattttcctaggtaatctctataatcaaggggactgatttttattctggaattttccccaaatgttttctttgtagaaattatgttgctctcaattgtgtgcatggtagt

SEQ ID NO: 10249 - DNA, 217 bp, Homo sapiens
  misc_feature 201, 202, 203, 204, 205, 206, 207, 208, 209, 210, 211, 212,213, 214, 215, 216, 217: n = A,T,C or G
actctgacggagttacacacccccagctatgaagtagtcttgccaaaacaattgaacatgacatttcatcaagctcttagaaccgactataccaatttatgggataaacagaggaccacgtgaaacaaagccattagggatgccattaagccaaaatgtcagacttataaaaaacttttacaggaacaatacaacgcaagnnnnnnnnnnnnnnnnn

SEQ ID NO: 10250 - DNA, 919 bp, Homo sapiens
  misc_feature 1, 2, 3, 919: n = A,T,C or G
nnnaatgagaatgaaggctgagacaagcggtgcctgagcccgtgcctgtcttcagatcttcacagcacagttcctgggaaggtggagccaccagcctctccctgacaagcaaagtggatcagcaaaggctgcagtcaccagcatcttttccaaccttaatgaactgtatcctcaaaagaacactatcagactggctctgccgacttccagttctggaacaagatggttaaactcatttttccctgctctgctcctctaaatacaactaagtaccttggaaactattcagcagacaatgataaagggctctgaaagctagaagaaaaggtgtacttgcaagaaacctcaggacttgagtaacagcaacatggtaagttttctaagttttctttttgtctcccatatacgctgggctgtgctggaatcaccaacaggcacagaaaaaatgacaacaaaacaacaacaaaacccccaagaatatcctgttgtctttggccaaagttcaggaaaggggagccccaacagagacccagtaggaagctctagcccctgttttgtacaacccagggtccttgcagagagattgatctgccagcagtggcatcagcagcaatagtagcagcagcaaagccctggacagtcctggcccccagtccacaacttagacacagcacatggcctaattcacccacagaagcagccactgtgaagccctgtgtctccccagactccatccagtggcataaggagacccaggccctgcagcttcctccccatcatggaaggctgtccatctacagagtttccaaacataataagcactaaggaaacaacataacatgatatgccgaaaaaaaaaatcacaattaaatcaaaatgaaacatcaaaaaatgtccaagtaaaccacaggaaggcaan

SEQ ID NO: 10251 - DNA, 2043 bp, Homo sapiens
caccgcggtggcggccgctttctcttactgatagtaggatatttctgctttagttattgtcaccttaaatatattttcaatgttgaaatcctcacagcatgtttgatgaaatctagttttcaaattttcttaggtatatttctgtcacgttggcatgataacaaatgcaataacccaaaagaccccaaaagctagtgtaatcccttttgcaatccaagcatgaggattcatcttcatgttgacagtgcgtgaatgttcggtaggctttgtcaagcttgcatacaataaattatatatgtcccttttcttttagggtctcctgttaaagatggtcttctgaagggctaactgcggaatgaaagtttctattccaactaaagccttagaattgatggacatgcaaactttcaaagcagagcctcccgagaagccatctgccttcgagcctgccattgaaatgcaaaagtctgttccaaataaagccttggaattgaagaatgaacaaacattgagagcagatgagatactcccatcagaatccaaacaaaaggactatgaagaaagttcttgggattctgagagtctctgtgagactgtttcacagaaggatgtgtgtttacccaaggctacacatcaaaaagaaatagataaaataaatggaaaattagaaggtagatatgctgctgaatttagaacattctctgcaatgataaggtctcctgttaaagatggtcttctgaaggctaactgcggaatgaaagtttctattccaactaaagccttagaattgatggacatgcaaactttcaaagcagagcctcccgagaagccatctgccttcgagcctgccattgaaatgcaaaagtctgttccaaataaagccttggaattgaagaatgaacaaacattgagagcagatgagatactcccatcagaatccaaacaaaaggactatgaagaaagttcttgggattctgagagtctctgtgagactgtttcacagaaggatgtgtgtttacccaaggctgcgcatcaaaaagaaatagataaaataaatggaaaattagaaggtaagaaccgttttttatttaaaaatcatttgaccaaatatttctctaaattgatgaggaaggatatcctctagtagctgaagaaaattacctcctaaatgcaaaccatggaaaaaaagagaagtgcaatggtcataagctatgtgtctcatcaggcattggcaacagactatattgtgagtgctgaagaggagctgaattactagtttaaattcaagatattccaagacgtgagccccaaaaaaaaaaaaaaaaaaaaagtcctgcccgggcggccgcccgggcaggtactgcacaaagctctcttcagcacacagcataaacactaacctataaaatatccagaaagacttggttttattgcagttggcttctctcgtgctggtgtgctcattgctttcttgcaacatatttttatattttctctcataagtctacctttctttatctacaaccgtcttcgtaaattattttgcccctgcaccaccagcccagatgtttgttgggcttatctgcaacactttttatatacctggcaaggatccataatatctaagtaggctctgtgaacatctatcctgtatgactcatttggatatagtttcaaagcttgtgaaactagtttatgatgttggaggtcaggagagtagttatgcctgggttgagggacaatgagtgagaagtggaaagggcatgagaaggcaccttctgacattttaaaaatataaatgctgcccatatgtattcatattttgaaaatggaacaccatttgagatgcacacatttgatctgtgcagtttttatatgtatattctacttctaaaacgtttacactaaaaataacccataagattgtaaaaaaaggttttctcagtccaacttttattaatactaaactcaaacaagaggaggaaagaaagacgacaaagctaagtacctcggccgccaccgcgtggagctccaattcgccct

SEQ ID NO: 10252 - DNA, 209 bp, Homo sapiens
agggcgaattggagctccacgcggtggcagcggccgcccgggcaggtaccttgcaagtattagacttagaataaaactgtgttgactgatataactgatgcatggttggaatagtaggttcttgggtaaattaatcctaacatcaatagctcaattccatcatagtccttgaacaggcaaaatgtatgctaatcacaacagccgtacct

SEQ ID NO: 10253 - DNA, 358 bp, Homo sapiens
actattttcagatggtagggatacaaatatattttccctatattcaagggatttacaattcagtagcagaaacagacatgtaagcaaataaccgcaaaacaacgtattaactacaatagcgttgtattcaaaacattatggaaagatagtaattagcaaaactaagtgattaataaagtttcattaaatctggccaggcagggtggctcatacctgtaaccctagcaggttgggaggttgaggcaggcagatcacttgagctcaggagttcggaccagcctgggcaacaaggcgaaaacttctctctaccaaaaaaatacaaaaagattagctaggtatggcgcatacctgtagtccc

SEQ ID NO: 10254 - DNA, 348 bp, Homo sapiens
  misc_feature 348: n = A,T,C or G
accaaccagggctttgattttcatgctgtcccaaagttgcagacatgttcacgacacagctgcgtttgttccttcatcttgttcagcaacctttggtaagaaactaccatatttaagattggtattctagatccaaaagaaaaatgcatgtgtttgctgtgtgtgcatgggcacatgtatgtgtatgtctgtctgtaaggatagagaatggctgaaaattcacaggtttttaaattcttaaaaacaggaacgaaggaattctaacagctatgactcaaaacaagattctaataagttccatgacaagtaaaacaactattcattgagatgttaatagccttggtaccn

SEQ ID NO: 10255 - DNA, 1107 bp, Homo sapiens
gcgtccgatttttgttcgttgtcccatatttaacgatcttcagatcaaatctttttatgagctcaggacttggaaaaggtagtctttcctgatgggtggatgtattttctgtagttagacaatgagatctaaccagcctgttttgtatggattgtcttcttggccttgactgcaaggatttatccttaatttccatggcctaattatctttccagtgtttccctttctacctttattaattggttctcgtccttttattcttcattcacttttttgtttcattgaatctataaattaaatatggtctcgtttgtttttagaagtaggtggagtacaactaaatattagctaatggtagcacaagtagaacctgtttaaaatttttaaaaaacaacctgttcactgtaagaatgagatacccaaggaaagaacaggaaagaggtgtatttttaatcctgccttttgtatttagtgtgccccatgactagctgttcatctaacatgcttcttggttctcggcaggtgaatggctatgtggtgaaccttttctgggcatttgacacccacaagcaagagaggagaactttgaacttccgaggaagcatattgtcacacaaaggtaacactttggtgctggtcagtgtgtgtgcaggaaggggtaaggctggaccaatgctttcccgccgtagagcttgactgggggtgccagggaaggggaggtattctctggaagctgttctgtgttgacaggttcttgtgcattgaggatcctataagtgtgctgctgattctaggcagagggattcactcagtggcccctcgagccctcctccaacctcatgacccttagtggaagttgggggccataaggaggaaaattggacagaggcaagactaattctctgcagatgagttttgatttccaaaagaaagagttcttagatatagacagttacctgtctgtcctttctagtctggttcactctcccgttgctaatgagagacagcagaaggccttatgcataactggtgttcagtaaatacatgttgactggagaaatggacaacaaactaagggaggagtggtccagtccctgttacgtatgt

SEQ ID NO: 10256 - DNA, 613 bp, Homo sapiens
acagagggaggcagtgaagtctatcattccatgctctcaaatgttaactttctgctttatatacatagcaatgcctcatttacctaatgttggggagtaaggtattatatgtgaaaattttattttagctataccttttgtggaaaaatttttacaatatatgctttggttattattactagcatactggcagtagttgagtgaggctatgagatgatcgaaaaatgtagtttgttgtccactgcgctttttgaattattgaatctacttgagtcgattcagtagtcagtctttgtcttctttcagtggtggaaagccgctctcttgctgctgttagtatccttgctgccctcttttaaatttgcagcttcttatctgtggagtaggagcttcctgacattgaatgtaaaacagctaaattggcttagttatgttctacctgctcttctccaagttttagggtatgaactttgtaaccacttatttttgttgcccagggacgtttttgtttgtttgtttcttatcgttggtgtagatagtgaacgtgtgctctgtataggtgcatttatgttcctgtagttttctgtaaaaaaaaacaaaataatatggaagt

SEQ ID NO: 10257 - DNA, 369 bp, Homo sapiens
accatcatacaacataattttaaaagcttcactgtttcaataaaaaaactaatataatcatgtttatctgacagacccattgctttattcattataatcaaatagaagaagaggaaatttatggtgttttgagaatgcatgcaggttttctttttgttttttcttttgaggtgtgaatacagtaataaaatactgactaatgcttgaaaggcttgaagaagggactagcggtggagtccaaggacaagaagagatgagaagcttttttttcttttcttttccttttggtttcagagggaagaagctatgtaaattggactgggaattaatatccagcttcagtcagagaataagaaatagcttgaaagt

SEQ ID NO: 10258 - DNA, 503 bp, Homo sapiens
acattttcaaatggttaaaatggtaaattttatgttacatgtattttaccacaatttttttataagaccagattttaaagagaatcaaacagaacctgcagaaataaaagacataataattgaaattagttcgatggatgaatcaaatagcagattagctcagctaaagatgactgtgaatacacaaaatgtagcatggtgatacaaaaattgaatatatcaaacagaagttatgcaacatgaggacagaatagaatgtccaacatatctaaataccattcaagagggaaggaaaagaaaaatgagaaccaggcaatatttgaagatataattgctgggacttttccaaaaactgctgtagtttctggaagcacaaaaaattgctagtaggataataagaaatctatacctagtcactttccagtgaaaatgcaagacactaaagacaaaaaaaaatttaaccaccagatagaaatgacagattgtctacagaaaggacaatt

SEQ ID NO: 10259 - DNA, 360 bp, Homo sapiens
ccgggcaggtacttattcccattttataagcaaagaggtaggactggaaaggttaagagcttactcagcgagagagagctggtaaataaaggagtgaagattctaacccagatggaatgtcatgccgaagctattagccactagaagataatacctcacttgcacattctgctgctgctgctgctgcacctgaggccttcacctgggctcggtggtgaatgccctaagatggttcaaaaactgcatgtgaaaaactgttttaggccaagctatcaacaaatcttctggtgatatcaaacctggtggcacagataagagaaatttgaaagtgactttcaaaagcagggtggaagccgtagt

SEQ ID NO: 10260 - DNA, 176 bp, Homo sapiens
aggtacgttgtcaggacattttgtaattcggtattcttggtctcctggccccaattctaaaaaaagttcacgttttgatgaaaaaaagatatgggcattatggatgttgaggagatcacagctcaaaagattgacaggggccccagggcatataagaaacatatggtacctgcccg

SEQ ID NO: 10261 - DNA, 754 bp, Homo sapiens
actggtctgtctgcagaggcaccaagatgatatcttcctccactgtcagagttatttaggaaaaataatctctggcataggccgagtgctcataaatacttcacgatgagacaataaagccgctcccaggtcctggcatggcccaacctcaggacactggcctacacatttgcaggtagaagcaaaggcctgcgtcaggcctgtggccagcttttgcctgtgcgggaggctctaaaatgaagacaatcttactccaggtctccttccactttggtgcctctagaatgtcatctccctcccctcctcttggaaaggagtcactccaccccaaccatccaaaggctgatgggccccgctgcccaactcaatcccacacagtgccttgagcctaggtgtgttccactgtatgcacagccctacacatgtgcctggaggtggaggggcactcggctcagctcaggcccccaaggaactttgcatggggctggtgggaccaatgttgaaaccacatagtcactgctcatggaaggtcagtggcaggtgttatctcagcatccctatatccaggtccagccttttccaggcttccctctctgtagctatgcctatccaacccattctccttgctttcaaaacccttcagtgaccacccttctgacaagcacttcccaaccttcctgtatcacagcatgcataggaaacaacgacctctgcatggaacagtagctgaaacaggaggctgtgcctggagagt

SEQ ID NO: 10262 - DNA, 186 bp, Homo sapiens
  misc_feature 1: n = A,T,C or G
ncggagtacatttcctgcagattctctgaagcctatctgtgcttctcagtattctctagcggagttgaaaaacgccccttagaggtgcacagttaattatagaagctgttagctttcccatctgtagtcatgccctggagctaagagaaggacttgaatacagaagaggagatgccccctgtacct

SEQ ID NO: 10263 - DNA, 843 bp, Homo sapiens
  misc_feature 1, 2, 3: n = A,T,C or G
nnnccgaaagaggataaagtctcaggcatgggctgattggtgagcaaaagtttatttgacattttcttgggtcttcttcctctgtctggtcagattgcagaggaggatcgtaattccattttatgcaattttatctccactcacctttcataggaaatctctagaactctgagtaataattgctttgaattttagagttcaatgactgtcacattttcatctctcttttctttcttaatcatctgtctttggtggtttgatgtttttagttctatagaattcataagctacagggaggtagaacacaggacacattcagatttctttttctttctttcttctttttttttagccctgagatgtatttgacttctgaacacctagaaccctttgttttcttctttcctgtattccctgaccctttattccagttccagcttgctatttttgtttgatacatttgcagattcactgaagaccacccagcccatatatagctagctcttctgtgagatgtgtatttaaccctgaaaaaactaatgcaagaaataggagagatgaccgaagggaagactcatagattcttttccccctggcattgccaggattttcatacatctcaccactagtgagaggctgagctgcttgctttaatatactgtacctcctgctagtgacccaaacagtgtggctttgagagaccctaagttcccataaagtttgtagtactggaagcatcttcctttgcttttatttagattgctgtcaatagactgcaaaagattacatgctgtaccttgtcatctggagttctgactttaccagttggcattatatgcttgt

SEQ ID NO: 10264 - DNA, 625 bp, Homo sapiens
  misc_feature 1, 2, 3, 4, 5, 6, 7, 8, 618, 619, 620, 621, 622, 623, 624,625: n = A,T,C or G
nnnnnnnncaggtacatctttagagagtagagatacatctgcatataaaaaaaaaatctgccgtaagtgatagagttgaaaataatgtcctacataccagaatgttcttctgaattaggcatcatgtaggtattcagcattctttccatttccaaattgctcccactccctgttttttcatcatcccctttttcctcattagctcattggaaccaaggtactccagcctggcttcagagcgagactagtttgactttgagtcagctcagcattctaaatcaaacgcaaacagcagaatcatatggcatagacacttagcaaatccaatgccttccaggcatctgtttcctgttgatgaaatcctccctatggagagcaaactggttcatatcttcagatagtgtcattcaaccccttggcagctttctgggctactaaatatcacaccgtctggtgggacatttcacccaagttgttcatttattagttttctggcttcgtggagaattatctgccttctctgagtattgatttcattgtgcgcatggtgaagatatcgcctgttctacaagggagtaagattgagtgagatccccgcgtactgcgcccgccaccgcnnnnnnnn

SEQ ID NO: 10265 - DNA, 293 bp, Homo sapiens
accgcggtggcggccgcccgggcaggtactgaacttattttaagtctccaatttatttgaatataaatttttgggagctgagaacattttttatttatatgtgtattctgattgtttatctgtgtttggcatataataaaagttgattgagctgaaggacttaaaaacctgaagcacaccttccatgcttttcatttgctttacctctgcatggaacacttttaatctgtctctcctgtgtgaaacttctctgaaacccttaccagctgtctgtgctgctacttgtctgttgt

SEQ ID NO: 10266 - DNA, 821 bp, Homo sapiens
  misc_feature 1, 2, 815, 821: n = A,T,C or G
nncgattggagctccacgcggtggcggcccgagtacttcttggtttcttgtttacagagtaagatatggatccagatttattttatttcaaatggctacccaattgtcccaaaaacctttattaacaatcaaaatcaaccttgactccactcaactattattccaacttcacctaaaactaaattcacaagtgtatttgggtctatttgggaatctctgtcctgtcacactggcctgttattcctgagctgagcactgtagcatggaccagaccccacacacctctcttcttttgccagaggctcatggcacttctgtaggtcattttttttcttttttgaatatacccttggtacgagatctctgtatattttttcatctgaacttcagaatcagcttgtattgaacaagagagaaacggatgggcattttaaaatttgggattctgttagatgaataatctgaggaatgttttttgaatttgtcttctcttcctttatatcttacaaccaactactgttgtttgtatacaagaaagctacagattacagcacactaattttacatctctttaataggggatagtgtgtccatacactgagatgacatgtagtcattaaaaaacaaagaatgagtgttcatacggtgacattgagggagggcttacagttttgtgggaggagggaccattcatattaagaaaggggaaatggggggcagagaatttgccacatatacttcagcaatttaagaaattttacacatttttccaatttttttacacgtaacaaaatttaccatcataaccattttcnacgtgn

SEQ ID NO: 10267 - DNA, 187 bp, Homo sapiens
aggtacaaagggaatagataacagggacattgatctaaagggaggttagggaggacttcttggaggaagtggtatttgtgtctgagttatatgggatgtgtgggatttcttaggtgaaagagggcagagcaatacggtggtaggctagatctgtgcagcggcttagagacaagactgtacctgcccg

SEQ ID NO: 10268 - DNA, 485 bp, Homo sapiens
  misc_feature 480, 481, 482, 483, 484, 485: n = A,T,C or G
cgagcggccgcccgggcaggtaccttggcaataagttgctagttatctcagcctataaaatgtagggcatatggacattaagattataaattagctttggtgtaatcaaattttataatttgtaaactggactatgttgtgcatcctttcatagtttaggatgattaagagtttggaccttataagtaaactgccacattttgaatcataggccccaaatgggtactactagtgaattctcagagtcattaatctagattgtttcatgcctctccttatcttcatctataaaaatggataataggactaactgcttcacaatctctttgccttgaattaggtgagataatgcaagaagaacaacaaataccatacatgtgatagtcattaataaatttgagttgttattatctaattattaaggagaattagaaaattcataaaagcaaatgaagaaataaatcattccttgcctattannnnnn

SEQ ID NO: 10269 - DNA, 3846 bp, Homo sapiens
agggcgaattggagctcctctcgcggtggcggccgaggtacaaagagtagctgccccttctcagggcagatgatgctttgagaacatactttggccattacccccagctttgaggaaaatgggctttggatgattattttatgttttagggacccccaacctcaggcaattcctacctcttcacctgaccctgcccccacttgccataaaacttagctaagttttgttttgtttttcagcgttaatgtaaaggggcagcagtgccaaaatataatcagagataaagcttaggtcaaagttcatagagttcccatgaactatatgactggccacacaggatcttttgtatttaaggattctgagattttgcttgagcaggattagataaggctgttctttaaatgtctgaaatggaacagatttcaaaaaaaaaccccacaatctagggtgggaacaaggaaggaaagatgtgaataggctgatgggcaaaaaaccaatttacccatcagttccagccttctctcaaggagaggcaaagaaaggagatacagtggagacatctggaaagttttctccactggaaaactgctactatctgtttttatatttctgttaaaatatatgaggctacagaactaaaaattaaaacctctttgtgtcccttggtcctggaacatttatgttccttttaaagaaacaaaaatcaaactttacagaaagatttgatgtatgtaatacatatagcagctcttgaagtatatatatcatagcaaataagtcatctgatgagaacaagctatttgggcacaacacatcaggaaagagagcaccacgtgatggagtttctccagaagctccagtgataagagatgttgactctaaagttgatttaaggccaggcatggtggtttacgcctataatcccagcattttgggagtccaaggtgggcagatcacttgagctcaggagctcaagatcagcctgggcaacatggtgaaaccttgtctctacataaaatacaaaaacttagatgggcatggtgctgtgtgcctatagtcccactacttgtggggctaaggcaggaggatcacttgagccccggaggtcgaggctacagtgagccgagattgcgccactccactctagcctgagcaacagagcaagactccatctcaaaaaaaagtgcaagataatgaatttggggtaaataattcacagtcaagagctctgagcacttggattcaaaaagagagcatgagggacattaaatatggttctccctggaaatgttggtccactgtactgatgtgggctgagagagccaaccaaatccaagtggggttttgtcaggaacggtattggaaactctgaactagataaataattcaaaggatattagctaaagtgatcagggaccaggacaggaaggtactgttacaaacggagagaataaaagggcaaactgaaataatagatcctggaatagcacagacactgacctctgaccacagaccaaaagttagggcctagttgtatttcttagaaatacaaagaaaacaagtttagaatcatagaaaacactgttaacacattagcctgggaggtggtactatcggaatgagacgcagcacgagccgtatcccctcatgctacctggctgcagccccagctgtcctctggagaggtttgctgagctggttggccctgtgatccctcaagactggtccacggagtgtatgaccacaaacagccatcaaggtcctgaggacagtacagattagtgtgcacagagatctctgtacaaagagtagctgccccttctcagggcagatgatgctttgagaacatactttggccattacccccagctttgaggaaaatgggctttggatgattattttatgttttagggacccccaacctcaggcaattcctacctcttcacctgaccctgcccccacttgccataaaacttagctaagttttgttttgtttttcagcgttaatgtaaaggggcagcagtgccaaaatataatcagagataaagcttaggtcaaagttcatagagttcccatgaactatatgactggccacacaggatcttttgtatttaaggattctgagattttgcttgagcaggattagataaggctgttctttaaatgtctgaaatggaacagatttcaaaaaaaaaaccccacaatctagggtgggaacaaggaaggaaagatgtgaataggctgatgggcaaaaaaccaatttacccatcagttccagccttctctcaaggagaggcaaagaaaggagatacagtggagacatctggaaagttttctccactggaaaactgctactatctgtttttatatttctgttaaaatatatgaggctacagaactaaaaattaaaacctctttgtgtcccttggtcctggaacatttatgttccttttaaagaaacaaaaatcaaactttacagaaagatttgatgtatgtaatacatatagcagctcttgaagtatatatatcatagcaaataagtcatctgatgagaacaagctatttgggcacaacacatcaggaaagagagcaccacgtgatggagtttctctagaagctccagtgataagagatgttgactctaaagttgatttaaggccaggcatggtggtttacgcctataatcccagcattttgggagtccgaggtgggcagatcacttgagctcaggaggtcaagatcagcctgggcaacatggtgaaacctggtctctacataaaatacaaaaacttagatgggcatggtggtgtgtgcctatagtcccactacttgtggggctaaggcaggaggatcacttgagccccggaggtcgaggctacagtgagccaagagtgcactactgtactccagccagggcaagagagcgagaccctgtctcaataaataaataaataaataaataaataaataaataaataaataaaaacaaagttgattaagaaaggaagtataggctaggcacagtggctcacacctgtaatccttgcattttggaaggctgaggcaggaggatcactttaggcctggtgtgttcaagaccagcctggtcaacatagtgagacactgtctctaccaaaaaaaggaaggaagggacacatatcaaactgaaacaaaattagaaatgtaattatgttctaagtgcctccaagttcaaaacttattggaatgttgagagtgtggttacgaaatacgttaggaggacaaaaggaatgtgtaagtctttaatgccgatatcttcagaaaacctaagcaaacttacaggtcctgctgaaactgcccactctgcaagaagaaatcatgatatagctttgccatgtggcagatctacatgtctagagaacactgtgctctattaccattatggataaagatgagatggcagccagtagaaaccatctctagaaaccatctcatctttatccataatggtaatagagcacagtgttctctagacatgtagatctgccacatggcaaagctatatcatgatttcttcttgcagagtgggcagtttcagcaggacctgtaagtttgcttaggttttctgaagatatcggcattaaagacttacacattccttttgttctcctaacgtatttcgtaaccacactctcaacattccaataagttttgaacttggaggcacttagaacataattacatttctaattttgtttcagtttgatatgtgtcccttccttcctttttttggtagagacagtgtctcactatgttgaccaggctggtcttgaacacaccaggcctaaagtgatcctcctgcctcag

SEQ ID NO: 10270 - DNA, 491 bp, Homo sapiens
acatgcagaagatatacaccatcctgttgccatatatctaagtttttaacaattttttcttaatatctatctcctccccagattctgaaacaatagatgcacaaatatgaaacgattaaactaacttgattagctgaagccaataataactacccaaacaaaagctgaacacttaaacctactcagccataaacagaagagcttgaaagctgcaggctttgtccctaaagctagggcctgctgttgtggtgttaacatcgagaagcttgagataaaggtgtctgtcccatagaaggctcagttaggtaggcagtatcattagctcatttgctccagccagtggagggtaagattttccattcttaattttctcatccactaggatcatcaggtagagaatggagagattggggaaccattctaagagcagatgtattcacttattatgggcaaaatcacaataaaacatatactttggggttatcctttgt

SEQ ID NO: 10271 - DNA, 270 bp, Homo sapiens
  misc_feature 1, 2: n = A,T,C or G
nnctccaccgcggtggcggccgaggtacgcgggggtagatggaaggaagaacttgtgtgcttagacctgacgctgggaggagatgctgccacctaggttacttgtaggaccctatacggcaacctcctttgccaggaactatttataaacatcctgcaggaaaatggtaagcccttggttaaatttattggcttcatttatgtatctcacaacacttcttttctgttttagttctaggaatagaaacttacttttggaaatacagtacct

SEQ ID NO: 10272 - DNA, 325 bp, Homo sapiens
  misc_feature 322, 323, 324, 325: n = A,T,C or G
acaggcaaaacacatttcttgtttcacacttccttataacacccagcaaaataccagggaaaaatagcaaatatgaatcaatctttagtaagttttattctaaacaaaaggagtgactgatgaatcacatggaacagagggattgaattgtttttgtttttaaatgggatcaattcaaggagagagatgaatatactaaactcagctccccaatatgatccctaaacttagcaccattttgccgcctgtgaaactgcctcttttcagaacttcgtcaattggtgttgaagttgcttttctgattgtgtttcctttattcaannnn

SEQ ID NO: 10273 - DNA, 389 bp, Homo sapiens
  misc_feature 389: n = A,T,C or G
acgtatctaaaccaccgtgagctaggcactccccacccatctgcatacactttgtcatctttgcaactacagcgtttaacaagggctgggagatttcaactaaaacagacagaatgaactttcttttagggatcttagaacattttgcatggataggtggagaatttgaataaaatgacctatagggataactgtctttctaaaggtctaaaaacaaactgtccccagttcattaaccaacatatttattgccactagaaatcaattttcaaagagtggtaaaaatgacagggactgtagccactgcccaaaacccgactgacagggtctcagcactaaatcaagtaaaatttaataagtgtcactgtcccaggtgtgacagctaggan

SEQ ID NO: 10274 - DNA, 506 bp, Homo sapiens
  misc_feature 506: n = A,T,C or G
acttggatgggttttgtgtgtatgtttgtgtgtgcacttgtgtccaccctgttgggcttagtgaactttttgattcagtgatttaaagtttctcatcagatttggaaaattctcaattacttttttctttaaatatttctcttgcccttcccctctctcttcttccaggattccaatttcatcgatgttggaacttttgtctgtgtctcacataactcccatgctctcttttagtcttcttctgtgattcagtttggatattttctgttaacttgcttctgagttttctcattcagatttctgatgtgtgccatctggtttgtaacaaatctaattctcaacttcagacattgtattttgaatttccaggatacccacttggttcttttttatggacaattgtcttctgaatgctttatattttcatacatttatttacctctttcaacatacggacttttctttttttttttttttgaaaaaggtgtcgttctgccacccaggcn

SEQ ID NO: 10275 - DNA, 283 bp, Homo sapiens
  misc_feature 1, 2, 3, 4, 5, 6, 7, 283: n = A,T,C or G
nnnnnnnttttttttttttctcttttcaatgacagcctagtctttattgcaggttttttattttaatttaataccagagagccctaagccaggatttatttttcccatatgaaaatatttgggtctgactctgaagtctcagagcggttgctgaattcttcaaagtgaagagtgaaaagctttgtaagtttcttcaaggcatttcatgtgtcattgttttctcctcccaatagagattgaaggtaatggtgatgtccgccagcacatcacctggattaaattn

SEQ ID NO: 10276 - DNA, 192 bp, Homo sapiens
ccgggcaggtacagactttattctctatttcaggggccttgtttattaagcagacagaactctgcttgattattccatgaagtcgccaaccattaatcatgcacatttgtttaacaggtcaaatgaagagaggaaatttgtgtgcagtcacggcaaatactgcctcattttacccactgtgatactaaaggt

SEQ ID NO: 10277 - DNA, 627 bp, Homo sapiens
  misc_feature 1, 2, 3: n = A,T,C or G
nnnagccgggcatggtggcaggcgcctggagtcccagctactcgggaggctgagatgacaggcacccaccatcacaaccggctattttttgttatatttagtagagatggggtttcactaatttgaccaggctggtctgggactcctgaccttaacttatctgcccgcctttgtctcccaaaatgctaggattacaggcacgtgtcaccatgcacagcctgttgtaaaatgttttaaacgtgcatgggaatgacagcaaaaactaattcaggctgttttgtatctctaggcaattcattacagtagcattaaaagacaccaaggccaaatgctttggggtcactcttctaaaacaccgtgtctagacaagagtcatcaagcaatgattgcttgactgattttttaaaattataagtcacacaaacacacagtcatctaataaaaaaaaactgattttcttaatattctcagagtggtaacactcacaactgtcatgtcagcaagtggaactttcttctaagtaaacatcagaattccaatcagcctttgaaccactgcaaatatttcacagtctcaaaattcacctgccttaaaaccaagcacgtactcgggccgccaccgcgggga

SEQ ID NO: 10278 - DNA, 245 bp, Homo sapiens
accactatttgagttctgcagttggccagggttgtgggaggggcctcaaagttaagtggagacactgagatggacaagaccagatgctatgcacaatggaaatgcatggttgaagttttccttcctgcctgtgtggggccttagggccacaagggcagccattactcagcactgcactgaccttgggaatttgctgggcaaggaaaatgacgtggccctcatcatcgatggccacaccctgaagt

SEQ ID NO: 10279 - DNA, 562 bp, Homo sapiens
  misc_feature 556, 557, 558, 559, 560, 561, 562: n = A,T,C or G
acaacgatctcttttgtggtcttctatgtcaactctcaaactaatctcctacaacttttccaccccccacgcaccgtgccacaaatcatctgttacctaacacataagtgacaacacaattctgttcctgccattttctgctgaagattgttccaatttacttctctgttgacatataagtagcctttaaagcttttaaggtctttaaagctttaaagtagcttcaacatgattttgattctgcttttattctcattaaatgaatatttctggattgaacaatgagagaaaataatagagagtaggtggtgaaaaattaaaaagtaggcatagcaaagtgtcctatggtcacagacgtcaataaaggcaatgaaaaatacagagcatgaatggtggaatttaatgtcacagatcgttctaggagaagggatacaaaatgagggagtcattttggtcactgaggaatctgccattaattaaacagttttagttaatgtgtaggagtgaaatattagaaaggatgaataaaggcatagagattaggagcaccaaagcnnnnnnn

SEQ ID NO: 10280 - DNA, 245 bp, Homo sapiens
acgcgggaacaaaggatctgagaaaagttgggaaagagtagcttgggtcaggaaaggaggaaggtaggtggcactatggaagttgaccctgtcaagaagagaatggtcagaaatcaggaagggaacttgtcttctaaagaataggtggctaaaagaaagtaacagtgacctgaggtgaaaccaagtgggtaaccattgtaaacttgtgagtgctggactctgacagcaccctggggtgtggctgt

SEQ ID NO: 10281 - DNA, 2283 bp, Homo sapiens
  misc_feature 9, 2280, 2281, 2282, 2283: n = A,T,C or G
gcgtccggnactcttggaagacttgggtccttgggtcgcaggtgggagccgacgggtgggtagaccgtgggggatatctcagtggcggacgaggacggcggggacaaggggcggctggtcggagtggcggagcgtcaagtcccctgtcggttcctccgtccctgagtgtccttggcgctgccttgtgcccgcccagcgcctttgcatccgctcctgggcaccgaggcgccctgtaggatactgcttgttacttattacagctagaggcatcatggaccgatctaaagaaaactgcatttcaggacctgttaaggctacagctccagttggaggtccaaaacgtgttctcgtgactcagcaaattccttgtcagaatccattacctgtaaatagtggccaggctcagcgggtcttgtgtccttcaaattcttcccagcgcgttcctttgcaagcacaaaagcttgtctccagtcacaagccggttcagaatcagaagcagaagcaattgcaggcaaccagtgtacctcatcctgtctccaggccactgaataacacccaaaagagcaagcagcccctgccatcggcacctgaaaataatcctgaggaggaactggcatcaaaacagaaaaatgaagaatcaaaaaagaggcagtgggctttggaagactttgaaattggtcgccctctgggtaaaggaaagtttggtaatgtttatttggcaagagaaaagcaaagcaagtttattctggctcttaaagtgttatttaaagctcagctggagaaagccggagtggagcatcagctcagaagagaagtagaaatacagtcccaccttcggcatcctaatattcttagactgtatggttatttccatgatgctaccagagtctacctaattctggaatatgcaccacttggaacagtttatagagaacttcagaaactttcaaagtttgatgagcagagaactgctacttatataacagaattggcaaatgccctgtcttactgtcattcgaagagagttattcatagagacattaagccagagaacttacttcttggatcagctggagagcttaaaattgcagattttgggtggtcagtacatgctccatcttccaggaggaccactctctgtggcaccctggactacctgccccctgaaatgattgaaggtcggatgcatgatgagaaggtggatctctggagccttggagttctttgctatgaatttttagttgggaagcctccttttgaggcaaacacataccaagagacctacaaaagaatatcacgggttgaattcacattccctgactttgtaacagagggagccagggacctcatttcaagactgttgaagcataatcccagccagaggccaatgctcagagaagtacttgaacacccctggatcacagcaaattcatcaaaaccatcaaattgccaaaacaaagaatcagctagcaaacagtcttaggaatcgtgcagggggagaaatccttgagccagggctgccatataacctgacaggaacatgctactgaagtttattttaccattgactgctgccctcaatctagaacgctacacaagaaatatttgttttactcagcaggtgtgccttaacctccctattcagaaagctccacatcaataaacatgacactctgaagtgaaagtagccacgagaattgtgctacttatactggttcataatctggaggcaaggttcgactgcagccgccccgtcagcctgtgctaggcatggtgtcttcacaggaggcaaatccagagcctggctgtggggaaagtgaccactctgccctgaccccgatcagttaaggagctgtgcaataaccttcctagtacctgagtgagtgtgtaacttattgggttggcgaagcctggtaaagctgttggaatgagtatgtgattctttttaagtatgaaaataaagatatatgtacagacttgtattttttctctggtggcattcctttaggaatgctgtgtgtctgtccggcaccccggtaggcctgattgggtttctagtcctccttaaccacttatctcccatatgagagtgtgaaaaataggaacacgtgctctacctccatttagggatttgcttgggatacagaagaggccatgtgtctcagagctgttaagggcttatttttttaaaacattggagtcatagcatgtgtgtaaactttaaatatgcaaataaataagtatctatgtcaaaaaaaaaaaaaaaaaaaaaaaaaaaannnn

SEQ ID NO: 10282 - DNA, 733 bp, Homo sapiens
  misc_feature 1, 2, 731, 732, 733: n = A,T,C or G
nnactcactatatgggcgaattggcagctccaccgcggtggcggccgaggtacgcggggacagcaacttccttgatccctgccacgcacgactgaacacagacagcagccgcctcgccatgaagctgctgatggtcctcatgctggcggccctcctcctgcactgctatgcagattctggctgcaaactcctggaggacatggttgaaaagaccatcaattccgacatatctatacctgaatacaaagagcttcttcaagagttcatagacagtgatgccgctgcagaggctatggggaaattcaagcagtgtttcctcaaccagtcacatagaactctgaaaaactttggactgatgatgcatacagtgtacgacagcatttggtgtaatatgaagagtaattaactttacccaaggcgtttggctcagagggctacagactatggccagaactcatctgttgattgctagaaaccacttttctttcttgtgttgtctttttatgtggaaactgctagacaactgttgaaacctcaaattcatttccatttcaataaactaactgcaaatcactaaaaaaaaaaaaaaaaaaaatcgaggggggggcccggcaccccaattcggcccctatagggaggcgtattacaaattcacttggcccgccgttttaccacggcctggactggggaaaaaccttgcggttcaccaacataaatcggccttggaggannn

SEQ ID NO: 10283 - DNA, 904 bp, Homo sapiens
  misc_feature 1, 888, 889, 890, 891, 892, 893, 894, 895, 896, 897, 898,899, 900, 901, 902, 903, 904: n = A,T,C or G
ncgacccacgcgtccgatgcaggtgaggttgtaggtcaggtgtgtgtgtgtgtgtctataaatccacacccattttggtacgcggggatccagaatacatttccaacaagagcactggccaagtcagcttcttctgagagagtctctagaagacatgatgctacactcagctttgggtctctgcctcttactcgtcacagtttcttccaaccttgccattgcaataaaaaaggaaaagaggcctcctcagacactctcaagaggatggggagatgacatcacttgggtacaaacttatgaagaaggtctcttttatgctcaaaaaagtaagaagccattaatggttattcatcacctggaggattgtcaatactctcaagcactaaagaaagtatttgcccaaaatgaagaaatacaagaaatggctcagaataagttcatcatgctaaaccttatgcatgaaaccactgataagaatttatcacctgatgggcaatatgtgcctagaatcatgtttgtagacccttctttaacagttagagctgacatagctggaagatactctaacagattgtacacatatgagcctcgggatttacccctattgatagaaaacatgaagaaagcattaagacttattcagtcagagctataagagatgatagaaaaaagccttcacttcaaagaagtcaaatttcatgaagaaaacctctggcacattgacaaatactaaatgtgcaagtatatagattttgtaatattactatttagtttttttaatgtgtttgcaatagtcttattaaaataaatgttttttaaatctcaaagagaaaaaataaacttatcgcggagggaaaaaaggaaaaaaatattaaaaatatcgggccnnnnnnnnnnnnnnnnn

SEQ ID NO: 10284 - DNA, 1677 bp, Homo sapiens
  misc_feature 1, 1658, 1659, 1660, 1661, 1662, 1663, 1664, 1665, 1666,1667, 1668, 1669, 1670, 1671, 1672, 1673, 1674, 1675, 1676,1677: n = A,T,C or G
ncgacccacgcgtccgaactcgcggcattggagtcaagatggaggagtacgcgcgagagccttgcccatggcgaattgtggatgactgtggtggggcctttacgatgggtaccattggtggtggtatctttcaagcaatcaaaggttttcgcaattctccagtgggagtaaaccacagactacgagggagtttgacagctattaaaaccagggctccacagttaggaggtagctttgcagtttggggagggctgttttccatgattgactgtagtatggttcaagtcagaggaaaggaagatccctggaactccatcacaagtggtgccttaacgggagccatactggcagcaagaaatggaccagtggccatggttgggtcagccgcaatgggtggcattctcctagctttaattgaaggagctggtatcttgttgacaagatttgcctctgcacagtttcccaatggtcctcagtttgcagaagacccctcccagttgccttcaactcagttaccttcctcaccttttggagactatcgacaatatcagtaggacttctttcctaggatttctttaacagaacgagttgtggttcgagaaggatttcagaagatcaagttacagtctgtttttaaaaccataggtgggacagctatggccaataggctataaagagacatttagcacttttttctatttaaaggaacaagcggggaagggtgctaaaagataatacgtttatttattcacacttgaattgcatttgtgatcaaaataaatgtttaaatcgctaaaggaaaatacagtaagtgcttgaaagatgaaggaccaaaaggccaaaaaacagtgaaatatgatcatcatctccttgcggacttctctgcctggttttgtgtgttctgttattcaaacaataaaaagctggtggaacttactctttcttttaagataagttgtagacttcgatgtttcatgctcatgtacttcaaataatgcatgttttatagttagtccctcatcacttgaagtgacttctgagaattatgcagagtcaacatggatcatttcacagtgagatgctttatggattgaaggatatggtaaaatgtttatagtttactttgaaagtaaaatatactatgtcttggttttgaggatattggatacaaaactctcttcctttagggctactgagtcttgattcctgatcatcagaaatttcaccagaaacaacttgcttccaatatacccaattctatatgaagaattcatggagagtgtactggcactggaagagtttagtgtttcttgtatgcttgaaaataaagtatgtactgttttgaatgtgttccaagtcctctgcataaacgatgtattttggggtctggttgggcctggaaaatggatgagcacttcagaacaggtcattttcctgatattggaagtgacatgtggccctataggaggcatgatgttagttaattacacatttgcctacatctgtgggaaatggagaacaaagccatgtgggtactgtaaacacacgtttatcttttggcccaatgccatacatatggtaggcatttaattactgattgtgtttggataatttgggaattttcgactgtggtaaaatatacataaaataatacggannnnnnnnnnnnnnnnnnnn

SEQ ID NO: 10285 - DNA, 883 bp, Homo sapiens
  misc_feature 881, 882, 883: n = A,T,C or G
ggccgaggtacgcggggaccttggatgtgggaggattgcattcagtctagttcctggttgccggctgaaataacctgctctccaaaatgtccacaaaagtgacttaagtcaggttcccccaaaccagacaccaagacaagaatccatgtgtgtgtgactgaaggaagtgctgggagagccccagctgcagcctggatgtgaactgcaactccaaagtgtgtccagactcaaggcaagggcactaggctttccagacctcctactaagtcattgatccagcactgccctgccaggacataaatccctggcacctcttgctctctgcaaaggagggcaaagcagcttcaggagcccttgggagtcctccaaagagagtctagggtacaggtccgaaagtagaagaacacagaaggcaggccaggggcactgtgagatggtaaaagagatctgaagggatccagaattcaagccaggaagaagcagcaatctgtcttctggattaaaactgaagatcaacctactttcaacttactaagaaaggggatcatggacattgaagcatatcttgaaagaattggctataagaagtctaggaacaaattggacttggaaacattaactgacattcttcaacaccagatccgagctgttccctttgagaaccttaacatccattgtggggatgccatggacttaggcttagaggcatttttgatcaagtcgtgagaagaaatcggggtggctggtgtctccaggtcatcatctctgtactgggtctgaccatattggtttgagacccgaccgtgcgagggctgtccacgcccccagccaaaaaaaagcgggtggatcacccctcccggggcccttggcgggggaacacnnn

SEQ ID NO: 10286 - DNA, 4698 bp, Homo sapiens
ctatagggagtcgacccacgcgtccgctctggagctttttccctttatagcaccattgaatcccagtcctaacagaagtactgcgaatcttgtggcctcattctgaacaaaagggattagagaagaaaaatctcttgatataaggcttgaaagcaagggcaggcaatcttggttgtgaatattttctgatttttccagaaatcaagcagaagattgagctgctgatgtcagttaactctgagaagtcgtcctcttcagaaaggccggagcctcaacagaaagctcctttagttcctcctcctccaccgccaccaccaccaccaccgccacctttgccagaccccacacccccggagccagaggaggagatcctgggatcagatgatgaggagcaagaggaccctgcggactactgcaaaggtggatatcatccagtgaaaattggagacctcttcaatggccggtatcatgttattagaaagcttggatgggggcacttctctactgtctggctgtgctgggatatgcaggggaaaagatttgttgcaatgaaagttgtaaaaagtgcccagcattatacggagacagccttggatgaaataaaattgctcaaatgtgttcgagaaagtgatcccagtgacccaaacaaagacatggtggtccagctcattgacgacttcaagatttcaggcatgaatgggatacatgtctgcatggtcttcgaagtacttggccaccatctcctcaagtggatcatcaaatccaactatcaaggcctcccagtacgttgtgtgaagagtatcattcgacaggtccttcaagggttagattacttacacagtaagtgcaagatcattcatactgacataaagccggaaaatatcttgatgtgtgtggatgatgcatatgtgagaagaatggcagctgaggccactgagtggcagaaagcaggtgctcctcctccttcagggtctgcagtgagtacggctccacagcagaaacctataggaaaaatatctaaaaacaaaaagaaaaaactgaaaaagaaacagaagaggcaggctgagttattggagaagcgcctgcaggagatagaagaattggagcgagaagctgaaaggaaaataatagaagaaaacatcacctcagctgcaccttccaatgaccaggatggcgaatactgcccagaggtgaaactaaaaacaacaggattagaggaggcggctgaggcagagactgcaaaggacaatggtgaagctgaggaccaggaagagaaagaagatgctgagaaagaaaacattgaaaaagatgaagatgatgtagatcaggaacttgcgaacatagaccctacgtggatagaatcacctaaaaccaatggccatattgagaatggcccattctcactggagcagcaactggacgatgaagatgatgatgaagaagactgcccaaatcctgaggaatataatcttgatgagccaaatgcagaaagtgattacacatatagcagctcctatgaacaattcaatggtgaattgccaaatggacgacataaaattcccgagtcacagttcccagagttttccacctcgttgttctctggatccttagaacctgtggcctgcggctctgtgctttctgagggatcaccacttactgagcaagaggagagcagtccatcccatgacagaagcagaacggtttcagcctccagtactggggatttgccaaaagcaaaaacccgggcagctgacttgttggtgaatcccctggatccgcggaatgcagataaaattagagtaaaaattgctgacctgggaaatgcttgttgggtgcataaacacttcacggaagacatccagacgcgtcagtaccgctccatagaggttttaataggagcggggtacagcacccctgcggacatctggagcacggcgtgtatggcatttgagctggcaacgggagattatttgtttgaaccacattctggggaagactattccagagacgaagaccacatagcccacatcatagagctgctaggcagtattccaaggcactttgctctatctggaaaatattctcgggaattcttcaatcgcagaggagaactgcgacacatcaccaagctgaagccctggagcctctttgatgtacttgtggaaaagtatggctggccccatgaagatgctgcacagtttacagatttcctgatcccgatgttagaaatggttccagaaaaacgagcctcagctggcgaatgccttcggcatccttggttgaattcttagcaaattctaccaatattgcattctgagctagcaaatgttcccagtacattggacctaaacggtgactctcattctttaacaggattacaagtgagctggcttcatcctcagacctttattttgctttgaggtactgttgtttgacattttgctttttgtgcactgtgatcctggggaagggtagtcttttgtcttcagctaagtagtttactgaccattttcttctggaaacaataacatgtctctaagcattgtttcttgtgttgtgtgacattcaaatgtcatttttttgaatgaaaaatactttcccctttgtgttttggcaggttttgtaactatttatgaagaaatattttagctgagtactatataatttacaatcttaagaaattatcaagttggaaccaagaaatagcaaggaaatgtacaattttatcttctggcaaagggacatcattcctgtattatagtgtatgtaaatgcaccctgtaaatgttactttccattaaatatgggagggggactcaaatttcagaaaagctaccaagtcttgagtgctttgtagcctatgttgcatgtagcggactttaactgctccaaggagttgtgcaaacttttcattccataacagtcttttcacattggattttaaacaaagtggctctgggttataagatgtcattctctatatggcactttaaaggaagaaaagatatgtttctcattctaaaatatgcattataatttagcagtcccatttgtgattttgcatatttttaaaagtacttttaaagaagagcaatttccctttaaaaatgtgatggctcagtaccatgtcatgttgcctcctctgggcgctgtaagttaagctctacatagattaaattggagaaacgtgttaattgtgtggaatgaaaaaatacatatatttttggaaaagcatgatcatgcttgtctagaacacaaggtatggtatatacaatttgcagtgcagtgggcagaatacttctcacagctcaaagataacagtgatcacattcattccataggtagctttacgtgtggctacaacaaattttactagctttttcattgtctttccatgaaacgaagttgagaaaatgattttccctttgcaggttgcacacagttttgtttatgcatttccttaaaattaattgtagactccaggatacaaaccatagtaggcaatacaattttagaatgtaatatatagaggtatatttagcctcttttagaagtcagtggattgaatgtctttttattttaaattttacattcattaaggtgcctcgtttttgactttgtccattaacatttatccatatgcctttgcaataactagattgtgaaaagctaacaagtgttgtaacaataatccattgtttgaggtgcttgcagttgtcttaaaaattaaagtgttttggttttttttttttttccagacattgccttggtcattgccctataaatgatagaatcaatgaacatttgctatcagagtagtgtcactaaaactaaataccagcattcctgttgcagcagatgtagttgtagaacatgcattgaggcgtattataaggaaatcatttattgttttttaagggcagaagggatttaggagaaaagctacagtatagattgattctctagaatatcaatgatcccttttcatccatggttcatcaaaaacatactaactgcatttgtttgatcattgcaaatttaaaacaaaacagcatttgctgttaggaaacaagacacataatcctcttaggaattaccattatatcacattaccactgtgaggtagaatggatcattcattaatttctttatgaaatttgcatgctaagtttttctaatgaggctgtaggtttccatgtaaattctgtgatagatagtggctgtagactggtgatgctatccgtgatttctatgagaaacatccttacaagaaccatagggcataatttatatcttccctaagtgtaaaaggatttttatcagggtgatagtatacttgaatgaaatttgtctaatgcagtttttgcttatgttggaaaataaactagattatgaatttttaaaaaaaaaaaaaaaaaaaaaaaaatttttggggggcttgggccttggaaagtttttagaccaattggtatgggcgacgagagcccacaataggtgtcacgtagaccacatggtgccaacagacgagaccaaaggaagaaccctggcccaaaacacaaaggtcgtggaaattccacaccaatgtaaaaaaagcgccggggggcaaccacgcacgcgttttggaaaactccagatggaagtcaagaaacaaacacgagacctcaccaccggggtcaagcaaccgatataatcggccata

SEQ ID NO: 10287 - DNA, 332 bp, Homo sapiens
acagcccgacaggtgtacaccctgcccccatcccgggaggagattaccaagaaccatgtcagcctgagctgcctggtcaaaggcttctatcccagcgacatcgccgtggagtgggagagcagtgggcagccggagaacaactacaagaccacgcctcccgtgctggactccgacggctccttcttcctctacagcaagctcaccgtggacaagagcaggtggcagcaggggaacgtcttctcatgctccgtgatgcatgagggtctgcacaaccaccacacgcagaagagcctctccctgtctccgggtaaatgagtgcgacggccgccacc

SEQ ID NO: 10288 - DNA, 1252 bp, Homo sapiens
  misc_feature 1, 1172, 1248, 1249, 1250, 1251, 1252: n = A,T,C or G
nccacaagagaaactgcatgacataatctatactgtgttttttctttttctacatctgctgggggctctactatcttcttctcatgctgtcgtgtaacgttccacttatgtcttagcatttcagtgtccacgagcagcatctatttcctgtctggctcgactccctgtctaatacgtctctcatgcccggtgtcgacgctgatcatctatcatgcaccatgttgagccccctgtctgccactaggccttcctttaagtgccgttatgcgcttccttttgaagtctgctcagcatgttctgggtgcttctcatctgcatcattcctttcagatgctgtagcttcttcctcctctttctgcctccttttctttttcttttttttggggggcttgctctctgactgcagttgaggggccccagggtcctggcctttgagacgagccaggaaggcctgctcctgggcctctaggcgagcaagcttggccttcattgtgatcccaagacgggcagccttgtgtgctgttcgcccctcacaggcttggagcagcatctcatcagtcagaatctttggggacttggacccctggttgtcgtcatcactgcagctctccaagtctttgtttggcttctctccacctgaagtcaatgtagccatcttcacaaacttctgatacagcaagttgggcttgggatgattataacgggtggtctccttagaaaggctccttatctgtactccatcctgcccagtttccactaccaagttggccgcagtcttgttgaagagctcattccaccagtggtttgtgaactccttggcagggtcatgtcctaccccatgagtgtcttgcttcagtgtcaccctgagagcctgagtgataccattctccttccggccgaggcctttgccttgagtccatccatgctttagcagctgctcctcagcaaacttcatcccacgactcttgacctctggggtgacattcatggtgagaaaaaagtctctatcctcagactctcaccagagaagaagaggtgatatcatccgtcattgctgggtccgctccgcggaaacatgtgccggacctgacttgtgcgccgccatcttcccccgcgtgccgctcgcctcccggcccgctcttagaactgagtggatcccccgggctgcaggnaattcgatgatcaagcttatcgatacccgtcgtacctcgagggggggggcccggtacccccagctgtttgttcccnnnnn

SEQ ID NO: 10289 - DNA, 929 bp, Homo sapiens
  misc_feature 265, 266, 267, 268, 269, 270, 271, 272, 273, 274, 275, 276,277, 278, 279, 280, 281, 282, 283, 284, 285, 286, 287, 288,289, 290, 291, 292, 293, 294, 295, 296, 297, 298, 299, 300,301, 302, 303, 304, 305, 306, 307, 308, 309, 310, 311: n = A,T,C or G
  misc_feature 312, 313, 314, 315, 316, 317, 318, 319, 320, 321, 322, 323,324, 325, 326, 327, 328, 329, 330, 331, 332, 333, 334, 335,336, 337, 338, 339, 340, 341, 342, 343, 344, 345, 346, 347,348, 349, 350, 351, 352, 353, 354, 355, 356, 357, 358: n = A,T,C or G
  misc_feature 359, 360, 361, 362, 363, 364, 365, 366, 367, 368, 369, 370,371, 372, 373, 374, 375, 376, 377, 378, 379, 380, 381, 382,383, 384, 385, 386, 387, 388, 389, 390, 391, 392, 393, 394,395, 396, 397, 398, 399, 400, 401, 402, 403, 404: n = A,T,C or G
cgcgtccgggacccagagggaaccatggaaaccccagcgcagcttctcttcctcctgctactctggctcccagatgccaccggagaaattgtgttgacgcagtctcctgacaccctgtctttgtctccaggggagggagccaccctctcctgcaggaccagtcacagtattagcagcgagttagcctggtatcagcagaaacctggccaggctcccaggctcctcatctatggtgcatccaggagggccactgccatcccagacnnnnnnnnnnnnnnnnnnnnnnnnnnnnnnnnnnnnnnnnnnnnnnnnnnnnnnnnnnnnnnnnnnnnnnnnnnnnnnnnnnnnnnnnnnnnnnnnnnnnnnnnnnnnnnnnnnnnnnnnnnnnnnnnnnnnnnnnnnnnacgaactgtggctgcaccatctgtcttcatcttcccgccatctgatgagcagttgaaatctggaactgcctctgttgtgtgcctgctgaataacttctatcccagagaggccaaagtacctgcccggtcgagcggccgcccgggcaggtacttacaaatattgtcaaataattcagcagaactctttaagaaaaaaaaggttcttagaaattgagaaagcagtagaaccacccagcctggcagatcaatctaccagatgttctgcatgcgagagggctcccaaccacctgtaacttcagaaaggccgccaggtactattacgaaggaaacaggtgcagatcctaactggagatgactttatcacaaagccttaagacaaagggaccatcctcttccaagacaacaggtgtgaacagaggcaaggagcgagaggagagggctccctcagcagatgggtggaaagcaagcctgcccttgcacggcccttggcacactcaatctaccccctttcccttctctgcccct

SEQ ID NO: 10290 - DNA, 2000 bp, Homo sapiens
  misc_feature 1, 2, 1829, 1830, 1831, 1997, 1998, 1999, 2000: n = A,T,C or G
nnaagcggagccagggactgccgggggtcccaaagcagtctttaccccccacccggcttctcgcttacctgcgtccagtgctgcttccagcgctagccccaggggcacgaaggctggtgtagggaggtgcgcccctccgggggcccgccagccgtcagactcgaagctgtggctgtcattgcttctacaatcagtgcatgttcttcgctgacgtcagtcggagctgtcctggcactatataaggctggcgacagccccgggacagaccctgtgttccccaaggcgtcttcagcctgccccgagggacagagactggagctcaatcttggaccgtacagacgctcgccgacaacctggccggcggcaccatgaggcaggcgggacgcgcagcgctgctggccgcgctgctgctcctggtacagctgtgccctgggagcagccagaggagccccgaggcggccggggtccaggacccgagtctgcgctggagccccggggcacggaaccagggtggcggggcccgcgcgctcctcttgctgctggcggagcgcttcccgcgccgcgcggggcccggccgattgggactcgggacggcaggcgagcggccgcggcgggacaacccttctctgtccattgacctcacctttcacctgctgcggaccctgctggagctggcgcggacgcagagccagcgggagcgcgccgagcagaaccgcatcatattcgactcggtgggcaagtgatggcccggtttggggctgcgaaaacgttgacccctttcccccaccccagagttgggatgcggggcagagccaccagggcactgtctgcgtgactattttttaataaaagtactgaagacccgttggcttttgtcgtagaggcagggcagtcacagcagcgtgggaacccgtgggaaggtggggcccccgggccagcgggaggggaacaaaatgctgtggggggctccgagacagcggctttcagccaggtcagccaggtgcatgtggaccccaagggtccccaaatccccaggacctcagaggtcccggcaccaccgccccgccctcggccctcttcccagggcgctgggctcaccagttcgctcctggcatcacagaggtgcccaataggggttcatttggcttccgccccccagacggtctcaggttctgggaagggcaggatggtgggcgggtcgccttcgaagcccaggctgcggggttgggcagcgaaaggagatacgggtctgggacgctcgagttctttattgagatcctcccggggccggcgccgatttgggtgatgctgcggtctctgcgcagatcctccccgactctagcgcgggctctcgagcagggtcgggtcggcgcaggccattaaggcccatccggccgctcttcctccggccccgcgctgccctcctctccgtctggggccacctcctcttcctccccggaagcgcctggctggaagtcgatggtccgcagcatttcggccacgtgctccacccttacggtgaattgctccatgctctcatagcctggctccggccgccctgccagctccaccttcgacatggccccgaccttattgatcagctccttggcctgctggagatacagcgccatttgtggctcttccatggactggatggcagactccaccagcttagaggaggcctccaggtggtcgccatactgacggatgaggccgcggacggctgcagcttctcctcttgctcccgggccagcgcctgcagcagctcacccttgcgctcctccagcactgcgcacaggctctcaaacctctggtttaacaactgcttnnnccgtccggctattgtcctaaaagatggggagcaaggatgagggaaggcgtggctgagacccggtggctgggaaagcacagggtactcacagagaaccaacacagaaagtgacccatccgtagtgacactgtgagttagtggctgagccagaacccagcccagatcnnnn

SEQ ID NO: 10291 - DNA, 174 bp, Homo sapiens
  misc_feature 172, 173, 174: n = A,T,C or G
gcggtatccttgcaccttgcttctcatacttcaagctactgcttgggtgggtcccgttgtaaactagatgaacactcatctgactatggatatcatcactcctagatactcctgctcatatgatccacttaccagaggtcctgtctggacatcttttaaccaagctagtagnnn

SEQ ID NO: 10292 - DNA, 2364 bp, Homo sapiens
aaaaggcagattccctatttaaccatcctttagttccgtgatatggtttggatgtgtgtcccctccaaatctcatgttgaaatgtgatctccaatgttggaggtggggcctggtgagaggtgtttgagtcaggggggccaatccctcatgaatggcttggtacgcggggacagaaggaggaaggacagcagggccaacagtcacagcagccctgaccagagcattcctggagctcaagctcctctacaaagaggtggacagagaagacagcagagaccatgggacccccctcagcccctccctgcagattgcatgtcccctggaaggaggtcctgctcacagcctcacttctaaccttctggaacccacccaccactgccaagctcactattgaatccacgccgttcaatgtcgcagaggggaaggaggttcttctactcgcccacaacctgccccagaatcgtattggttacagctggtacaaaggtgaaagagtggatggcaaccgtcaaattataggatatgtaataggaactcaacaagctaccccagggcccgcatacagtggtcgagagataatataccccaatgcatccctgctgatccagaacatcatccagaatgacacaggattctacaccctacacgtcataaagtcagatcttgtgaatgaagaagcaactggccagttccgggtatacccggagctgcccaagccctccatctccagcaacaactccaaacccgtggaggacaaggatgctgtggccttcacctgtgaacctgagactcaggacgcaacctacctgtggtgggtaaacaatcagagcctcccggtcagtcccaggctgcagctgtccaatggcaacaggaccctcactctattcaatgtcacaagaaatgacacagcaagctacaaatgtgaaacccagaacccagtgagtgccaggcgcagtgattcagtcatcctgaatgtcctctatggcccggatgcccccaccatttcccctctaaacacatcttacagatcaggggaaaatctgaacctctcctgccacgcagcctctaacccacctgcacagtactcttggtttgtcaatgggactttccagcaatccacccaagagctctttatccccaacatcactgtgaataatagtggatcctatacgtgccaagcccataactcagacactggcctcaataggaccacagtcacgacgatcacagtctatgcagagccacccaaacccttcatcaccagcaacaactccaaccccatggaggatgaggatgctgtagccttaacctgtgaacctgagattcagaacacaacctacctgtggtgggtaaataatcagagcctcccggtcagtcccaggctgcagctgtccaatgacaacaggaccctcactctactcagtgtcacaaggaatgatgtaggaccctatgagtgtggaatccagaacgaattaagtgttgaccacagcgaccccaccatttccccctcatacacctattaccgtccaggggtgaacctcagcctctcctgccatgcagcctctaacccacctgcacagtattcttggctgattgatgggaacatccagcaacacacacaagagctctttatctccaacatcactgagaagaacagcggactctatacctgccaggccaataactcagccagtggccacagcaggactacagtcaagacaatcacagtctctgcggagctgcccaagccctccatctccagcaacaactccaaacccgtggaggacaaggatgctgtggccttcacctgtgaacctgaggttcagaacacaacctacctgtggtgggtaaatggtcagagcctcccagtcagtcccaggctgcagctgtccaatggcaacaggaccctcactctattcaatgtcacaagaaatgacacagcaaactacaaatgtgaaacccagaacccagtgagtgccaggcgcagtgattcagtcatcctgaatgtcctctcagagcgcacccaaacccttcatcaccagcaacaactccaaccccgtggaggatgaggatgctgtagccttaacctgtgaacctgagattcagaacacaacctacctgtggtgggtaaataatcagagcctcccggtcagtcccaggctgcagctgtccaatgacaacaggaccctcactctactcagtgtcacaaggaatgatgtaggaccctatgagtgtggaatccagaacgaattaagtgttgaccacagcgacccagtcatcctgaatgtcctctatggcccagacgaccccaccatttccccctcatacacctattaccgtccaggggtgaacctcagcctctcc

SEQ ID NO: 10293 - DNA, 1182 bp, Homo sapiens
  misc_feature 1, 41, 1178, 1179, 1180, 1181, 1182: n = A,T,C or G
ncgtccgcccacgcgtgcgctcctccctctctcctgccggnggccggaggcggaccgggggctggcagtcggcagcctccgccccctcaaccttcgcggggcgcgggccgcagcttttcggttcacagcgggcagggaaagccgcgggaagggtactccaggcgagaggcggacgcgagtcgtcgtggcaggaaaagtgactagctccccttcgttgtcagccagggacgagaacacagccacgctcccacccggctgccaacgatccctcggcggcgatgtcggccgccggtgcccgaggcctgcgggccacctaccaccggctcctcgataaagtggagctgatgctgcccgagaaattgaggccgttgtacaaccatccagcaggtcccagaacagttttcttctgggctccaattatgaaatgggggttggtgtgtgctggattggctgatatggccagacctgcagaaaaacttagcacagctcaatctgctgttttgatggctacagggtttatttggtcaagatactcacttgtaattattccaaaaaattggagtctgtttgctgttaatttctttgtgggggcagcaggagcctctcagctttttcgtatttggagatataaccaagaactaaaagctaaagcacacaaataaaagagttcctgatcacctgaacaatctagatgtggacaaaaccattgggacctagtttattatttggttattgataaagcaaagctaactgtgtgtttagaaggcactgtaactggtagctagttcttgattcaatagaaaaatgcagcaaacttttaataacagtctctctacatgacttaaggaacttatctatggatattagtaacatttttctaccatttgtccgtaataaaccatacttgctcgtataaggggccaaatcaaaaaaccctaagcgggcccaacataagcatacccgatcttggcacaacgtgccccaaagaagcgatcaaaagagacgggggcgcttcacagaggcagggacaacacagcggctgtgaacaaccactcgtgtgaaagaaaacaacagagacgcaggcgaacaaacgattgtacaaccagcgacggcatagatcacaggcagtacaagaacaacaaacgacacatgatgatcaaaacggagctgaaggacannnnn

SEQ ID NO: 10294 - DNA, 2442 bp, Homo sapiens
  misc_feature 1, 2418, 2442: n = A,T,C or G
ngtgcgccgcgcgtgccctgtggcgccgcgtgccgggacgctccgtggtggtcctcttcttgtccctctcctgctccctgtggctgctctactcgctcgcgacttcccctgcccttcccggcctcctagtgcctcacctctcctcgccgtcgtatgcgactcgcccctcgctcgcctctgcttggctcgtttgcgtctcgtcttcgtgcgttccggccctgtctccgctccgcttcgctctcgctcgtgctttcgtgcgggctgcgcttgcggggctcgcctgcgctgcgtcggtcggcccgcgtgctcctctctcctcgcgctggttgcctctttgttgtctgctcctctcctctgtctctgttcgtttccgtctcttgttctcgtcctctctctctgctctgctctctcttcctgctgccttcttcgtcttttctgtctctcccttcttttcgcttcgtccctcgtctccgtgcctgctgctcttcttcttctactctcctctgttcgtcgctccttgtctgcccctaccttgcctccttcctctgtcctccttcttcttagtcgcttcgctctttgcgtcttaggttttgcttacgtctctctgcgtgtgtctgtatgtgtgtctctgtcgcctgccctctcgccactgtctgtggctctgcctctcctgtctggttgctcgtttctgccctggctcttgtttgccgcgtgtatctatctgattctctcgctcttctcgtttctcgctctgtgcttgtgcttcccttctcgtttctttctgatgtgtctctctctctcgatcttgctctctgttgccgcctggcaccagagtccgagaaaagacgaggagcagtgctctgctctcatttattttccaaaagccttgtttttatttatatagagtcctaaccacttcggtggtaggaggagtgggagaggctcctttttcaatccagggacctccatgatgttggtttgttgttaccaaacacacaggtaagtggcatcacggatctggtaaactaacgacaatgtttagtctctctctgctagagcaacaaggtgagcatcaatctctgcttctgtaagaatcctgaatttaggattttcaactgtcactactccaacttctatttctgaaggtttgaaatcaattgatagaacagtagacaggcatgtaattgcagtttccactgtctgttcaaatgtccaatcaaatttcttcttcacttttttttcaaggaagctggttgactcagtttgtttaactcccgctgcagtggctttaaacccacagtagtaacctgcaggatcacacttatatacctgagggccttgctcttcatctataccaattaaaatcatacaacaaccaagaggcctcatttcagcattctgtgtgtagacctgagaaatatcggcaattcttttacacagcatgtccacaggaatctcatagccatacttgtatttccagttagctgcctcatagcgtgccctctgtacctgggatctgctgtcagctgtcattccggtcatcacacaaccaatgttttcagttatcttgaataagtgagtcactgtgctggaatccaataatttgtcaggtactttcttctgtgtgacaattactgcacagtctttccctctgacagctactgatgtaaggccaccctggttaatagccttaaaagcatattctacttggtagagccgaccctcgggtgaaaaaatggtaatgtggcggtcaaaaccggcgctggaaccacgggacatgttggtagaagcactactttaaacacaatccctgggccccgtagctcccgcaccaggcacacaagcacctcccggaagttgcagcgactgcttccggggtaccagccgcgtttcttccgctcttgcatgccgaactcacggctccaagaaaccttatttatttatttatttttgagacggaatctcgctctgtcatcaggctggagtacagtggtgcaatctcagcccactgcaacctccgccccccgggttcaagcaattctcctgcctcagcctcccgagcagccgggactacaggcgcacaccaccatgcccagccaatttttgcatttttagcagagacggggtttcaccatgttggccaggatggtctcaatcaatctcttgacctcaggtgatcctcccgccccggcctcccaaagtgctgggaccacagacatgagtcactgcacccggccaggaaacctcttttaatagtagactttaaatatttagatgtgaactgaacttggtatctatataatgttctagtccatctgagagtgatgaggcaatctgacctggtctcattaaaatgaattaatgtctatcatattcaaaattaaagcccctactattgatttctcaagtatttgcttnctgggctggctttttcatagcacn

SEQ ID NO: 10295 - DNA, 246 bp, Homo sapiens
ccgggcaggtacagctattcaacatgtttaaacagatgtttgctgacagcactgacttctccaagagcctaagagaggagagcagccaattaaactccactgtcttctaaaattttaatcctagattggtttcagatgggttaagacagtcattcaacccacaagtatttaaggaaggcacctgggactgactcagttcctagatttaaacctattctgtgaactgcccacccctaccttcaaagt

SEQ ID NO: 10296 - DNA, 3296 bp, Homo sapiens
ggcaaggtccgtccttgctttgcgggacccctggcccccaggcgctcttcgtgcctcctcccctcgggctgtttctgggttagacctctaatcacaggttctgaatgtggccttttcaggttccagaggccgactgcgagccagagaaccatgggattgaggccggtgagttcggggtcaagttgtgcctgggtgatgcctgagcatggcccacggctcctgtgtgggttcttggcggccctggacaccccacagaggtggccctaggccccctgcctgatcatgttcctgtagtcggggacgatgatctgcttcaggtccaccactgaggagaagatccacttcaccttgaagaagctgatgttggcactgtagcacacgcttagcaggaagagtgtgatgaagatcggtcgactggtcggtccacagcccgtccagctccccgtcctgcgcctccgcacagctctccgccagttgcagactccggagacagggagaggctcttctgcgtgtagtggttgtgcagaccctcatgcatcacggagcatgagaagacgttcccctgctgccacctgctcttgtccacggtgagcttgctgtagaggaagaaggagccgtcggagtccagcatgggaggtctaggtcattgtagttgttctccggctgcccattgctctcccactccacggcgatgtcgctggggtagaagcctttgaccaggcagcgtcaggctgacctggttcttggtcatctcctcccgggatgggggcagggtgtacacctgtggttctcggggctgccctttggttttggagatggttttctcgatgggggctgggaggcctttgttggcagaccttgcacttgtactccttgccgttcagccagtcctggtgcacgacggtgaggacgctgaccacacggaacgtgctgttgaactgctcctcccgtggctttgtcttggcattatgcacctccatgccgtccacgcaccacctgtggcaggaccgtcagtcttcctcttccccccaaaacccaaggacaccctcatgatctcccggacccctgaggtcacgtgcgtggtggtggacgtgagccacgaagaccccgaggtcaagttcaactggtacgtggacggcgtggaggtgcataatgccaagacaaagccgcgggaggagcagtacaacagcacgtaccgtgtggtcagcgtcctcaccgtcctgcaccaggactggctgaatggcaaggagtacaagtgcaaggtctccaacaaagccctcccagcccccatcgagaaaaccatctccaaagccaaagggcagccccgagaaccacaggtgtacaccctgcccccatcccgggaggagatgaccaagaaccaggtcagcctgacctgcctggtcaaaggcttctatcccagcgacatcgccgtggagtgggagagcaatgggcagccggagaacaactacaagaccacgcctcccgtgctggactccgacggctccttcttcctctatagcaagctcaccgtggacaagagcaggtggcagcaggggaacgtcttctcatgctccgtgatgcatgaggctctgcacaaccactacacgcagaagagcctctccctgtctccggagctgcaactggaggagagctgtgcggaggcgcaggacggtgagctggacgggctgtggacgaccatcaccatcttcatcacactcttcctgttaagcgtgtgctacagtgccaccgtcaccttcttcaaggtgaagtggatcttctcctcggtggtggacctgaagcagaccatcatccccgactacaggaacatgatcggacagggtggcctagggccaccctctgctggggtgtccagggccgcccagaccccacacaccagccatgggccatgctcagccaccacccaggccacacctgcccccgacctcaccgccctcaaccccatgactctctggcctcgcagttgccctctgaccctgacacacctgacacgccccccttccagaccctgtgcatagcaggtctaccccagacctccgctgcttggtgcatgcagggcactgggggccaggtgtcccctcagcaggacgtccttgccctccggaccacaaggtgctcacacaaaaggaggcagtgacctggtatcccaggcccccacccaggcaggacctcgccctggagccaaccccgtccacgccagcctcctgaacacaggcgtggtttccagatggtgagtgggagcgtcaggccgccaaggtagggaagccacagcaccatcaggccctgttggggaggcttccgagagctgcgaaggcgtcactcagacggccttcctcccagcccgcagccagccagcctccattcccggggcactcccgtgaactcctgacatgaggaatgaggttgttctgatttcaagcaaagaacgctgctctctggctcctgggaacagtctcggtgccagcaccaccccttggctgcctgcccacactgctggattctcgggtggaactcgacccgcagggacagccagccccagagtccgcactggggagagaaggggccaggcgccaggacactgccacctcccacccactccagtccaccgagatcactcagagaagagcctgggccatgtggccgctgcaggagccccacagtgcaagggtgaggatagcccaaggaagggctgggcatctgcccagacaggcctcccagagaaggctggtgaccaggtcccaggcgggcaagactcagccttggtggggcctgaggacagaggaggcccaggagcatcggggagagaggtggagggacaccgggagagccaggagcgtggacacagccagaactcatcaccagaggctggcgtccagtcccgggtcacgtgcagcaggaacaagcagccactctgggggcaccaggtggagaggcaagacgacaaagagggtgcccgtgttcttgcgaaagcggggctgctggccacgagtgctggacagagggcccccacgctctgctgcccccatcacgccgttccgtgactgtcacgcagaatctgcagacacggacgggagactcgagcgggagtgcggccagagcctgccctcggccgtccagggaggaactcccgggctcactcgaaggaggtgccacccatttcaagctttggtaggctttctttcttcttttaacttttcttaaagctcattaattgtctttgatgtttcttttgtgatgacaataaaatatcctttttaagtcttgtaaaaaaaaaaaaa

SEQ ID NO: 10297 - DNA, 221 bp, Homo sapiens
  misc_feature 214, 215, 216, 217, 218, 219, 220, 221: n = A,T,C or G
acagacatcattttcaagaagttttgccataaaagtgaaaaatggtaatagctgaaaaaatttagcgttgacagaaggctttttttaaagacaggaaaaattatggcgcagagggaaatgctgatgatacaagatggagagagagaaattactggagtaatgactctgagcagatgtggatggcattaataagagaatggccttagataggcannnnnnnn

SEQ ID NO: 10298 - DNA, 222 bp, Homo sapiens
acagaacttttggaaacaccgtcccttcaaatgctaccttacttaaaatatgtagacattagtccatccaacctctgctaccaggcagtaacctttcatagatcttccaaagaaaatgttcttgataaaaccagaagaatcttctcagagagacccaggggagtgatctgaccctcactgctatcttgacttagttttagctgcagccatggcgactcaagt

SEQ ID NO: 10299 - DNA, 392 bp, Homo sapiens
ccgggcaggtacctgaatttaccagtattttctcttacggcttttggatttgactcatagttgaaaaggtctaccatgttcaaggtcattaagaaagtatcctgtttttctcctagatcttgggtagcttttggtgttgacctttacattttttattcatttgaaatttggcctggtgtaagacaggctttcccctagaatgctgcccaggtagctcagtatcaaatattgaactatccctattttcattccactctgatttataatgcaatttttatcccacatatatttggatctatttctgaactttttttttttaacatacatatttttacacgttccaactcttagaaatgttccatgctgtttctgtttttaggctccttttaggt

SEQ ID NO: 10300 - DNA, 280 bp, Homo sapiens
aggtacattatatacaaatatatatagatgcatatgtagatgtatacatgtatgtatatactgttgtatagagatatgagtatacatgtatgtgtatatctctttatatagatataggtatagatatagatataatcatataggttgtatagcgtttccaaggctctttcataactagttctcaactgggagcaatcttgcctcccatggaacattttggcaatgcccaaagatatctatatttgtcacaactgagggggagggtttactagtgacaggt

SEQ ID NO: 10301 - DNA, 1102 bp, Homo sapiens
  misc_feature 1, 2, 1101, 1102: n = A,T,C or G
nngaatttaggtgacactatagaagagctatgacgtcgcatgcacgcgtacgtaagcttggatcctctagagcggccgcctgtgacacgcggtctgagagacagaggcagcgtgtttgagctgctggtgcggtggtcagcgcgatgcccaaggccaagggcaaaacccggaggcagaagtttggttacagtgtcaaccgaaagcgtctgaaccggaatgctcgacggaaggcagcgccgcggatcgaatgctcccacatccgacatgcctgggaccacgctaaatcggtacggcagaacctggccgagatggggttggctgtggaccccaacagggcggtgcccctccgtaagagaaaggtgaaggccatggaggtggacatagaggagaggcctaaagagcttgtacggaagccctatgtgctgaatgacctggaggcagaagccagccttccagaaaagaaaggaaatactctgtctcgggacctcattgactatgtacgctacatggtagagaaccacggggaggactataaggccatggcccgtgatgagaagaattactatcaagataccccaaaacagattcggagtaagatcaacgtctataaacgcttttacccagcagagtggcaagacttcctcgattctttgcagaagaggaagatggaggtggagtgactggtttacatcacagctgccccaggctgaggcgtcccccggaccagtgaagctggagccagggtgtaaggcaaggaggtgctgtgtggctccagaggagctggccaggtcccatggaatcagaaggttacacacacacgtgcacactccccgctctggggaaggaactgttctcagaggctccaatttatattcatctgggggttcacggaaaagccagaacctgctgttttcagggtgggtgatgtaaatatagtgtgtacataataaagcaaatatattttctaagcaaaaaaaaaaaaggggggcaaataccgaggggccagaacggtcgttggacggcacaaggaggttaaaccgcggcaacacgcaagaggttggacccgggacgcacccaacgaaagtggcgtctgttatacann

SEQ ID NO: 10302 - DNA, 367 bp, Homo sapiens
tcttcagcaagccagcttctcggatggcggctgggccatattccactcctttctttttctgtgaatcatacaaatcccacagacataagagaaggtgagaaaaggagcagaaacactttacacacaaatctctgatgctacacggagttcctaacagattcctctgcaaatctttcacagcatcaaaacttcttcggtagaaggctcgtcggttcattaaatattaatgaatggaggaaggaagattttgttcttgaaagcaaatcaaccttctgggtccctcactgagagccagaccagaggagtctgtctccgatcgggaaagggctcagtgagctatgatcccggacgcgtgggtcgactcaag

SEQ ID NO: 10303 - DNA, 318 bp, Homo sapiens
ttggagctcaccgcggtggcggccgcccgggcaggtacctacttaccagcccttgaaccatttctatatgatgctcctcccaatattctgaaacatgtggttggacagttcagtaaggtaagaaatgccagcctctaaggggaggaagaaaattaaaatgatttgttgttatttttttttctgttgggtcagtagctttttctgtaacacggggtcatggttttactgcttaactctcaccaatctgtatggacagagaagttaccttaataaaattcacatgtaattaaaaaaaaaaaaaaaaaaaaaaaaaaggtc

SEQ ID NO: 10304 - DNA, 258 bp, Homo sapiens
  misc_feature 1, 2, 69, 70, 71, 72, 73, 74, 75, 76, 77, 78, 79, 80, 81,82, 83, 84, 85, 86, 87, 88, 89, 90, 91, 92, 93, 94, 95,96, 97, 98, 99, 100, 101, 102, 103, 104, 105, 106, 107,108, 109, 110, 111, 112, 113, 114, 115, 116, 117, 118, 119,120: n = A,T,C or G
  misc_feature 121, 122, 123, 124, 125, 126, 127, 128, 129, 130, 131, 132,133, 134, 135, 136, 137, 138, 139, 255, 256, 257, 258: n = A,T,C or G
nnaccatctgaaacctggccaggctcccaggctcctcatctatggtgcatccaccagggccactggtannnnnnnnnnnnnnnnnnnnnnnnnnnnnnnnnnnnnnnnnnnnnnnnnnnnnnnnnnnnnnnnnnnnnnncataatacaatttattattgccagccagtataataactggccctgtgtaccctcggcgcgctctaaaactagtgtggatctcccccgggctgcagggaattcggaatatgcaagcnnnn

SEQ ID NO: 10305 - DNA, 299 bp, Homo sapiens
tagggcgaattggagctccccgcggtggcggccgaggtacgcgggggggcggggggatagctgtccaaggtctcccccagcactgaggagctcgcctgctgccctcttgcgcgcgggaagcagcaccaagttcacggccaacgccttggcactagggtccagaatggctacaacagtccctgatggttgccgcaatggcctgaaatccaagtacctgcccgggcggccgaggtaccaacagaaacctggccaggctcccagactcctcatctatgatgcatccgacagggccactggca

SEQ ID NO: 10306 - DNA, 1785 bp, Homo sapiens
aacgcttacaaattccaatcgccattcaggctgcgcaactgttgggaagggcgatcggtgcgggcctcttcgctattacgccagctggcgaaagggggatgtgctgcaaggcgattaagttgggtaacgccagggttttcccagtcacgacgttgtaaaacgacggccagtgaattgtaatacgactcactatagggcgaattggccaagtgagctcgaattgcggccgcatgcataagcttgctcgagtctagagtcgactgggccgaggcggccgacaaggtttttttttttttttttttttttttttttacagcctctaagtcatcatttattgatttatagagcactcatcacatgaatgaggtgctttacaatacagtaaacatcacaacagaactcacatagttaaatacaatcaacaaattacagaactaaaaaaactgaaatgaagcaacattatgtcaaatttcaaagatgctgagaagtggcagtacaaaaaaggtaattccaccaactggagaccagacgggcaaagatacacaggcaccacagcccaaagcgggcagattcgtcgagggtgagtgggcatatcaaataaaatctcacaaccaagaatgaaggccgttaaagatactgacacccacgtgatcacagtactagtggaataacctcacaaacatgttaccttagtatgacaagtcaacctcatatggattttaaactcaaaaaagaggccagaaagccactcagatcatctatcccatacaagcacagactgaaatctatatgcctctacgagaacttggaataaatttaggaaacagccaacagttctacaatccataagatctatggagatgttgttgatggttggcacaagtttagggggaaaaatcattttcctaaagcagagaggaatcgcctcacactgatgaggcactggtgggacaaaagccacctcgttcagtgtcacctgaatgtgggtttcgtatcaaatgtagaggcatttaaatttacattatcagatgaacactgagaaaggcacagatgacatctccgacagaggaagggaagttgtaacatctatgtaggcctgtttcagtatgtaacacactcagggcaggtggaaaagcatgtggagacgcactcatgcctggctctcacttccactcccgtagagctagccctaaaaaaaaaacccacatggttttatcaaactaactgcattaaagtggcacttaaagttcaaaaatagttgtccctgagttactaggtcatttgctgcttgctgaagagtcagatcccaagtttcacctcaacagattgctagcagaattatagcaataggagagcaaaatttgaactccgttttgccacaagcaaccaccatgtgaacaagttctgattttaaaagggagggatcccatctcttaaaagaatttttttgtattagccaggcatggtggcatacacctgtagtcctagctactcaggaggctgaggcaggaggatcacttgagcccaggaggtcaaagctgcagttagctatgatcgttgccactgcactccagcctgggtgacagagagacccagtttcttaaaaaaaaaaaaaaaaaagtaaaaaggattgtattccaagtcctggagggtgtgcagtgctgacattttggggcaactatttttacagtctttggaaaaggaaaaaaaaaaaccaagtcacaaagttcttaaagaaaactgggttctaatggaatcaatttccagtcacaacacacttacgag

SEQ ID NO: 10307 - DNA, 1037 bp, Homo sapiens
  misc_feature 1037: n = A,T,C or G
tcctgccaatttcagtttctagtttcactttcccttttgtaacgtcagctgaagggaaacaaacaaaaaggaaccagaggccacttgtatatataggtctcttcagcatttatgcggggggcagaagaggaagatttctgaagagtgcagctgcctgaaccgagccctgccgaacagctgagaattgcactgcaaccatgagtgagaacaataagaattccttggagagcagcctacggcaactaaaatgccatttcacctggaacttgatggagggagaaaactccttggatgattttgaagacaaagtattttaccggactgagtttcagaatcgtgaattcaaagccacaatgtgcaacctactggcctatctaaagcacctcaaagggcaaaacgaggcagccctggaatgcttacgtaaagctgaagagttaatccagcaagagcatgctgaccaggcagaaatcagaagtctggtcacctggggaaactatgcctgggtctactatcacatgggccgactctcagacgttcagatttatgtagacaaggtgaaacatgtctgtgagaagttttccagtccctatagaattgagagtccagagcttgactgtgaggaagggtggacacggttaaagtgtggaggaaaccaaaatgaaagagcgaaggtgtgctttgagaaggctctggaaaagaagccaaagaacccagaattcacctctggactggcaatagcaagctaccgtctggacaactggccaccatctcagaacgccattgaccctctgaggcaagccattcggctgaatcctgacaaccagtacctttaaagttcctccggtctgaaggtttctaggatggtgagacgtgacgcgacggtgaaggaagaagttgtgacgaagctgggaagccccgcggtactgctgtccccgagcgccatttacgcaaaagagaccgcagatgacgctcaagctgaatccacagcccgtgccgcggctcgcgaactcccaactcaaaggttgcacacatcgcan

SEQ ID NO: 10308 - DNA, 752 bp, Homo sapiens
  misc_feature 568, 571, 699, 752: n = A,T,C or G
agtactctgcagacaattgctcggatccctttattgtctttttaaagatgcctatacaggtgggtcctttttcggtttttgaatgatggatgctgtggtatcataggaaaaagaggaatctctgggttagcttttcattagaaaatccttgtcatgtttaagctcctaagcaggcagcttgaaccccccaccctcttcctgcatccagtagacttgcagggaatgagaaggcaaaaccagcatctgtgattgtccattcttctttgtcaggcctttcagagttcctgttctagagggacaaatgactggaggccatgatacagactaatggtgcataagcccccaaaggtttggattgaattgaggctcagctgacttcacatttttaggtcttcagtatgtttatttgtccctcacatagcggcttgatctgtctgcctgtgtgttcacatagttaaccagaaacgctaggaggaagttgtaccagtgggatacctccttaggtgccaaagttttattttgagaaataatattactttcctcttctgaaataaaataataataatangantgaaacccccaaaccacagtgtgagtctcaggttagcatttgaaaacatctccagagacattgttattcctcaggaggtttccctgactccttaaatgtggctgatgtttcatggttaatttatttanttttaataaggtatgagcaatcgaaggggctgatcatctgaggttttgtaccn

SEQ ID NO: 10309 - DNA, 665 bp, Homo sapiens
  misc_feature 1, 2: n = A,T,C or G
nngaagacagagagtacagagaggacgggaaggaacaagaggcaggtttatataatggaggatggtaaaatgaaatgattctttaggaaaagattgggcatggttagaaatttgggaagaatgtaaagtgactttctagtgccaaaatttaccagagaattacagcaaaagtattctgactcttaatgtctttctcactggtgggaagccattagggatggaagcacctgaccatggagagctgtgttctatttgccataggtgagaataagcatgtctgcatggccacacatgtatataatttgtcatatacactccgtatagaccagaaattttcatagaaaatcagcgggaaacctagttaacaattcacactgtgattcagctgacttgggattctgcatttttaaaaagttctcaggtgatgctgatgctggtggtccttgtaccttgctcggcgtagcaagaggagaggccttttgtgggaaaaatgtggaagcagagcaactggatagaaggtcaggacagaaaaggtcaggagaaaacatcatggtcctcttaattttgaggatgtttttagtcaggggagaagaagaaaggagcaatgcaatagaaattatagatggaaggtactaccactcctcaaagtaaaaggaaagagtggg

SEQ ID NO: 10310 - DNA, 1060 bp, Homo sapiens
  misc_feature 1, 2, 3, 835, 836, 874, 875, 891, 892, 1008, 1009, 1060: n = A,T,C or G
nnnacgccgtccgatgggaattcaagtgggaactattaggaaactaaagttagcattatgagaataaatttaatttctaacatgtccagtatacttaaatattggatgtgttctgagtttaatattcaagttttgaaaaacttactggtatagttatataaacatacaaatataaataaactatatttaattggttacagtaaatctggaaaagagcaaggctttttaagtagaaagtaaaattgcttttaaatttgaaacgtagggtgttttggtttttattttaaaattctaggtcagacatttgattcagcaggagatctatagcataaattatgaactatttgataagaaactgaaagaattgaaccaacgcattgggaagacagagtgcagaaataagcatgaaggaatagctgataaacttttggcaaaaatagcaaaacttcaaagacgtattaaaacagtattattatttcaaaggaattgtttgaaaccaaacatgttatccagtaatggagcctctaagtaacaatgatgatgttatgttgatttctgtggaaagtcctaatttgacaactccaattacatcaaatccaacagataccagaaaaattacatcaggaaattctagcaattctcccaatgctgaagttatggctgtacagaagaaacttgattctataattgatttgacaaaagaaggcctatccaactgcaatacagaaagtccagtatcccccctggagtcacattcgaaagctgcttcaaactcaaaggaaacaaccccattggcacaaaatgcagtccaggttctctgagtctctttgagcanncctgccacctctcccagaactcactcagcaccactacnnctgaattagtagacannaaacccgagaaccacacttctctccctcagaagcctctgagtcgagccggccccgcccgggccaggtaccttttggcctctcttgggaatagaagttattcagcaggggcacacannacagaggcagttccagaatttcaactggctcatcagaaatggcgggaagan

SEQ ID NO: 10311 - DNA, 556 bp, Homo sapiens
  misc_feature 259, 260, 262, 266, 272, 555, 556: n = A,T,C or G
ctatagggcgaattggagctccccgcggtggcggccgagtactgaggacactgtgcttggtctcattgatcctgttaacttgactgactgctcgatggtccagccacatcggtagacgtttctgatggggaaaactccccttccttgagttgactaggtaataggggtgaaactgcttatccaaaacaaccagagaacacgggcatcaaacccaagtcctcgaatttggtttaaatcaatcccttgtacctgcccgtgnntnttanatctanaatgatgtaaagttttgaataaattgactattttacttcatgcaaagaagggacacatatgagattcatcatcacatgagacagcaaatactaaaagtgtaatttgattataagagtttagataaatatatgaaatgcatgagccacagagggaatgtttatggggcacgtttgtaagcctgggatgtgaagcaaaagcagggaacctcattagtaccttatataatataccttatttctctatctctatcacaatatccaacaagactttcacaaaattcann

SEQ ID NO: 10312 - DNA, 691 bp, Homo sapiens
  misc_feature 553, 630, 672, 680, 684, 685, 686, 687, 688, 689, 690, 691: n = A,T,C or G
accttcaaagagccagttgggttggctgtgttctttctattcgtggaaaacagctgtgggtgccgggtgttgaagtcaggcttttgttccatgctaaggtaggaaggtttgttcttgagacctatcactcttctgtggaggaggagttcacagatggtgagccgctttatcaccatctcggaggcttttgaaatatgttgataatgacctgggaaagagggccgagtgggatgagggtgggagtaggaaagaaacattcggcccacacagtgttcatatcttctcttgtttttgtatctgtggcaactgcagattaaatgaattaggttattcttttccattgccttctaccaaatagaagtacttatttaagccttgcagatttttttcctgctgagtgaagcctgaactgagcccatgaaaggtgatctctccaaagcaagggctcctgtttccttccttccatcctgctatctcattcaagtgaaattcctgccatggcatttatcctgagctttgtcacacaggattactgtgatggtccttactatgnaatgggagtgttaaggtgtttttctttaggctcgagattaaaaaccagtttttaggggaatgaatttctcttttgcngtggaaaaaccatgtttctaagggggaaccaaaccttcggcntcattttnccannnnnnnn

SEQ ID NO: 10313 - DNA, 1649 bp, Homo sapiens
  misc_feature 1391, 1649: n = A,T,C or G
tagggcgaattggagctccccgcggtggcggccgaggtacgcggggcgtttgtagatggaaggaagaacttgtgtgcttagacctgacgctgggaggagatgctgccacctaggttacttgtaggaccctatacggcaacctcctttgccaggaactatttataaacatcctgcaggaaaatgagtctatatgtcagaatacacatttcccaccttgcccaacagtagaaaaacataagaagagaaaaacattaaaaaatgacaaggaagttaatggaagtcagcaatgtgatggtgtttggaggtggagccttcagaaggtaattaatgcccttgtaagaagaggccagagagcttgcgcaccttcttcctgccatgtgaggagccaagaagccggctgtctgcaacctgcaagaggaccctcactagaagctagccatactggcatcctcatcttggctttccaacttccagaactgtgagaagtatatgtttgtggtttagtcaatggtctatggtaatttttttatagcagtcccagccaagacagtgcctcatttactacataccatttatattattatataggctcctttcagaaacccatgttcaaataagagataagatactgaaacacataacaccttcactagtttttagtatacaaatattgagaaatagtttgttattaactatctcatccaagaaatgcagattcatgttgtttctaattttttatatataattgacaaaatgaagaaacttaacaccatcctagattttagctgcccaaagaatgaaaagaatgaaaaaaaaatctttgaaaacccacaagtgatatggatctaatttatggttaaatagatatagataacaaacagaatacgcctgtttaaaactgttaaaatgacattggttctaattatacttttatttaaattgaaagacaaggcatttatatggtatctctaaccatcacaacttttgtgtgacaaaaagaaattatcaccaaaatacacctccttaagtaagtgtctgatttcacacttccagaaaaagtgctctttctggtcaagccagcaagaattgagaaagattaagaaagtgcttcaaagatgtttattaaaaagttgtcataaaaatgtgaagtagatgtagcatcaagcataccaaataaagtaaaactgtcatcaagaagattcaacagctatgaaaagagttcttcaaaatatgatatgtttttctagatgataataaaatttatcaattccaaatgtccacattagtctttcataaagacaccaatgagtcacaggaaaaaaaattaaaaataaaaaaaccctatctcagggaatcatgctaacaacctgatgtgttttcttccacatatntatgtctgcttataagtatttacaaacatatattcgcatatatgccattttgaattttttctgttgctgcacttaaaattttttcataataaaacaagactccctgcaaatttgctttttttaggagaactatgtatccctgacaaccatccaggtcagcttgatgattaacacatttgttttaatagctacatagtattctataagtatgatttattcaagtgtgtgtgtgtgtgtgtgagaaagagagagagagan

SEQ ID NO: 10314 - DNA, 346 bp, Homo sapiens
actgttgaatgtaacattagaaattgggcggttaattaacattccctaagtcatatgctttaatttgataatgattgcaatccaagctctgtggttccgaaaatgagatttgtaaattcagtttgcattcccccatctttaggagtacctgcccgggcggccgcccgggcaggtacagaaagaaatatgtcatctacatcgagcgggtgcagcgcgagaaggccaacggcacaactgtccacgtgggcattcacccaagcaaggtggttatcaccaggctaaaactggacaaggatcggaaaaaaattcttgaacgcaaagccaagtctcgacaagttggaaaaga

SEQ ID NO: 10315 - DNA, 236 bp, Homo sapiens
ccgggcaggtacaaacttttactttggttttgttatctgactattgggtctttgacacttaatgggcacttctttttttttttatttaatttagaagttatgtaacttctaaagctatggttctcaagtgtgatatcaggattcctggaatttcctgagagcctttcatggtgtctatgaggtccttgtttttccaactatgtatctgtgtcaggtcaggttttcttcatgtacct

SEQ ID NO: 10316 - DNA, 446 bp, Homo sapiens
  misc_feature 1, 2, 446: n = A,T,C or G
nngaaaagtacggagcttgaagcaaagctgcaggttttaaagccaactttgaaactataatgggtggagtacagatctctgcagttacaggaacatcgtctgcttcatggtaaatgcaatttcctgttcagaaaccacactaacattacttctttcagtatttctgcctcaaagttggtttaagattatcatcattataagaaaaatttgtctagtgctggtcaaggaaatgggtctgtgtttctttggcatgagctttggaatggctgtatttggaggaggggtaaggcaagtcagatccactactgcgtatcatgacgcagatgcacatgcacacagatgcacatgctcgaaaacaggcacctggagattttagaaaatcattggggaagattgcctaactttccttctacttcagtgaatgaattacatttctgaaaacaatn

SEQ ID NO: 10317 - DNA, 956 bp, Homo sapiens
  misc_feature 1, 2, 3, 4, 5, 947, 950, 954, 955, 956: n = A,T,C or G
nnnnngtgtcctgttctcccaataagctaagggcaattggagtgataaggcctgtcgcagcagcaagagatacatatgcgagttcaccatccctcaataggtctttctccaatgtgtcctccaagcaagattcatcataacttataggttcatgatctctaagatcaagtaaaaatcataatttttacttattaaaaaattgcaacacaagatcaatgtccatagcaatatgatagcatcagccaattttgctaacacatttctttgggattttgcccttcctggggtataggggatcagaaatattgatccatgtgcacgcagataaaatggcttctgctaaacagactaaaatctttctctctagtctttctcacttgtacctgcccgggcggccgctcgaccgtctttccctttcgccctccacctccttcctgagaccagctgtgtttcagctcccccttccctgggcccacactgaatctctgttacccttacaaacccctgctgcctctaagagtaaggacccctatcccatcccaaactcaaacctaagcacatgcagcctcatcccatttctccaaaacatgtgaaagcaaaagaaaataaaaaactaactcagcaatcttgttcttcctacagtggtctttggctactgctggatgtggcccacttttaacctgtgagagtgccatccagtgaagagacaatgggaatgctacctcccagaggtgagcccagcagggaaaatacaggcttctcaaggctaagggcaggtgctctggggtcaggggtcactgacaggtgctacgtagacagaaaggtgatgcaaacggccagtggccacaccttcaagacatgttgataggggcagggggagatggacaggcatgtggagaagtgaacaggctcgtgtcatctttgttttctacattgtgcaaatgtangcntgannn

SEQ ID NO: 10318 - DNA, 1247 bp, Homo sapiens
agtgccagcttgccccacatagggaccaggtcccccattgccattcttgcggaaatcacgacccaaaagtctggatatagttgttagaaactgatgaagcatccacaggcaacccgtctggtcccatagcgactggctgtacctcggccgaggtacgcggggcactcccgagctctactgactcccaacagagcgcccaagaagaaaatggccataagtggagtccctgtgctaggatttttcatcatagctgtgctgatgagcgctcaggaatcatgggctatcaaagaagaacatgtgatcatccaggccgagttctatctgaatcctgaccaatcaggcgagtttatgtttgactttgatggtgatgagattttccatgtggatatggcaaagaaggagacggtctggcggcttgaagaatttggacgatttgccagctttgaggctcaaggtgcattggccaacatagctgtggacaaagccaacctggaaatcatgacaaagcgctccaactatactccgatcaccaatgacaagttcaccccaccagtggtcaatgtcacgtggcttcgaaatggaaaacctgtcaccacagggagtgtcagagacagtcttcctgcccagggaagaccaccttttccgcaagttccactatctccccttcctgccctcaactgaggacgtttacgactgcagggtggagcactggggcttggatgagcctcttctcaagcactgggagtttgatgctccaagccctctcccagagactacagagaacgtggtgtgtgccctgggcctgactgtgggtctggtgggcatcattattgggaccatcttcatcatcaagggagtgcgcaaaagcaatgcagcagaacgcagggggcctctgtaaggcacatggaggtgatgatgtttcttagagagaagatcactgaagaaacttctgctttaatgactttacgaagctggcaatattacaatccttgacctcagtgaaagcagtcatcttcagcgttttccagccctatagccaccccaagtgtggttatgcctcctcgattgctccgtactctaacatctagctggcttccctgtctattgccttttcctgtatctattttcctctatttcctatcattttattatcaccatgcaatgcctctggaataaaacatacaggagtctgtctctgctatggaatgccccatggggcatctcttgtgtacctcggccgcgaccac

SEQ ID NO: 10319 - DNA, 848 bp, Homo sapiens
  misc_feature 826, 827, 830, 831, 835, 847, 848: n = A,T,C or G
acttttttttttttttggtatttagctttggacttttctctttctaagggtaattttgtctttgctttatgtaaaagtcccctggcattttttttcttttacacgaagtgtttaatggctttctaccctacctttcccaatcagtgaaaatctgctggaactgttcgtgtctttatatgaagggaaattgaagttcatactattcttggtctcttagtaatgctgaaaatgtgggtcaagtttcatttgatttgagctcctttttcttttcttccctgttcctccccttctcctcctccttcttggaaattatgtggagagatttacattcacgtgtccacttctatggccaattggattgcctactttcacatttaatttacactttgtctggattattagtagttggaaatcatttttcttttattgtctttaacatctagagctgatattgaaaagttaaaagccattctcattgttggtcttttgtatgtgacacacttctgttctctgaaacttttagtatttccccttttcccaaagtggttgcattttccaggtagatgttctgctgtgagttcctttttctccattgttcaggttactagctggagcatcttgatctgaaaacatgggtccttcaatttttcttaggatgctttgaagatatgtgaggaatctcagcatcataccatgcaggatggggttttcttccttcttccctcttgctggctttctggagataagtgttttacccactcctttcctgagaccttgtctccttttttgagcataaaagagaccttcttcataagtgtggacctgnncgnncggncgttctagaacnn

SEQ ID NO: 10320 - DNA, 666 bp, Homo sapiens
  misc_feature 1, 2, 3, 10, 18, 61, 86: n = A,T,C or G
nnnccatggnccggcccnttaaaaaaccccttccctctttcttccccccctctattccccnaaaataatggatggggcctaagttnttacccccaaagctccactttaccaaaatatttccctccagtactttgccagaaaaccacccaaaccaaaaatgcccattttaaaaaaggtgtattttttcttttagaatgtaagctcctccaagagccagggaccaatgttttctgtatgttctattgtgcctagtacactgtaaatgctcaataaatattgatgatgggaggcagtgagtcttgatgataagggtgagaaactgaaatcccaaacactgttttgttgcttgttttattatgacctcagattaaattgggaaatattggcccttttgaataattgtcccaaatattacattcaaataaaagtgcaatggagaaaaaaaaaaaaaaaaaaaaggtacctgcccgggcggccgctcgatgcttggtgctgaagtataattaatatttgagtgtttgctatgtgccataaacttttctaaatgccctttacatacattagttatcaaaacaaccctctcctgggtaggggcattatccccattcttcagatgaggaaactgaggcacaaagaatgtttccaagtttgtacctcggccgctct

SEQ ID NO: 10321 - DNA, 1449 bp, Homo sapiens
  misc_feature 1447, 1448, 1449: n = A,T,C or G
accagtcaggttgttcatttgagccaacaacagatttcttggttattgtgctattgccacagtaggtcctatttgcattgaatttgtgtgtttttagcttctctccttttacgtgttgctttatgctactctccaaaagtctttcttgtagagtttattagttgtataatttttctttgctctgttttgttttgtttgacagcctgggttggtggttttatagccatttccatcatcagtttcctgtctctgctgggggttatcttagtgcctctcatgaatcgggtgtttttcaaatttctcctgagtttccttgtggcactggccgttgggactttgagtggtgatgcttttttacaccttcttccacattctcatgcaagtcaccaccatagtcatagccatgaagaaccagcaatggaaatgaaaagaggaccacttttcagtcatctgtcttctcaaaacatagaagaaagtgcctattttgattccacgtggaagggtctaacagctctaggaggcctgtatttcatgtttcttgttgaacatgtcctcacattgatcaaacaatttaaagataagaagaaaaagaatcagaagaaacctgaaaatgatgatgatgtggagattaagaagcagttgtccaagtatgaatctcaactttcaacaaatgaggagaaagtagatacagatgatcgaactgaaggctatttacgagcagactcacaagagccctcccactttgattctcagcagcctgcagtcttggaagaagaagaggtcatgatagctcatgctcatccacaggaagtctacaatgaatatgtacccagagggtgcaagaataaatgccattcacatttccacgatacactcggccagtcagacgatctcattcaccaccatcatgactaccatcatattctccatcatcaccaccaccaaaaccaccatcctcacagtcacagccagcgactactctcgggaggagctgaaagatgccggcgtcgccactctggcctggatggtgataatgggtgatggcctgcacaattttcagcgatggcctagcaattggctgctgcttttactgaagggcttatccaagtggttaagtacttctgtgctgtgttctgtacatgagtgcctcatgaattaggagactaagctgtctactacaagggtggcattaccgtaagccggctgtcctcttgcatgtcgccagctgcgtctttggaatgcacggattcgctgtccttgctgccatgtcctatgggtcttgcctacgtgcttctgtgtgcccgtgacgccggaggcaattagtggccggtgtgcgtgggcttctttttgttcttttggtttgtggtgcttcttggtctgtttgtttccgttcgttgttcctcgggtctcggcgctgcgctccccgttattttccttcttcttctcnnn

SEQ ID NO: 10322 - DNA, 2261 bp, Homo sapiens
  misc_feature 2257, 2258, 2259, 2260, 2261: n = A,T,C or G
acgcggggcctttgacccagttttagaagcagactgagccacggtgagcagaggcggggcttagggaggcaggagtcttggggctttataaagtcctgccgggcaccactggggatctctttcaaggtttctgctgggtttctgaactgctgggtttctgcttgctcctctggagatgcagcgtctgttgactccagtgaagcgcattctgcaactgacaagagcggtgcaggaaacctccctcacacctgctcgcctgctcccagtagcccaccaaaggttttctacagcctctgctgtccccctggccaaaacagatacttggccaaaggacgtgggcatcctggccctggaggtctacttcccagcccaatatgtggaccaaactgacctggagaagtataacaatgtggaagcaggaaagtatacagtgggcttgggccagacccgtatgggcttctgctcagtccaagaggacatcaactccctgtgcctgacggtggtgcaacggctgatggagcgcatacagctcccatgggactctgtgggcaggctggaagtaggcactgagaccatcattgacaagtccaaagctgtcaaaacagtgctcatggaactcttccaggattcaggcaatactgatattgagggcatagataccaccaatgcctgctacggtggtactgcctccctcttcaatgctgccaactggatggagtccagttcctgggatggtcgttatgccatggtggtctgtggagacattgccgtctatcccagtggtaatgctcgtcccacaggtggggccggagctgtggctatgctgattgggcccaaggcccctctggccctggagcgagggctgaggggaacccatatggagaatgtgtatgacttctacaaaccaaatttggcctcggagtacccaatagtggatgggaagctttccatccagtgctacttgcgggccttggatcgatgttacacatcataccgtaaaaaaatccagaatcagtggaagcaagctggcagcgatcgacccttcacccttgacgatttacagtacatgatctttcatacacccttttgcaagatggtccagaagtctctggctcgcctgatgttcaatgacttcctgtcagccagcagtgacacacaaaccagcttatataaggggctggaggctttcggggggctaaagctggaagacacctacaccaacaaggacctggataaagcacttctaaaggcctctcaggacatgttcgacaagaaaaccaaggcttccctttacctctccactcacaatgggaacatgtacacctcatccctgtacgggtgcctggcctcgcttctgtcccaccactctgcccaagaactggctggctccaggattggtgccttctcttatggctctggtttagcagcaagtttcttttcatttcgagtatcccaggatgctgctccaggctctcccctggacaagttggtgtccagcacatcagacctgccaaaacgcctagcctcccgaaagtgtgtgtctcctgaggagttcacagaaataatgaaccaaagagagcaattctaccataaggtgaatttctccccacctggtgacacaaacagccttttcccaggtacttggtacctggagcgagtggacgagcagcatcgccgaaagtatgcccggcgtcccgtctaaaggtgttctgcagatccatggaaagcttcctgggaaacgtatgctagcagagcttctccccgtgaatcatatttttaagatcccactcttagctggtaaatgaatttgaatcgacatagtagccccataagcatcagccctgtagagtgaggagccatctctagcgggcccttcattcctctccatgctgcaatcactgtcctgggcttatggtgctatggactaggggtcctttgtgaaagagcaagatggagcaatggagagaagacctcttcctgaatcactggactccagaaatgtgcatgcagatcagctgttgccttcaagatccagataaactttcctgtcatgtgttagaactttattattattaatattgttaaacttctgtgctgttcctgtgaatctccaaattttgtaccttgttctaagctaatatatagcaattaaaaagagagaaagaaaaaaaaaaatagacgtcggaactagaataaaaaaaaaaaaaaaaaaaaaaaaaaaaaaaaaaaaaaaaaaaaaaaacctcggggccacggnnnnn

SEQ ID NO: 10323 - DNA, 1669 bp, Homo sapiens
acgacggatcggtctccaggcagcagggggcagcagggtcaaggagaggctaactggccacgggtggggccagcaggcgggcagaaggaggctttaaagcgcctaccctgcctgcaggtgagcagtggtgtgtgagagccaggcgtccctctgcctgcccactcagtggcaacacccgggagctgttttgtcctttgtggagcctcagcagttccctctttcaggactcactgccaagagccctgaacaggagccaccatgcagtgcttcagcttcattaagaccatgatgatcctcttcaatttgctcatctttctgtgtggtgcagccctgttggcagtgggcatctgggtgtcaatcgatggggcatcctttctgaagatcttcgggccactgtcgtccagtgccatgcagtttgtcaacgtgggctacttcctcatcgcagccggcgttgtggtctttgctcttggtttcctgggctgctatggtgctaagactgagagcaagtgtgccctcgtgacgttcttcttcatcctcctcctcatcttcattgctgaggttgcagctgctgtggtcgccttggtgtacaccacaatggctgagcacttcctgacgttgctggtagtgcctgccatcaagaaagattatggttcccaggaagacttcactcaagtgtggaacaccaccatgaaagggctcaagtgctgtggcttcaccaactatacggattttgaggactcaccctacttcaaagagaacagtgcctttcccccattctgttgcaatgacaacgtcaccaacacagccaatgaaacctgcaccaagcaaaaggctcacgaccaaaaagtagagggttgcttcaatcagcttttgtatgacatccgaactaatgcagtcaccgtgggtggtgtggcagctggaattgggggcctcgagctggctgccatgattgtgtccatgtatctgtactgcaatctacaataagtccacttctgcctctgccactactgctgccacatgggaactgtgaagaggcaccctggcaagcagcagtgattgggggaggggacaggatctaacaatgtcacttgggccagaatggacctgccctttctgctccagacttggggctagatagggaccactccttttaggcgatgcctgactttccttccattggtgggtggatgggtggggggcattccagagcctctaaggtagccagttctgttgcccattcccccagtctattaaacccttgatatgccccctaggcctagtggtgatcccagtgctctactgggggatgagagaaaggcattttatagcctgggcataagtgaaatcagcagagcctctgggtggatgtgtagaaggcacttcaaaatgcataaacctgttacaatgttaaaaacataaacgacgacacccacacaaacaaaaccaactttgctcgcgccggcccatcgccccttaaaaaaaggtttctgaaaaccattcggtgggcgcgcgggccccaaagggtaggcgggcaacccggccacagcgcgctcccagaaacaaccgggcacgacagggcgcggggttcccccccttaaaaccggcggcggcacccacgctctgacaacccagggggcgcggcccgggccttacagggccaggacaaatc

SEQ ID NO: 10324 - DNA, 852 bp, Homo sapiens
  misc_feature 849, 850, 851, 852: n = A,T,C or G
gcgtccgctgaactgacctctcccctttgggagagaaaaactgtctgggagcttgacaaaggcatgcaggagagaacaggagcagccacagccaggagggagagccttccccaagcaaacaatccagagcagctgtgcaaacaacggtgcataaatgaggcctcctggaccatgaagcgagtcctgagctgcgtcccggagcccacggtggtcatggctgccagagcgctctgcatgctggggctggtcctggccttgctgtcctccagctctgctgaggagtacgtgggcctgtctgcgctgcaaaccagtgtgccgtgccagccaaggacagggtggactgcggctacccccatgtcacccccaaggagtgcaacaaccggggctgctgctttgactccaggatccctggagtgccttggtgtttcaagcccctgcaggaagcagaatgcaccttctgaggcacctccagctgcccccggccgggggatgcgaggctcggagcacccttgcccggctgtgattgctgccaggcactgttcatctcagcttttctgtccctttgctcccggcaagcgcttctgctgaaagttcatatctggagcctgatgtcttaacgaataaaggtcccatgctccacccgaggacagttcttcgtgcctgaaaaaaaaaaaaaaaaaaaaaacagttcctgccccggggggccgcttggtttaaaaaaaaggggtccccccgggcgggaggaaattttatttaaaccttttttagccccccccccccgggggggggccccggcccccccttttggccccctttaaggggggaaaatggccccctggggaaaaccannnn

SEQ ID NO: 10325 - DNA, 9678 bp, Homo sapiens
tccgctaggcgcccagtgccagcggggaggagactcgctccgccgccgaccaacaccaacacccagctccgacgcagctcctctgcgcccttgccgccctccgagccacagctttcctcccgctcctgcccccggcccgtcgccgtctccgcgctcgcagcggcctcgggagggcccaggtagcgagcagcgacctcgcgagccttccgcactcccgcccggttccccggccgtccgcctatccttggccccctccgctttctccgcgccggcccgcctcgcttatgcctcggcgctgagccgctctcccgattgcccgccgacatgagctgcaacggaggctcccacccgcggatcaacactctgggccgcatgatccgcgccgagtctggcccggacctgcgctacgaggtgaccagcggcggcgggggcaccagcaggatgtactattctcggcgcggcgtgatcaccgaccagaactcggacggctactgtcaaaccggcacgatgtccaggcaccagaaccagaacaccatccaggagctgctgcagaactgctccgactgcttgatgcgagcagagctcatcgtgcagcctgattgaagtatggagatggaatacaactgactcggagtcgagaattggatgagtgttttgcccaggccaatgaccaaatggaaatcctcgacagcttgatcagagagatgcggcagatgggccagccctgtgatgcttaccagaaaaggcttcttcagctccaagagcaaatgcgagccctttataaagccatcagtgtccctcgagtccgcagggccagctccaagggtggtggaggctacacttgtcagagtggctctggctgggatgagttcaccaaacatgtcaccagtgaatgtttggggtggatgaggcagcaaaggggcggagatggacatggtggcctggggtgtggacctggcctcagtggagcagcacattaacagccaccggggcatccacaactccatcggcgactatcgctggcagctggacaaaatcaaagccgacctgcgcgagaaatctgcgatctaccagttggaggaggagtatgaaaacctgcagaaagcgtcctttgagaggatggatcacctgcgacagctgcggaacatcattcaggccacgtccagggagatcatgtggatcaatgactgcgaggaggaggagctgctgtacgactggagcgacaagaacaccaacatcgctcagaaacaggaggccttctccatacgcatgagtcaactggaagttaaagaaaaagagctcaataagctgaaacaagaaagtgaccaacttgtcctcaatcagcatccagcttcagacaaaattgaggcctatatggacactctgcagacgcagtggagttggattcttcagatcaccaagtgcattgatgttcatctgaaagaaaatgctgcctactttcagttttttgaagaggcgcagtctactgaagcatacctgaaggggctccaggactccatcaggaagaagtacccctgcgacaagaacatgcccctgcagcacctgctggaacagatcaaggagctggagaaagaacgagagaaaatccttgaatacaagcgtcaggtgcagaacttggtaaacaagtctaagaagattgtacagctgaagcctcgtaacccagactacagaagcaataaacccattattctcagagctctctgtgactacaaacaagatcagaaaatcgtgcataagggggatgagtgtatcctgaaggacaacaacgagcgcagcaagtggtacgtgacgggcccgggaggcgttgacatgcttgttccctctgtggggctgatcatccctcctccgaacccactggccgtggacctctcttgcaagattgagcagtactacgaagccatcttggctctgtggaaccagctctacatcaacatgaagagcctggtgtcctggcactactgcatgattgacatagagaagatcagggccatgacaatcgccaagctgaaaacaatgcggcaggaagattacatgaagacgatagccgaccttgagttacattaccaagagttcatcagaaatagccaaggctcagagatgtttggagatgatgacaagcggaaaatacagtctcagttcaccgatgcccagaagcattaccagaccctggtcattcagctccctggctatccccagcaccagacagtgaccacaactgaaatcactcatcatggaacctgccaagatgtcaaccataataaagtaattgaaaccaacagagaaaatgacaagcaagaaacatggatgctgatggagctgcagaagattcgcaggcagatagagcactgcgagggcaggatgactctcaaaaacctccctctagcagaccaggggtcttctcaccacatcacagtgaaaattaacgagcttaagagtgtgcagaatgattcacaagcaattgctgaggttctcaaccagcttaaagatatgcttgccaacttcagaggttctgaaaagtactgctatttacagaatgaagtatttggactatttcagaaactggaaaatatcaatggtgttacagatggctacttaaatagcttatgcacagtaagggcactgctccaggctattctccaaacagaagacatgttaaaggtttatgaagccaggctcactgaggaggaaactgtctgcctggacctggataaagtggaagcttaccgctgtggactgaagaaaataaaaaatgacttgaacttgaagaagtcgttgttggccactatgaagacagaactacagaaagcccagcagatccactctcagacttcacagcagtatccactttatgatctggacttgggcaagttcggtgaaaaagtcacacagctgacagaccgctggcaaaggatagataaacagatcgactttagattatgggacctggagaaacaaatcaagcaattgaggaattatcgtgataactatcaggctttctgcaagtggctctatgatgctaaacgccgccaggattccttagaatccatgaaatttggagattccaacacagtcatgcggtttttgaatgagcagaagaacttgcacagtgaaatatctggcaaacgagacaaatcagaggaagtacaaaaaattgctgaactttgcgccaattcaattaaggattatgagctccagctggcctcatacacctcaggactggaaactctgctgaacatacctatcaagaggaccatgattcagtccccttctggggtgattctgcaagaggctgcagatgttcatgctcggtacattgaactacttacaagatctggagactattacaggttcttaagtgagatgctgaagagtttggaagatctgaagctgaaaaataccaagatcgaagttttggaagaggagctcagactggcccgagatgccaactcggaaaactgtaataagaacaaattcctggatcagaacctgcagaaataccaggcagagtgttcccagttcaaagcgaagcttgcgagcctggaggagctgaagagacaggctgagctggatgggaagtcggctaagcaaaatctagacaagtgctacggccaaataaaagaactcaatgagaagatcacccgactgacttatgagattgaagatgaaaagagaagaagaaaatctgtggaagacagatttgaccaacagaagaatgactatgaccaactgcagaaagcaaggcaatgtgaaaaggagaaccttggttggcagaaattagagtctgagaaagccatcaaggagaaggagtacgagattgaaaggttgagggttctactgcaggaagaaggcacccggaagagagaatatgaaaatgagctggcaaaggtaagaaaccactataatgaggagatgagtaatttaaggaacaagtatgaaacagagattaacattacgaagaccaccatcaaggagatatccatgcaaaaagaggatgattccaaaaatcttagaaaccagcttgatagactttcaagggaaaatcgagatctgaaggatgaaattgtcaggctcaatgacagcatcttgcaggccactgagcagcgaaggcgagctgaagaaaacgcccttcagcaaaaggcctgtggctctgagataatgcagaagaagcagcatctggagatagaactgaagcaggtcatgcagcagcgctctgaggacaatgcccggcacaagcagtccctggaggaggctgccaagaccattcaggacaaaaataaggagatcgagagactcaaagctgagtttcaggaggaggccaagcgccgctgggaatatgaaaatgaactgagtaaggtaagaaacaattatgatgaggagatcattagcttaaaaaatcagtttgagaccgagatcaacatcaccaagaccaccatccaccagctcaccatgcagaaggaagaggataccagtggctaccgggctcagatagacaatctcacccgagaaaacaggagcttatctgaagaaataaagaggctgaagaacactctaacccagaccacagagaatctcaggagggtggaagaagacatccaacagcaaaaggccactggctctgaggtgtctcagaggaaacagcagctggaggttgagctgagacaagtcactcagatgcgaacagaggagagcgtaagatataagcaatctcttgatgatgctgccaaaaccatccaggataaaaacaaggagatagaaaggttaaaacaactgatcgacaaagaaacaaatgaccggaaatgcctggaagatgaaaacgcgagattacaaagggtccagtatgacctgcagaaagcaaacagtagtgcgacggagacaataaacaaactgaaggttcaggagcaagaactgacacgcctgaggatcgactatgaaagggtttcccaggagaggactgtgaaggaccaggatatcacgcggttccagaactctctgaaagagctgcagctgcagaagcagaaggtggaagaggagctgaatcggctgaagaggaccgcgtcagaagactcctgcaagaggaagaagctggaggaagagctggaaggcatgaggaggtcgctgaaggagcaagccatcaaaatcaccaacctgacccagcagctggagcaggcatccattgttaagaagaggagtgaggatgacctccggcagcagagggacgtgctggatggccacctgagggaaaagcagaggacccaggaagagctgaggaggctctcttctgaggtcgaggccctgaggcggcagttactccaggaacaggaaagtgtcaaacaagctcacttgaggaatgagcatttccagaaggcgatagaagataaaagcagaagcttaaatgaaagcaaaatagaaattgagaggctgcagtctctcacagagaacctgaccaaggagcacttgatgttagaagaagaactgcggaacctgaggctggagtacgatgacctgaggagaggacgaagcgaagcggacagtgataaaaatgcaaccatcttggaactaaggagccagctgcagatcagcaacaaccggaccctggaactgcaggggctgattaatgatttacagagagagagggaaaatttgagacaggaaattgagaaattccaaaagcaggctttagaggcatctaataggattcaggaatcaaagaatcagtgtactcaggtggtacaggaaagagagagccttctggtgaaaatcaaagtcctggagcaagacaaggcaaggctgcagaggctggaggatgagctgaatcgtgcaaaatcaactctagaggcagaaaccagggtgaaacagcgcctggagtgtgagaaacagcaaattcagaatgacctgaatcagtggaagactcaatattcccgcaaggaggaggctattaggaagatagaatcggaaagagaaaagagtgagagagagaagaacagtcttaggagtgagatcgaaagactccaagcagagatcaagagaattgaagagaggtgcaggcgtaagctggaggattctaccagggagacacagtcacagttagaaacagaacgctcccgatatcagagggagattgataaactcagacagcgcccatatgggtcccatcgagagacccagactgagtgtgagtggaccgttgacacctccaagctggtgtttgatgggctgaggaagaaggtgacagcaatgcagctctatgagtgtcagctgatcgacaaaacaaccttggacaaactattgaaggggaagaagtcagtggaagaagttgcttctgaaatccagccattccttcggggtgcaggatctatcgctggagcatctgcttctcctaaggaaaaatactctttggtagaggccaagagaaagaaattaatcagcccagaatccacagtcatgcttctggaggcccaggcagctacaggtggtataattgatccccatcggaatgagaagctgactgtcgacagtgccatagctcgggacctcattgacttcgatgaccgtcagcagatatatgcagcagaaaaagctatcactggttttgatgatccattttcaggcaagacagtatctgtttcagaagccatcaagaaaaatttgattgatagagaaaccggaatgcgcctgctggaagcccagattgcttcagggggtgtagtagaccctgtgaacagtgtctttttgccaaaagatgtcgccttggcccgggggctgattgatagagatttgtatcgatccctgaatgatccccgagatagtcagaaaaactttgtggatccagtcaccaaaaagaaggtcagttacgtgcagctgaaggaacggtgcagaatcgaaccacatactggtctgctcttgctttcagtacagaagagaagcatgtccttccaaggaatcagacaacctgtgaccgtcactgagctagtagattctggtatattgagaccgtccactgtcaatgaactggaatctggtcagatttcttatgacgaggttggtgagagaattaaggacttcctccagggttcaagctgcatagcaggcatatacaatgagaccacaaaacagaagcttggcatttatgaggccatgaaaattggcttagtccgacctggtactgctctggagttgctggaagcccaagcagctactggctttatagtggatcctgttagcaacttgaggttaccagtggaggaagcctacaagagaggtctggtgggcattgagttcaaagagaagctcctgtctgcagaacgagctgtcactgggtataatgatcctgaaacaggaaacatcatctctttgttccaagccatgaataaggaactcatcgaaaagggccacggtattcgcttattagaagcacagatcgcaaccggggggatcattgacccaaaggagagccatcgtttaccagttgacatagcatataagaggggctatttcaatgaggaactcagtgagattctctcagatccaagtgatgataccaaaggattttttgaccccaacactgaagaaaatcttacctatctgcaactaaaagaaagatgcattaaggatgaggaaacagggctctgtcttctgcctctgaaagaaaagaagaaacaggtgcagacatcacaaaagaataccctcaggaagcgtagagtggtcatagttgacccagaaaccaataaagaaatgtctgttcaggaggcctacaagaagggcctaattgattatgaaaccttcaaagaactgtgtgagcaggaatgtgaatgggaagaaataaccatcacgggatcagatggctccaccagggtggtcctggtagatagaaagacaggcagtcagtatgatattcaagatgctattgacaagggccttgttgacaggaagttctttgatcagtaccgatccggcagcctcagcctcactcaatttgctgacatgatctccttgaaaaatggtgtcggcaccagcagcagcatgggcagtggtgtcagcgatgatgtttttagcagctcccgacatgaatcagtaagtaagatttccaccatatccagcgtcaggaatttaaccataaggagcagctctttttcagacaccctggaagaatcgagccccattgcagccatctttgacacagaaaacctggagaaaatctccattacagaaggtatagagcggggcatcgttgacagcatcacgggtcagaggcttctggaggctcaggcctgcacaggtggcatcatccacccaaccacgggccagaagctgtcacttcaggacgcagtctcccagggtgtgattgaccaagacatggccaccaggctgaagcctgctcagaaagccttcataggcttcgagggtgtgaagggaaagaagaagatgtcagcagcagaggcagtgaaagaaaaatggctcccgtatgaggctggccagcgcttcctggagttccagtacctcacgggaggtcttgttgacccggaagtgcatgggaggataagcaccgaagaagccatccggaaggggttcatagatggccgcgccgcacagaggctgcaagacaccagcagctatgccaaaatcctgacctgccccaaaaccaaattaaaaatatcctataaggatgccataaatcgctccatggtagaagatatcactgggctgcgccttctggaagccgcctccgtgtcgtccaagggcttacccagcccttacaacatgtcttcggctccgggctcccgctccggctcccgctcgggatctcgctccggatctcgctccgggtcccgcagtgggtcccggagaggaagctttgacgccacagggaattcttcctactcttattcctactcatttagcagtagttctattgggcactagtagtcagttgggagtggttgctataccttgacttcatttatatgaatttccactttattaaataatagaaaagaaaatcccggtgcttgcagtagagtgataggacattctatgcttacagaaaatatagccatgattgaaatcaaatagtaaaggctgttctggctttttatcttcttagctcatcttaaataagcagtacacttggatgcagtgcgtctgaagtgctaatcagttgtaacaatagcacaaatcgaacttaggatttgtttcttctcttctgtgtttcgatttttgatcaattctttaattttggaagcctataatacagttttctattcttggagataaaaattaaatggatcactgatattttagtcattctgcttctcatctaaatatttccatattctgtattaggagaaaattaccctcccagcaccagcccccctctcaaacccccaacccaaaaccaagcattttggaatgagtctcctttagtttcagagtgtggattgtataacccatatactcttcgatgtacttgtttggtttggtattaatttgactgtgcatgacagcggcaatcttttctttggtcaaagttttctgtttattttgcttgtcatattcgatgtactttaaggtgtctttatgaagtttgctattctggcaataaacttttagacttttgaaaaaaaaaaaaaaaaaaaaaaaaaaaaaaaaaaaaaaaaaaaa

SEQ ID NO: 10326 - DNA, 3237 bp, Homo sapiens
  misc_feature 1, 2, 3228, 3229, 3230, 3231, 3232, 3233, 3234, 3235, 3236,3237: n = A,T,C or G
nncccggggacgacgcccgcgggtgttccttttttcttctgccgtcgccttctctgcctcttctcatcctttctcgctctgctgctctgcagtgtgacgagtccgaatcctcttcccacccagcccgcgcctttcttcttttgcctgcgctgttctatttctccttcggccgccgccgccactgctgcacacagctggtgtcggtgccgcgcttttacccccaagtcgttcccgcagcctatggcccaggccgccttgggtatttctgctcaaggtaaccacatccctctttaaaaattccgccgaaaaagagaagacgctttacccgactctttgggccgttatctcacggcgaactttctgaccaagtatacaactacccagagggcctaggagaagtgctgtatagagagcagttcgacttcaacgctgagccaccttgggaacctagctgatgataggggggttccatctcccaacttgtccattttgttgcatattctaaggacccagacataggcttggtggcccgtctcttgtctttcctggtttatgactttcggctttgtggaatacggctgagatgaaaggatttattgatgatgcaaactactccgttggcctgttggatgaaggaacaaaccttggaaatgttattgataactatgtttatgaacataccctgacagggaaaaatgcattttttgtgggagatcttggaaagattgtgaagaaacacagtcaatggcagaatgtagtggctcagataaagccattctacacagtgaagtgcaactctgctccagctgtacttgagattttggcagctcttggaaccggatttgcttgttccagtaaaaatgaaatggctttagtgcaagagttgggtgtacctccagaaacattatttacataatccttgcaagcaagtgtctcagataaagtatgcggcaaaagttggagtgaatatcctgacatgtgacaatgaaattgaattgaagaaaattgcacgtaatcacccaaatgccaaggttttttttcattaggttcacttgattcatccgtcgctggatttgggagcactggcaacataatcaacacacttcctacaatcttcaggcttcacatgtgctgatgatgatgtaaaccaactctgccccaatcatctccccttctcttagggtcttactacatattgcaacagaagataatattggaggtgaagagggtaacatgaagtttggcactaccctgaagaactgtaggcatctcttggaatgtgctaaggaacttgatgtccaaataattggggttaaatttcatgtttcgagtgcttgcaaagaatctcaagtatatgtacatgctctatctgatgctcgatgtgtgtttgacatggctggagaaattggctttacgatgaacatgttagacattggtggaggattcacgggaactgaatttcaattggaagaggttaatcatgttatcagccctctgttggatatctactttcctgaaggatctggtgttaagataatttcagaacccggaagctactatgtgtcttctgcatttacactcgcagttaatatcatagcaaagaaagttgttgaaaatgataaatttccctctggagtagaaaaaaccggaagtgatgaaccagccttcatgtattatatgaatgatggtgtttatggttcttttgcaagtaaactgtctgaggacttaaataccattccagaggttcacaagaaatacaaggaagatgagcctctgtttacaagcagcgtccgcagcttttccgctgaagcttaaacaggcattaacgcttctttagatctgaagttgcaggttaagcttgtctggtcaacattccagtgtggaaaaataatttaaacaatcttattctcttaattcttttggcaacaaaaactattagtaatagctatttgggaccagacaaaatcagctttcatctataattcattggggataatgggagatttagataatgtatccagatttaaacctaccagtttgtcctaccccttaagcgtttaaaataaaatatgcaacaaaatggatgacttagtggagatggaagcccattaattgggttccccattaaatcgtttacatacaagaacacagtttttatactaaggatttgtgtttaaagtcttgtaaagttcatgtctttcacccagatatatcaaatgttagaagaccagtgtgacttcattagataacgtttagtgtatttagaatgtgtaaatttgtgctttgaactgtagtttaataaatgtaaaattgcatcatagtatttgttgacctaatgtaacccttgtatgattgcaataaaattttgtgtagattttactgttttttcaggctaaaactttgggaaaggggctagctagcaaaggtagttttgaaatagatgtgtatatggactgttttgaagggtttttttctttatagcccagttaagttttgtttggctcggtgcatttttcatttatttaattagtaatttaagtaaagtgtttggtaaatcattgtgaagttcagattcattatggagagttgatgtgcagtaagcatgatgtttaacaattttaacaccaaaaatgttaatcctgcataaatcaactgtaataataaataggtgtttctgtatagatagaatgcatagagtaccttagtaaatctttgaatcacaatcttttggctgaaatggaagattctgttaaatactttgaataaacttggggggagggaaataaaattgcagaaaactgcagagcactaaaacttaaagaagggctacatctttatccagaaacctgttgctcttttgcacggaatgtttaaattcagagttgggatgggggttggggtgaagcacacttattatcttcagttgcagtgatttcaaatttaggattttttgttgttggtttgaactgtccccttagtttcttgttatttccaatttgttctgcttagtcattacttttaattcttttcttactaaaattttatggggtgggggcagggagtacacactaactgtaggttgcccgactggctgcttatgccgtttgaaaacctgaaccaaaccaggtgaaaacggggctcccaacccgttagcgtgaacgcccagagagacctggccgcacatccttagcgatccatagctccatgagatcttataaaacgatagannnnnnnnnn

SEQ ID NO: 10327 - DNA, 472 bp, Homo sapiens
  misc_feature 1, 2, 3, 4, 5, 6, 7, 8, 9, 10, 11, 12, 13, 464, 465, 466,467, 468, 469, 470, 471, 472: n = A,T,C or G
nnnnnnnnnnnnncataaggaaagtactatgggaacaggttcaaaatgaatataagggagttatttatatattaggtaaagcacaaaaatgataattactgactgcacactcacagttaaagtcatttgggcagaaaatgtcgacccgttggaacagaccataaacctgctgtaaagagccaagggaggtaaccaaagcgtattcagatagctgtgaagctggggagacacctgaaaaatctagcaatagcgtgaaaatcacttaagtaaaaaataaactttcagaggctgaagctatttgaatttaccaagatttagagatgaatgccaaagaggattagtaaaattcttccatgcaaaatacaacagtaatggctccatcacgacattgtaaacccaagcccgagagtcactatgtaagtgagagttgagtgcaatttgtaataagaataaaaacatttccnnnnnnnnn

SEQ ID NO: 10328 - DNA, 1111 bp, Homo sapiens
  misc_feature 1103, 1104, 1105, 1106, 1107, 1108, 1109, 1110, 1111: n = A,T,C or G
cgtccggcggcggcggcgggagctgcggagtcgggaatcaaaacaaagggcctggggggggcggggggaaggcggcggggccggaatgtgagcggaggtggagccggcggcagagggtggaagaatgaacagaatagaaagatgaaaggatgttgaatcactttgcatggctgtatgatggaaggaaacggaactgagaactcctgcagaagaacacgtggatggcttcaacaagatcatgatgctaagccatggctttggaaattctctaattgcttttctcgtcctgagcagacgctgccacatagtccccaaacgaaagagtacatggagaacaagaaagttgctgtggaactaaaggatgtaccatcaccccttcatgctggctctaagctttctccagcagtcccacttcctgatattcgttctcttcagcagcctaaaatacagctttcttctgtccccaaagtaagctgctgtgctcattgccctaatgaaccctccacttcgccaatgcgttttggtggtggtggtggcggtagcggaggtaccagtagcttgattcacccgggcgcactgttagactcgcaaagcaccaggacaatcacgtgtcaggtagggtcagggttgctttccagtctgcatctacactccagaatgcctcagctaggaacaattggcaggcatcgccagtgatttcccagccatgtgtctagagagtaacctgtagttcctgcaaacactgccctgtatgtggaaaactccacttccagtcatgtcatggtaaggtgcacaaacctgcaatcagattccgggttggagggattgaaacctccgaatggctaatacacaggatactgaattacacaagcggagctcaaggggattagggaacagacaattgacaagaaggacagaaccatacatgtgtgcacaaatcatgtcccataatgtggaccacgattgatacagggacataaggaggataaccagacactacaattcatatgtggaaattagcaaattcacaaaaaagaagagacagatagggacaaaaggaaagatacaaacagaagaaaaaataagaaacaagaaattatgcnnnnnnnnn

SEQ ID NO: 10329 - DNA, 170 bp, Homo sapiens
ccgggcaggtaccacactcagggcagtttccagctcctctcacaaacagtaaatctacacaactttcacagccaggtcagcaactggttcaagaaccgccggcagcgcgacaggaacccctccgagacccagtccaaaaggtgagcgccaacttttctcctcccccgcgt

SEQ ID NO: 10330 - DNA, 224 bp, Homo sapiens
ccgggcaggtacatctacatacacatcagtgccgtgccttccattcccagggagggcagggtcactagacaacatcattaaaatgaccctttatcagagaacgtttttctgtttaaggaaataaactagaggtacaattttgaaagtttctacctgtatataatggatgttaaccagtatcaataaatcacttcgtataatctcaaaaaaaaaaaaaaaaaagt

SEQ ID NO: 10331 - DNA, 889 bp, Homo sapiens
ccgggcaggtacgcgggggcaggcgcagccgtgcgatgttgtcctctacagccatgtattcggctgctggcagagacttggggatggaaccgcacagagccgcgggccctttgcagctgcgattttcgccctacgttttcaacggaggtactatactggcaatgtgctggagaagatttgcgcaatgtgtggcttctgatactcgatggagtgaagggtttcaattcatacgcgggatagccccaaagtgttacaaaattaacagacaaaacagtcatggatgcagcggttttcatggagactgtcttacgctgacaaagattattgaagcaagactaaagatgtataagcattccaataataaggccatgactacgggggcaattgctgcaatgctgtctacaatcctgtattcaaggcgcttctttccatactatgtttacaacatcatcggtggacttgatgaagaaggaaagggggctgtatacagctttgatccagtagggtcttaccagagagactccttcaaggctggaggctcaacaagtgccatgctacagcccctgcttgacaaccaggttggttttaagaacatgcagaatgtggagcatgttccgctgtccttggacagagccatgcggctggtgaaagatgtcttcatttctgcggctgagagagatgtgtaccggggacccctcggattgctagtgacaagagggtcaggaggaatggtcttagaggcggttgggtgctttaccacacgccacggtgattgctgagagactcggggtggttaaaggaacggggccaccaaaaaaaaaaaaaaaaaggggggcgaaaaaggggggaatttttcctgttcccccctacctcctcccccttcatccaa

SEQ ID NO: 10332 - DNA, 462 bp, Homo sapiens
  misc_feature 462: n = A,T,C or G
acccgggaggctcgcatgtgtgggtgcatgccgtggcaggagaaggatgggtgatccctaaattaccttccgaagagccatgcatgcgtcctctggctgctccaggtgtaaaaaatgccagggaggggacaatcatgagtcctaggcaggaaaggtcctctggagagaggaaatggcacacgcgcaagcacggaggcatgaggggccagggtcctggaggacactgggccgggacagatcagactccaggcaaggagggagatggcgccagactgtgatcataagcttcacgatgatgcaacagccaaatatttactgtctcacagtggagattaaacagcctctccataaaacacaccggcttgttctctgcattgacagaactttttaaaccatgaactgattccccaacataaactacacaacagccagctttatgaagagagctgcaaggacgcgtgn

SEQ ID NO: 10333 - DNA, 1280 bp, Homo sapiens
  misc_feature 1, 1278, 1279, 1280: n = A,T,C or G
ncagtgccttaagatggtctttcccaaggagcatcccccaagccttcaaatttgccttccagtttagacaggaagctggcctctgcctttagggccgtatgaggactcactccttgtctctttctgccaaagcctgacgactccctggagcctttctttgactctctggtaaagcagacccacgttcccaacctcttctccctgcagctttgtggtgctggcttccccctcaaccagtctgaagtgctggcctctgtcggagggagcatggtgagtaggtcctcagagaggggaggtcctggcattgagggagagatgggtgccatcctctccccttcctgaaagctacaccacagttttggctccgatacttagaatcaggaggaacctctttatattccctacccttactttatttttccattcttttcttttttgcgttattccagaaaggaatcaaggcacctatggtaaacttggaaaggaaggcaattaggaaaatttcaaaggaaatgaaaataagacctgttgaattaaaattattcagtttgatggtcagaaggcagagatataagaagtttgtctatttattaattaattagaacaatggtgaatggttctccaataagcagagaaaataaaacttataatataaacaaataaccattcattcaacatttattgtggcagtttagatttaaataactttatatcaagggctgtatgattctgaaacaaataattaaaaatcccggaaagtcttttctcctgaacacatttaagaaactagaaatcactttgggtatgatttgtttagaagcaggaagatgaaaagggtagcctgtagaagaccttgccaccccaagaaatcactgatcttattgcttggtccttgggggactcactctccttctgtgccaggacacgggtacctgcctctttttttccctagatcattggaggtatcgaccactcgctgtacacaggcagtctctggtatacacccatccggcgggagtggtattatgaggtcatcattgtgcgggtggagatcaatggacaggatctgaaaatggactgcaaggaggtaataaaaccaagggagagcctgggaacataagggggtaggcagtacaatgtgaaggaagactctggttatcatgttgggaggatgaggcagaggtaataggacctgcagaaagggttggaagttgagcctagaacagtcaggggcttaatggtcacacagcaggatctgcggtttggggcctagggacnnn

SEQ ID NO: 10334 - DNA, 596 bp, Homo sapiens
  misc_feature 1, 2, 3, 4, 5: n = A,T,C or G
nnnnnaaaacagagtcccaatttgagaaggtcccagaaattatgggggttatctgtgccccggttacccataatcagccagcctagagtccgccaacaaatcataaataccgtgagtttatttatatccagacccaagtacacagatatagtgctcagcttccttctgtgtcatccagtgccgtataacaggcacctggctgaggtgtggagaatgctgtcggtggagcttcccagcacgacctggattctgtggaggctcctgaggaagctgcagaaatgccataatgagcctgcacaggagaagatggcatatgtggctgtggctgtaagcccttgagctttgcccctctaatgtcagcccctcccaggatgactgaccccacaccccagtggagagtgttccttttggtccctctcaaagcctgcatctgtcatccatttataagtctacagtgtttctgccaagggattgacatggagggagctggggagagtgaaggagtcagaatgccttaatacaaactcgtccaacctgcaaaaaaaaaaaaaaaaaaaaagatctttaattaagcggccgcaagcttattcccttta

SEQ ID NO: 10335 - DNA, 209 bp, Homo sapiens
  misc_feature 1, 206, 207, 208, 209: n = A,T,C or G
nctccaccgcggtggccgccgaggtactttttttcttaatttttttttttttttttgaaccaagcaggtgtattctggaagaaaatcagacaccctccctggttaagaattagttaactataatgtattggtgaattgagtttatagtcttttggtgggggtaaaagggccctcaaagtcatagcaggtttagttgtacctgcccnnnn

SEQ ID NO: 10336 - DNA, 1227 bp, Homo sapiens
  misc_feature 1, 2, 1223, 1224, 1225, 1226, 1227: n = A,T,C or G
nnggccgtcgttttacaccccggaacacagggtttcccttgctgcttgccggtgctgttcgccggtggtaaaggatttgaaagttacgcggcggcggtctttccgcgccgatagcgctcacgcaagcatggttaacgtccctaaaacccgccggactttctgtaagaagtgtggcaagcaccaaccccataaagtgacacagtacaagaagggcaaggattctctgtacgcccagggaaagcggcgttatgacaggaagcagagtggctatggtgggcaaactaagccgattttccggaaaaaggctaaaactacaaagaagattgtgctaaggcttgagtgcgttgagcccaactgcagatctaagagaatgctggctattaaaagatgcaagcattttgaactgggaggagataagaagagaaagggccaagtgatccagttctaagtgtcatcttttattatgaagacaataaaatcttgagtttatgttcaaaaaaaaaaaaaaaaaaaaaaaaaaaaaaaaaaaaaaaaaaaaaaccgcggaggccacttctaagggggggggaaaaaagaagggcacaaaagggccaggggccaaacgaggaacggacacccaaaattactgaaaaaacgggggagcaaacacgggggggcacacacaaaaaggaagcgccacaaaatcactccgaccaaacccaggggtaaccgcggataagaaccccgcacaacagcaccaaaacagaccagcagcgacgcgcaacagacaccgaagaagcacagggggggaaaacacacccggcagaacacaacaaaaagaggccgacgcagcgccgccaccagccaccagcaaacaaaccgcagcacacacacaaacaagcaacaacagcagaccgccacacagcaaacacagaacaggcgggacgaagagggaaagaagacagcacgagaccagagagaaagaagaggagcggcgccggacagagcgacggcagcaagggaaggcacgaggaggaccaagcagagacagcgacgagcaaggcacacgcgacgacacaggcgagcgaagaggggatgagaggagaaacgaggagagaggacagagaagagagagagagagcgaaagagcgagggagacaacaggagacagaaggaggaaacggggcgcagagacgcaaggccgaccgagaggagggcatggacatgcagagagaacgcagcannnnn

SEQ ID NO: 10337 - DNA, 912 bp, Homo sapiens
  misc_feature 1, 2, 60, 62, 63, 64, 65, 66, 67, 68, 69, 70, 71, 72, 73,74, 75, 76, 77, 78, 79, 80, 81, 82, 83, 84, 85, 86, 87,88, 89, 90, 91, 92, 93, 94, 95, 112, 821: n = A,T,C or G
nnaaagcaccaacccccacgtgttttgatgaagcacaaaaagtcatatatacttttatgnannnnnnnnnnnnnnnnnnnnnnnnnnnnnnnnnncgcggtgagggctcttnagaacgaacggcttgggcgcgggtaatcagctccctttcccccactttctcacttattctaggtacttgggactgtcgtagagtttccagaccccatgtaggcgcccagtcgtggactgtcccactctgctgctctactgctcgtggtgctcccgcgcccagactggtatccggggactgtgacttgcagggtccgccatggagccagagcagatgctggagggacaaacgcaggttgcagaaaatcctcactctgagtacggtctcacagacaacgttgagagaatagtagaaaatgagaagattaatgcagaaaagtcatcaaagcagaaggtagatctccagtctttgccaacttcgtgcctacctgggatcagacagttgtgcctatctttatttacagggacttgctgtgctttggcaaagggaaagaccaccaaatcccattgattttctagcctcttatcttttaaaaaacaaggcacagtttgaagatcgaaactggactttaatgggaagaacagaaaaattttagttgctactgtaggttttacatggattaagaggcagctttaattgccatgatcattccctctttttggatgtataagaaccttccggacaacagaacctatttctggaattgcagaagataacatatttcccttattttgacttaatcaccataaaccatacctatttaaaaaanaaaaaaaaaaaaaactcgagggggggcccggtacccaattcgccctatagtgagtcgattacaattcacttgccgtcgtttacaacgtcgt

SEQ ID NO: 10338 - DNA, 1017 bp, Homo sapiens
  misc_feature 1, 2, 3, 1016, 1017: n = A,T,C or G
nnncaaggtgcacctaatccgaatgccgcggacttcagcagacccggccactggccctcacttcattcccccgggaggaaagaccaaagtgaataaacagcttcaagtgcccaaggaaatgcttgctagacagctgtgattctcaactttaaagaattacttttcaaaaagattctagggttaaattgctatagaactttattatctaacaacattattattattgagaagagcaagataagatatttgccagttctgcttgaatctttgcctggaggaggaaaaatgtttcattgtgcaggaaatgtataaggaagccttacctcccttttctcatctcttgaggacttaaaagtggaaataacaatggttagggaaagatttcagctgtaaagaatggttttctagttttcttgaaatttgtcctgaacattaccttcacagagtaaaactgtgctactgtcaatcttagaccatttgattgttgtcactgaatttgccataatctgtagactaaaactcacataccacccttctcttaccacagaggtatcactattacaaagaatcctttccctactcattcatattcatcaaagaactactttaattttagtagcgttcaaaatctggtttgagtggctctcttactttggttctccttaatgattgcatggtaatcttgttggctactgcatttgttagtacttgttcttagggagccatgtaacttgttttcattattagatcttagtactgttcactacacacttaaaaaatgagtgtcaagtgcctttaggggaagaacactctgcctgcatgaaaatgtcttaaaactgaaggaaaatttcaagaacgctcttgatcagaagtccagactgtaaacataatcgctgggtcatgtcacttggaaccagtactcacatgaggcaccaaataaaggagatgatttaccttggcttccgcctcctcttcagcaaccagggcatccatccccaagcgctgtcttaactccnn

SEQ ID NO: 10339 - DNA, 1303 bp, Homo sapiens
  misc_feature 1297, 1298, 1299, 1300, 1301, 1302, 1303: n = A,T,C or G
cacagtttggaagggagagcactttattacagaccttggaagcaagaggattgcattcagcctagttcctggttgctggccaaagggatcatggacattgaagcatattttgaaagaattggctataagaactctaggaacaaattggacttggaaacattaactgacattcttgagcaccagatccgggctgttccctttgagaaccttaacatgcattgtgggcatgccatggacttgggcttagaggccatttttgatcacagttgtgagaagaaatcggggtggatggtgtctccaggtcaatcatcttctgtactgggctctgaccactattggttttgagaccacgatgttgggagggtatgtttacagcactccagccaaaaaatacagcactggcatgattcaccttctcctgcaggtgaccattgatggcaggaactacattgtcgatgctgggtttggacgctcataccagatgtggcagcctctggagttaatttctgggaaggatcagcctcaggtgccttgtgtcttccgtttgacggaagagaatggattctggtatctagaccaaatcagaagggaacagtacattccaaatgaagaatttcttcattctgatctcctagaagacagcaaataccgaaaaatctactcctttactcttaagcctcgaacaattgaagattttgagtctatgaatacatacctgcagacatctccatcatctgtgtttactagtaaatcattttgttccttgcagaccccagatggggttcactgtttggtgggcttcaccctcacccataggagattcaattataaggacaatacagatctaatagagttcaagactctgagtgaggaagaaatagaaaaagtgctgaaaaatatatttaatatttccttgcagagaaagcttgtgcccaaacatggtgatagattttttactatttagaataaggagtaaaacaatcttgtctatttgtcatccagctcaccagttatcaactgacgacctatcatgtatcttctgtacccttaccttattttgaagaaaatcctagacatcaaatactttcatccataaaaatgtcagcatttattaaaaaacaataactttttaaagaaacataaggacacattttcaaattaataaaaataaaggcattttaaggatggcctgtgattatcttgggaagcagagtgattcatgctagaaaacatttaatattgatttattgttgaattcatagtaaatttttactggtaaatgaataaagaatattgnnnnnnn

SEQ ID NO: 10340 - DNA, 249 bp, Homo sapiens
acaactttaaactgtattgtattcatgttgctaaacaatattggccttctcgatgattttattcatgttgctccaaagttaaaaccctgtagaactaagtaggtgaagagatattttgtataagtgccacagaagagaaaatataataaattaaatagtgatcgagcggccgcccgggcaggtaccagcagaaacctggccaggctcccaggctcctcatctatggtgcatccaccagggccactggta

SEQ ID NO: 10341 - DNA, 845 bp, Homo sapiens
  misc_feature 841, 842, 843, 844, 845: n = A,T,C or G
agaaatagcagtcagtaccatttttatgttgactataatgattcattttcacaaaaacattgtatgatactaacttgaaatgtgctattcatagcttttatgtgcatatttggaaattgttttggtattgtatttgaaataagatctggaagcaagggaatagtttatccttatccgtagttgtatttttctatatttcagtaacaatataataagtcagtcggtggagggtgtttcacaaaaccttttttctgtcttcataaggggtttatacataggttaagtttcagaaacgttacagagtccttagatccttacgtgatgattatgtgttcagttgttttacctattagactgtaaactccttataatctagtaaaggcatagattatattttattcatccttgcagtttcattagagtctgtctcagtactttttcctagtagtgacccagtaaatatctatgcaacaaacttggctttgctggtgtgcaaagtgtaatataaggaaaattagtgacatttttttgccttttagtgtgtaaactggaatgtatagtatagaaaacagagagatagtatatattttaacaacttgaaattcataggtgttaatagattcctctttttgaaattaaaatatctcctaggattttgatcacttacagtgttgtatgcactaccttaattagataatccagtttttggccttttcttagctgagatctgtagagtggcgacagagaatgaatgatttcctggcagggtagaaactaagcaaggagaatgtaaccagagtgcttcagggaacaagacattgcatcattgcaaaaatgtaannnnn

SEQ ID NO: 10342 - DNA, 1969 bp, Homo sapiens
  misc_feature 1, 2, 1969: n = A,T,C or G
nnagtggctgccccacaaaatgcctgcttctctgcggaatcctactgttcttcacatgctctctaataccatcttttcatatccactttctcttccatgttgaaaaattaaattgacaggctggattctgcaaagatctttggacatttaagtatcttcgaccggcgcgaaaagaggcggcctgaccttggaacggctgcgggaagacgtccgacggggccttccggcgggtgacattcagccggcggttcggggcgacggactctccattccagaaccatggcccaatttgtccgtaaccttgtggagaagaccccggcgctggtgaacgctgctgtgacttactcgaagcctcgattggccacattttggtactacgccaaggttgagctggttcctcccacccctgctgagatccctagagctattcagagcctgaaaaaaatagtcaatagtgctcagactggtagcttcaaacagctcacagttaaggaagctgtgctgaatggtttggtggccactgaggtgttgatgtggttttatgtcggagagattataggcaagcggggcatcattggctatgatgtttgaagaccaatctttaacatctgattatatttgatttattatttgagtgttgttggaccatgtgtgatcagactgctatctgaataaaataagatttgtcaaaactcagtgttttctccatcagatactccatgaaaggtcacaatttctcttgatattaagctgggttgtctttaaacaaccctaaatacacgtctgtttagcccgcaattggaaaggatatatgtggcaatattaacctggtacatgaatacaacggccgacgcagaaggagccacaaacacacgacaccagggcaaccacaaccggccgcaacacacagaagcaccgggcacaagaccggcgcgaccaacacaccgcggccgtacgacgagagtaatatcgcgagggagattcggcacgagggcagcaaagggagaagcaaggacaacagacagcactgcagaagaacggacaagtacgagaagcgagagcaggagagacgagacgaacgatagggccgcaggaccgacggacagagagaacaggacagcaacggacgaacgcaagacacgcagcgaggcaggcccccaaggccaccgacacacgcagaagcaggataagggagaggggggaggagggtggaaggtgagagcgcgggggggtggaggtgcgatgagcgggcgagacacggacgcgaagagaccagcggccagtgacgcacaggcggagcggggcaggcaacggccaacaacacgcacgcagacgaaaaacgacctagcagcacgcgacagacaacggagcggaacacgcagcagagcgatagaagcacgagaagggagaccaggcaccggcggcgacccgcgcacacggacacacaccagcgcgcgcacacacaacaggacacacacaccacacgaacacagacgagagcaagacgacggacagcacgacacaaccacatagggagacaggagacgacgagcaacacgagcagcaaaagagaccaggagagcagcagagacgggacgagagcgagaccacgggagagagagaaggcacacacgcagaaccacgcgcgacatcgaccgagaggaggaccacgggcgagcagcgcgtagggccagacagagcgcgcgaggcgaagcggcccacaagccacgagcaccaggcgagaacgcacacagcggcgacgacgacgcacggccgccgcaccgacgccagcaccgcacacgcaacagccagcaaacgcgcaccaaccagacagacacaccaccagagaccagcacaaacggcgcaggagcgcacgcaaagcgcaacagtgcagcgagaccaccacccacgggcgaacagcaacgcgcagagcgagaacgggacgcaggagacccgactacgaacaccn

SEQ ID NO: 10343 - DNA, 2607 bp, Homo sapiens
  misc_feature 1, 2579, 2580, 2581, 2582, 2583, 2584, 2585, 2586, 2587,2588, 2589, 2590, 2591, 2592, 2593, 2594, 2595, 2596, 2597,2598, 2599, 2600, 2601, 2602, 2603, 2604, 2605, 2606, 2607: n = A,T,C or G
nacagagaagcggctcccgtcggaggccgagtcgtcgccacgatcgcccccttggtggactcgcaggccgagcggcttccccgcagagctcgaggagggcagacggcggcgggggcgccatgagtcagaggcaggtgctgcaagtgttcgagcaataccagaaggccaggacccagttcgtgcagatggtggcggagctggcgactagaccccaaaacatcgagacgctgcagaacgcgggtgtaatgtctttgctgagaactcttcttctggacgtggtcccaacaattcaacagactgctgctttggctcttgggagactggccaattataatgatgacctagcagaagctgttgtgaagtgcgacattcttccacagcttgtttattcattggcagaacagaatcgcttctacaagaaagcagctgcctttgtgttacgagcagttggtaaacattctccccagctagctcaggcaatagtcgattgtggagcactggatacgctggtcatatgcttggaagattttgaccctggagtcaaggaggctgcagcctgggcacttagatatattgcaagacataatgcagaactgtcacaagctgtggtggatgcaggagctgttcctcttttagtactctgtatccaggagccagaaattgctttgaaaaggattgctgcttcggccctcagtgatattgcaaagcattctccagagttagcacagacagtagtggatgcaggagctgttgctcatttagcccagatgatcctgaaccctgatgctaaattgaagcatcagatcctttcagctctcagtcaggtttcaaaacattccgtggatctggcagaaatggttgttgaagcagagatttttccagttgtacttacctgtctgaaggacaaggatgaatacgtgaagaaaaatgcttctactttaattagagagattgcaaaacatacacccgagctttcacagctggtagttaacgcaggaggggttgctgccgtgattgactgcattgggtcctgcaaagggaacacacggctgcctggcatcatgatgcttggttatgtagcagctcattctgagaacctagcaatggcagtcatcatttctaagggtgtaccccagttgtcagtctgcttgtcagaagaaccggaagatcatattaaggctgcagctgcttgggccttaggacagattggaagacacactcctgaacacgcacgggctgttgcagtcacaaatactttgccagttctgctttctttgtacatgtcaacagaaagttctgaggatctccaagtaaaaagtaaaaaagccataaagaatatcctgcaaaaatgtacctacttaccagcccttgaaccatttctatatgatgctcctcccaatattctgaaacatgtggttggacagttcagtaaggtgctgccgcatgatagcaaagctcgacgactttttgtaacaagtggtggccttaaaaaagttcaagagataaaagcagaacctggttctctccttcaagaatacatcaacagtattaacagttgttaccccgaggaaatagtgaggtattattcccctggatattcagatacacttctgcagagggtggacagctatcaaccacttaataactgagcaaagttatattgtgatactcaaattcacagcagagtagttttgagtaacagtaattaaatccttctaaatatttgaactaagtatattctagatttatttaatgggaaatacctttagataatattttctaaatttatgtaatactttaaacattcgtagcttgaatatgtgaggaactattcatggtcattcgcatgcataggatttgttctacaggtagattttaaaaacacgttaaagggccttaaggcattttgttattctgttaaaaaccacacacactcgtacatgcagacacctccaatgagatatagttaagagatggcattcaaaaaccctaaattattctagccaatttgtcataggcataggcaaggaaagctggccttgctaactatatagtagtatacacaagagaaatctttgaaggaggaaactgatgacagatatacagggcacttgaaggagactctgatgctagttatataagtgcattaacttaagacacggactctgtgggtaacctgttaggttttactaagaatttaggaaaaatttactcctctttatcacaagttttccaaacctccttccccaccctatctaaagtgttccttacctttcatgggcccagcgagggtagaattcagaatagagagttatactcctgcatacatgctctccctctcattgaaaggtttcttagtctagctctgctcatgaatgaacaaagaagcaggcatgtaaaatggatccttgtcctaacgtcactttcccaagtttcaaaagtcacattttcaggtatttaaggaatagtttgaagctaataccatcaggctcagagtttacatgcatttttacttaggaagtggtaaacgggtgaaagagggtttcaataaaattttaaataaaaacagcaaaaaaaannnnnnnnnnnnnnnnnnnnnnnnnnnnn

SEQ ID NO: 10344 - DNA, 2330 bp, Homo sapiens
  misc_feature 1, 2, 3, 4, 5, 6, 7, 2308, 2309, 2310, 2311, 2312, 2313,2314, 2315, 2316, 2317, 2318, 2319, 2320, 2321, 2322, 2323,2324, 2325, 2326, 2327, 2328, 2329, 2330: n = A,T,C or G
nnnnnnncgcggagtcggcggggcctcgcgggacgcgggcagtgcggagaccgcggcgctgaggacgcgggagccgggagcgcacgcgcggggtggagttcagcctactctttcttagatgtgaaaggaaaggaagatcatttcatgccttgttgataaaggttcagacttctgctgattcataaccatttggctctgagctatgacaagagaggaaacaaaaagttaaacttacaagcctgccataagtgagaagcaaacttccttgataacatgcttttgcgaagtgcaggaaaattaaatgtgggcaccaagaaagaggatggtgagagtacagcccccaccccccgtccaaaggtcttgcgttgtaaatgccaccaccattgtccagaagactcagtcaacaatatttgcagcacagacggatattgtttcacgatgatagaagaggatgactctgggttgcctgtggtcacttctggttgcctaggactagaaggctcagattttcagtgtcgggacactcccattcctcatcaaagaagatcaattgaatgctgcacagaaaggaacgaatgtaataaagacctacaccctacactgcctccattgaaaaacagagattttgttgatggacctatacaccacagggctttacttatatctgtgactgtctgtagtttgctcttggtccttatcatattattttgttacttccggtataaaagacaagaaaccagacctcgatacagcattgggttagaacaggatgaaacttacattcctcctggagaatccctgagagacttaattgagcagtctcagagctcaggaagtggatcaggcctccctctgctggtccaaaggactatagctaagcagattcagatggtgaaacagattggaaaaggtcgctatggggaagtttggatgggaaagtggcgtggcgaaaaggtagctgtgaaagtgttcttcaccacagaggaagccagctggttcagagagacagaaatatatcagacagtgttgatgaggcatgaaaacattttgggtttcattgctgcagatatcaaagggacagggtcctggacccagttgtacctaatcacagactatcatgaaaatggttccctttatgattatctgaagtccaccaccctagacgctaaatcaatgctgaagttagcctactcttctgtcagtggcttatgtcatttacacacagaaatctttagtactcaaggcaaaccagcaattgcccatcgagatctgaaaagtaaaaacattctggtgaagaaaaatggaacttgctgtattgctgacctgggcctggctgttaaatttattagtgatacaaatgaagttgacataccacctaacactcgagttggcaccaaacgctatatgcctccagaagtgttggacgagagcttgaacagaaatcacttccagtcttacatcatggctgacatgtatagttttggcctcatcctttgggaggttgctaggagatgtgtatcaggaggtatagtggaagaataccagcttccttatcatgacctagtgcccagtgacccctcttatgaggacatgagggagattgtgtgcatcaagaagttacgcccctcattcccaaaccggtggagcagtgatgagtgtctaaggcagatgggaaaactcatgacagaatgctgggctcacaatcctgcatcaaggctgacagccctgcgggttaagaaaacacttgccaaaatgtcagagtcccaggacattaaactctgataggagaggaaaagtaagcatctctgcagaaagccaacaggtactcttctgtttgtgggcagagcaaaagacatcaaataagcatccacagtacaagccttgaacatcgtcctgcttcccagtgggttcagacctcacctctcagggagcgacctgggcaaagacagagaagctcccagaaggagagattgatccatgtctgtttgtaggacggagaaaccgcttgggtaacttgttcaagatatgatgcatgttgcttctaagaagccctgtatattgtgatgcttcgaatagcaaagaaggccacacttgggccaagataaaacggaatacggggcaagaaaaaccagcagcaaaagaagaagagaacaaacgaagaagaagaccaaaactgaagcgcgaagagtgcagaacgcaagagacacacaaagcactacacggcacacgcgcgacaaaccgcacagaacaccaagaagggacgagaaggagacaaaacaagaacaaagaagaagacgacaaaagcgannnnnnnnnnnnnnnnnnnnnnn

SEQ ID NO: 10345 - DNA, 1375 bp, Homo sapiens
gcgtccggtcagggactaacaccaagaaggccctccaggcagtgtacagcatgatgagctggccagatgacgtccctcctgaaggctggaaccgcacccgccatgtcatcatcctcatgactgatggtcagaagggacctctctcctgtcccagcctccccaccttctcagaccagcatgtggcccttaagtccacttgtaacactatacccatggttggggccctgaatgtgactcatagctggctgttcatctctcctgtgacccttcataaggaattcttcctaagccctgtgatcaactatctctaacccttcctcaacttgctcaccctgccatgtgtatccctgcctttagccagtttatcttccttatctcctaccctcatggtcctgtctcttctgcaggattgcacaacatgggcggggacccaattactgtcattgatgagatccgggacttgctatacattggcaaggatcgcaaaaacccaagggaggattatctggatgtctatgtgttgggtcgggccttggtgaccaagtgaacatcagtgcttggcttccaagaaagacaatgagcaacatgtgttcaaagtcaaggatatggaaaacctggaagatgtttgctaccaaatgatcgatgaaagccagtctctgagtctctgtggcatggtttgggaacacaggaagggtaccgattaccacaagcaaccatggcaggccaagatctcagtcattcgcccttcaaagggacatgagagctgtatgggggctgtggtgtctgagtactttgtgctgacagcagcacattgtttcactgtggatgacaaggaacactcaatcaaggtcagcgtaggaggggagaagcgggacctggagatagaagtagtcctatttcaacccaaatacaacattaatgggaaaaaaagaagcaggaattcctgaattttatgactatgacgttgccctgatcaagctcaagaataagctgaaatatggccagactatcaggcccatttgtctcccctgcaccgagggaacaactcgagctttgaggcttcctccaactaccacttgccagcaacaaaaggaagagctgctccctgcacaggatatcaaagctctgtttgtgtctgaggaggagagtgagagagatgctcaatatgccccaggctatgacaaagtcaaggacatctcagaggtggtcacccctcggttcctttgtactggaggagtgagtccctatgctgaccccaatacttgcagaggtgattctggcggtcccttgatagttcacaagagaagtcgtttcattcaagttggtgtaatcagctggggagtaggatgtatgcaaaaccataacgaaaagcagg

SEQ ID NO: 10346 - DNA, 150 bp, Homo sapiens
  misc_feature 1, 2, 3, 4, 6, 150: n = A,T,C or G
nnnnangctcctcatctatgatgcatccaacattttcactggcatcccagccaggttcaggggcagtgggtctgggacagactgcactctcaccacagcagctagagcctgaagatttgagggattactgtcagcagcgtaacaactcgn

SEQ ID NO: 10347 - DNA, 1223 bp, Homo sapiens
  misc_feature 1, 2, 3, 1223: n = A,T,C or G
nnnccgccaactttttttttctgtgctgcagggatagtggttcttgttcttcaccgcaggagaagatacaaaaagaaacaagtagatgagcaaatgagagacaacagtcctgtgcatcttcagtacagcatgtatggccataaaaccactcatcacactactgaaagaccctctgcctcactctatgaacagcacatggtgagccccatggttcatgtctatagaagtccatcctttggtccaaagcatctggaagaggaagaagagaggaatgagaaagaaggaagtgatgcaaaacatctccaaagaagtcttttggaacaggaaaatcattcaccactcacagggtcaaatatgaaatacaaaaccacgaaccaatcaacagaatttttatccttccaagatgccagctcattgtacagaaacattttagaaaaagaaagggaacttcagcaactgggaatcacagaatacctaaggaaaaacattgctcagctccagcctgatatggaggcacattatcctggagcccacgaagagctgaagttaatggaaacattaatgtactcacgtccaaggaaggtattagtggaacagacaaaaaatgagtattttgaacttaaagctaatttacatgctgaacctgactatttagaagtcctggagcagcaaacatagatggagagtttgagggctttcgcagaaatgctgtgattctgttttaagtccataccttgtaaataagtgccttacgtgagtgtgtcatcaatcagaacctaagcacagcagtaaactatggggaaaaaaaaagaagaagaaaaagaaactcagggatcactgggagaagccatggcattatcttcaggcaatttagtctgtcccaaataaaataaatccttgcatgtaaatcattcaagggttatagtaatatttcatatactgaagagggtctcataaggaggtcctcttgcacatctaaaaaaggtgaccatttagagtatccggaattttcttgaattggtttccctatagattaattacaattggtttcatcattaaaaccatactggttttgtgtataatatgggagggattcctggtttaccaggttgtttaaaatgggtgttgtcacctacctaatttttgggaaatggaagaatgtgaaaaaagagaaatattgaaaagagttaaaaaacaaaaatgtgcggggggaaagaaaaaan

SEQ ID NO: 10348 - DNA, 3184 bp, Homo sapiens
  misc_feature 1, 2, 3, 3184: n = A,T,C or G
nnnacgcgtgggtcttcccccacctgccacgtacagagcccaagttctcgctaggcttgtgggtcagcgcgattggccggggcccgcgcgagcctgcgagcgagctgggactcttcggcctaggcagccgggacccagccagccctgcgcctcgcgccgtcgcgcatgcgtcctggtctttctctagagttgtatatatagaacatcctggagtccaccatgaacggacagttggatctaagtgggaagctaatcatcaaagctcaacttggggaggatattcggcgaattcctattcataatgaagatattacttatgatgaattagtgctaatgatgcaacgagttttcagaggaaaacttctgagtaatgatgaagtaacaataaagtataaagatgaagatggagatcttataacaatttttgatagttctgacctttcctttgcaattcagtgcagtaggatactgaaactgacattatttgttaatggccagccaagaccccttgaatcaagtcaggtgaaatatctccgtcgagaactgatagaacttcgaaataaagtgaatcgtttattggatagcttggaaccacctggagaaccaggaccttccaccaatattcctgaaaatgatactgtggatggtagggaagaaaagtctgcttctgattcttctggaaaacagtctactcaggttatggcagcaagtatgtctgcttttgatcctttaaaaaaccaagatgaaatcaataaaaatgttatgtcagcgtttggcttaacagatgatcaggtttcagggccacccagtgctcctgcagaagatcgttcaggaacacccgacagcattgcttcctcctcctcagcagctcacccaccaggcgttcagccacagcagccaccatatacaggagctcagactcaagcaggtcagattgaaggtcagatgtaccaacagtaccagcaacaggccggctatggtgcacagcagccgcaggctccacctcagcagcctcaacagtatggtattcagtattcagcaagctatagtcagcagactggaccccaacaacctcagcagttccagggatatggccagcaaccaacttcccaggcaccagctcctgccttttctggtcagcctcaacaactgcctgctcagccgccacagcagtaccaggcgagcaattatcctgcacaaacttacactgcccaaacttctcagcctactaattatactgtggctcctgcctctcaacctggaatggctccaagccaacctggggcctatcaaccaagaccaggttttacttcacttcctggaagtaccatgacccctcctccaagtgggcctaatccttatgcgcgtaaccgtcctccctttggtcagggctatacccaacctggacctggttatcgataaggaggctcctctacaccaattaatgtagctgctagctattggcctcccaaaagactccagtactatttatatatctctgtattgaagaagttcagaaatttaacagatgcagacgccatttttctactgcatatcactctgctcgcggtgctcaatgggcccacgctcatacacttggcctggcaaccacaacaggaccgacaacatggacccagtcaatatttcccctaccccttgtcttttaaacaacattgtcacgacaagcctatcctataagctttcactttgtggggacaccacttaaactaccttaaacactgattactcaacagtgtcggcacttcggcactttgtaggaacccttattaccatataaggtcctttatcgcagccatttatggcatcccggggaagcaacggacacatttactttctaacacacgactttgggcctattagggtgtcttaggaaagcgggctatatacaacggccccccaaatcccgtatataacacatttgcggtagccccttcatacttatgacactataacgttcaagacgccactttgcaacttgtgttactctttacaaccacgggcatcagcagagaaggcccccaccttcttgcgggaacgacccaagactttaaccacagctggacaactcgatttgtgaatttggctttaccttaacacgaatgtcgggtgcaccaccactccttggaccactggacacttaacggtcgattctccacaacgtcgaagccacaggccatttgaccgttgttgggaacatcctttgcctcgaggagacaacaccaccgcgacaacgaagtagctgaatccgtcactgaacagctagtgtgcacatatcaatcatcacgaccgacatctacgaccatgctgacggcacgctaacgtactttatacgtcagcgcccacactcctcgagagaccaaaaacagaccgtacttcctacaaaaacagcaccaacaaccaagccgcggtagtaagcagcggaacagactaggctgagacaacgaccaacgactaaaagagcgaactactcgagctaagactcaccacccgtgagctgccgaccaacagagcacgtgacagcttccctacacccacacaagcggaagaaaacaccactacgggcggacaccacagacaacaccaaacacacgagcggccagcgaagacaagcaaactacaaccctacaggcaacaactaataaacacagaacaggagagccccgcgggggctcgccatacaccaccaggcagagccaagcttagatcagagaagacacaacaccaccaagcccactgcggactacccacacaggcagcgagcacaacacacgcctgagtgagcgcacaataaccagactagcgggcggcctatacacaagcaggcggcgctcacagccaatcaaaatacggcccctcgcgacgcagccgtcagtgctggggagcccacaccactacgtaccgagccgccagacagacgagacagaggcaggacctgaactgacgtcgacagccgccgatcccagtcgacatgctgcactagcgtaccgagcgactacgactagcgagacatcctagaccgcctcgcaccacgcgtcagcaggttagccagtccacgactcaccgcccacggctagaacgtcagcctagacgacagcgacacgcagcacagtgcgcgacgtcacagctgactacgcaaagtagcacgagccgcgtacgcagcagn

SEQ ID NO: 10349 - DNA, 3230 bp, Homo sapiens
  misc_feature 3212, 3213, 3214, 3215, 3216, 3217, 3218, 3219, 3220, 3221,3222, 3223, 3224, 3225, 3226, 3227, 3228, 3229, 3230: n = A,T,C or G
ggcggctgcggctgcggctttgcctcggcgcgacagttgttcagattcccaggctgacaaaaaggagaaacagcttttacttgcatccagggccaatcatcgcagacccagacgtctgcagaggggaaaataaaagaagcaaaaacaggccctgctgtgagggaccacgaggcagtgccaggatgaaagagttggagtaacctaggtgattctgagtgaatcagtcaggaggccttcctggagggggctgaggccccagcttgtggccaccacaacgtatcaagctatctccagggttgggctcaggactcagagctgacgcagctggggtgccccttggttctggaggatgaggctcctccgcagacgccacatgcccctgcgcctggccatggtgggctgcgcctttgtgctcttcctcttcctcctgcatagggatgtgagcagcagagaggaggccacagagaagccgtggctgaagtccctggtgagccggaaggatcacgtcctggacctcatgctggaggccatgaacaaccttagagattcaatgcccaagctccaaatcagggctccagaagcccagcagactctgttctccataaaccagtcctgcctccctgggttctataccccagctgaactgaagcccttctgggaacggccaccacaggaccccaatgcccctggggcagatggaaaagcatttcagaagagcaagtggacccccctggagacccaggaaaaggaagaaggctataagaagcactgtttcaatgcctttgccagcgaccggatctccctgcagaggtccctggggccagacacccgaccacctgagtgtgtggaccagaagttccggcgctgccccccactggccaccaccagcgtgatcattgtgttccacaacgaagcctggtccacactgctgcgaacagtgtacagcgtcctacacaccacccctgccatcttgctcaaggagatcatactggtggatgatgccagcacagaggagcacctaaaggagaagctggagcagtacgtgaagcagctgcaggtggtgagggtggtgcggcaggaggagcggaaggggttgatcaccgcccggctgctgggggccagcgtggcacaggcggaggtgctcacgttcctggatgcccactgtgagtgcttccacggctggctggagcccctcctggctcgaatcgctgaggacaagacagtggtggtgagcccagacatcgtcaccatcgaccttaatacttttgagttcgccaagcccgtccagaggggcagagtccatagccgaggcaactttgactggagcctgaccttcggctgggaaacacttcctccacatgagaagcagaggcgcaaggatgaaacataccccatcaaatccccgacgtttgctggtggcctcttctccatccccaagtcctactttgagcacatcggtacctatgataatcagatggagatctggggaggggagaacgtggaaatgtccttccgggtgtggcagtgtgggggccagctggagatcatcccctgctctgtcgtaggccatgtgttccggaccaagagcccccacaccttccccaagggcactagtgtcattgctcgcaatcaagtgcgcctggcagaggtctggatggacagctacaagaagattttctataggagaaatctgcaggcagcaaagatggcccaagagaaatccttcggtgacatttcggaacgactgcagctgagggaacaactgcactgtcacaacttttcctggtacctgcacaatgtctacccagagatgtttgttcctgacctgacgcccaccttctatggtgccatcaagaacctcggcaccaaccaatgcctggatgtgggtgagaacaaccgcggggggaagcccctcatcatgtactcctgccacggccttggcggcaaccagtactttgagtacacaactcagagggaccttcgccacaacatcgcaaagcagctgtgtctacatgtcagcaagggtgctctgggccttgggagctgtcacttcactggcaagaatagccaggtccccaaggacgaggaatgggaattggcccaggatcagctcatcaggaactcaggatctggtacctgcctgacatcccaggacaaaaagccagccatggccccctgcaatcccagtgacccccatcagttgtggctctttgtctaggacccagatcatccccagagagagcccccacaagctcctcaggaaacaggattgctgatgtctgggaacctgatcaccagcttctctggaggccgtaaagatggatttctaaacccactgggtggcaaggcaggaccttcctaatccttgcaacaacattgggcccattttctttccttcacaccgatggaagagaccattaggacatatatttagcctagcgttttcctgttctagaaatagaggctcccaaagtagggaaggcagctgggggagggttcagggcagcaatgctgagttcaagaaaagtacttcaggctgggcacagtggctcatgcctgaaatcctagcactttgggaagacaatgtgggagaatggcttgagcccaggagttcaagaccggcctgagcaacatagtgaggatcccatctctacgcccaccctccccccggcaaaaaaaaaagctgggtatggtggcttatgcctgtagtcgcagctactcagaaggctgaggtgggaggattgcttgttccccggaggttgaagctacagtgagccttgattgtgtcactgcactccagcctgggcaacaggtaagactctgtctcaaaaaaaaaacaaaaaagaagaagaaaagtacttctacagccatgtcctattccttgatcatccaaagcacctgcagagtccagtgaaatgatatattctggctgggcacagtggctcacacctgtaatcctagcactttgggaggccaaggcaggtggatcacctgaggtcagaagtttgaaaccagcctggactacatggtgaaactccatctctactaaaagtacaaaaattagctgggcatgatggcacgcacctgcagtcccagctacttgggaggctgaggcaggagaatcactcgaacccaggaggcagaggttgcagtgagccaagacagcaccattgcaccccagcctgagcaacaagagcgaaactccatctcannnnnnnnnnnnnnnnnnn

SEQ ID NO: 10350 - DNA, 1211 bp, Homo sapiens
  misc_feature 1, 1206, 1207, 1208, 1209, 1210, 1211: n = A,T,C or G
nggctaaacgcgagctggggtattctcttcttccggccgggccgagaggtggttacattcgttgaaggacaccagctgcggaatttgcggctttggcagattgaaatcatggcaggtccagaaagtgatgcgcaataccagttcactggtattaaaaaatatttcaactcttatactctcacaggtagaatgaactgtgtactggccacatatggaagcattgcattgattgtcttatatttcaagttaaggtccaaaaaaactccagctgtgaaagcaacataaatggattttaaactgtctacggttcttaacctcatctgttaagttcccatgcctggagaagctaatgccaactcatcatgtgataattcaatttgtacaataaattatgaacccggaaaaagaaaaaaaaaaaaaaaaaaacaacaaacaccacaccaacacaaaaacaaagcaaaaaaaaaaaaacacacaacagcgggcgaacaaaacaagaactaccgcggggcgccccacacagaaaacgcacaccgaccctctccccaaaaagcaccccccaaaacacaaggacaccaccccaacaccacccaccccgaccagcaaccgcacacccacacacaaacaacgcgaacacgaaacaacccacaacaccaccacaaccacacgacaccaacacaaccacacaacaccacgagcgccaccacacaaaacgcgccgaaacacacacaccacacccccacaccccccccccacacgccccacaccacacacacacccaccagcaacaacacgcgcgcaaaaacaaaacgacaaacccaccaccagcgcgaccagacgaccaccgcccacccccggcccacccgacaagcaaacaccacaatcaaacccgaggcaggcaccagaaaaacaacacagacaaccccccacaaccaccacaaccactaccaccacgcgcagcacccaccaacacaacacgcacgagcgcccgcaagacaaagcgccacgagcccccagagcaacaagaggacggagagcagagaagacacgcgaagacaacaacaaacaaaagcgacaccgcaacacgagacgcaaccgcagacccaccgccgcgccaccgcagccgaaccagcagcgaacacagcgcagaaaccaacacacacaagcgaaagcccgcacacgcaggagaggagaagaggaaagcannnnnn

SEQ ID NO: 10351 - DNA, 795 bp, Homo sapiens
  misc_feature 1, 791, 792, 793, 794, 795: n = A,T,C or G
nacccacgcgtccgaataacagaagtatcaagccatgtgctttagcataaaagaatatttagaaaaacatcccaagaaaatcacatcactacctagagtcaactctggccaggaactctaaggtacacactttcatttagtaattaaattttagtcagattttgcccaacctaatgctctcagggaaagcctctggcaagtagctttctccttcagaggtctaatttagtagaaaggtcatccaaagaacatctgcactcctgaacacaccctgaagaaatcctgggaattgaccttgtaatcgatttgtctgtcaaggtcctaaagtactggagtgaaataaattcagccaacatgtgactaattggaagaagagcaaagggtggtgacgtgttgatgaggcagatggagatcagaggttactagggtttaggaaacgtgaaaggctgtggcatcagggtaggggagcattctgcctaacagaaattagaattgtgtgttaatgtcttcactctatacttaatctcacattcattaatatatggaattcctctactgcccagcccctcctgatttctttggcccctggactatggtgctgtatataatgctttgcagtatctgttgcttgtcttgattaacttttttggataaaaccttttttgaacacaattaaataataaatgtcgacgcggccgcgaatttagtagtagtaggcggccgctctagaggatccaagcttacgtacgcgtgcatgcgacgtcatagctcttctatagtgtcacctaaannnnn

SEQ ID NO: 10352 - DNA, 279 bp, Homo sapiens
actccaggcgagaggcggacgcgagtcgtcgtggcaggaaaagtgactagctccccttcgttgtcagccagggacgagaacacagccacgctcccacccggctgccaacgatccctcggcggcgatgtcggccgccggtgcccgaggcctgcgggccacctaccaccggctcctcgataaagtggagctgatgctgcccgagaaattgaggccgttgtaccgtatataaaagacaattgctcacaatgatagcactgaagcactgagagatatcaaagt

SEQ ID NO: 10353 - DNA, 402 bp, Homo sapiens
  misc_feature 1, 2, 3, 4, 5, 6, 7, 8, 389, 390, 391, 392, 393, 394, 395,396, 397, 398, 399, 400, 401, 402: n = A,T,C or G
nnnnnnnnggcggctacctggtcaaggcagaacagaagcgtggtaagcggcagggtacgcgggagatgaaggtgcgcatcctctccgagcgtaagaagcctctggacattgactacatgggggaggaacagctccgggagaaagcccaggagctgtcggactggatccaccagctggagtctgagaagttcgacctgatggcgaagctgaaacagcagaaatatgagatcaacgtgctgtacaaccgcatcagccacgcccagaagttccggaagggggcagggaaagggccgcgttggaggccgctggaagtgaggatgccgccccggacagtggcacctgggaaagcctgggagtgtttgtcccatccggtagcttgaaaataaaannnnnnnnnnnnnn

SEQ ID NO: 10354 - DNA, 2746 bp, Homo sapiens
  misc_feature 1, 2644, 2645, 2646, 2647, 2648, 2649, 2650, 2651, 2652,2653, 2654, 2655, 2656, 2657, 2658, 2659, 2660, 2661, 2662,2663, 2664, 2665, 2666, 2667, 2668, 2669, 2670, 2671, 2672,2673, 2674, 2675, 2676, 2677, 2678, 2679, 2680, 2734: n = A,T,C or G
  misc_feature 2735, 2736, 2737, 2738, 2739, 2740, 2741, 2742, 2743, 2744,2745, 2746: n = A,T,C or G
ncttccggctttcgctcgcttccatatccgctcctctagtcgccctccgctggccccgccttcgtccccggaagattgggtcctctggcgagccactgtttgccgtttgatcgggcaccaaataaagtttctttattcaaaagcactttttttttaaagccacaccacccccattctcagctcctccttcgcggcggtaccgcctctgtttctgcggcgattgaacagccgagctttgcggccgggatcgcggaaagtgatggctgtcgtcccggcgtctctctcaggacaggacgtgggatcatttgcatatcttacaattaaagacagaataccacagatcttaactaaggttattgatacattgcatcgacataaaagtgaattttttgagaaacacggagaggaaggcgtggaagctgaaaagaaagctatctctctcctttctaaattacggaatgaattgcaaacagataaaccatttatccccttggttgagaaatttgttgatactgatatatggaatcagtacctagaatatcaacagagtcttttaaatgaaagtgatggaaaatcaagatggttctactcaccgtggttgttggtagaatgttacatgtatcgaagaattcatgaagcaattatccagagtccaccaatcgattactttgatgtatttaaagaatcaaaagagcaaaatttctatgggtcacaggaatccatcattgctttatgtactcacctgcaacaattgataagaactattgaagacctagatgaaaatcagctgaaagatgagttttttaaacttctgcagatttcactgtggggaaataagtgtgatctgtctctctcaggtggagaaagtagttctcagaataccaatgtactaaattcattggaagacctaaaacctttcattttattgaatgatatggaacatctttggtcattgcttagcaattgcaagaaaacaagagaaaaagcttctgctactagagtgtatattgttctcgataattctggatttgagcttgttacagatttaatattagccgacttcttgttgtcctctgaactggctactgaggttcatttttatggaaaaacaattccatggtttgtttctgatactactatacatgattttaattggttaattgaacaggtaaaacacagtaatcataagtggatgtccaagtgtggggctgactgggaagagtatattaaaatgggtaaatgggtttaccacaatcatatattttggactctgcctcatgagtactgtgcaatgcctcaggttgcacctgacttatatgctgaactacagaaggcacatttaattttattcaagggtgatttgaattacaggaagttgacaggtgacagaaaatgggagttttctgttccatttcatcaggctctgaatggcttccatcctgcaccactctgtaccataagaacattaaaagctgaaattcaggttggtctgcagcctgggcaaggggaacagctcctggcctctgagcccagctggtggaccactggaaaatatggaatatttcagtacgatggtcccctttgacttgatttaggagctctcagttgcatagaaagatctggtgagcaccttttcatccccagaaaaggagcacgtgaattgagtcgcctggcggctctgtacgcgctcagggaagcttagcttcttggtgcccatctacgtgcactggatgatttttcttttgaacattttgccccactacactgttttggggatagctgggttaagcaagttaaagatatttacatttatattggaattttagcaactttttttcaggttaaatatataatttcaagtgcttttaatgaacttatttttaattggctagggagcaaaaaataagtgagttctgcttttagttagttaaccttgttcttttcttaaatagtacactgcatggtatttaatattccaggaagcatgggattttattttgcttgattttgggcacatgaaataatagctctaggaaaatgcgcatcttaatgactctttgtaaagagaggcatttcttacaactgtgatgtttgcttacataaaagttacctcataagttaattctaacttttattcttgaattttatttcatttcaatagcttgtttcatttgcacgcctttgtattttgattgacctgtagaatggatgttaggaaactcaaaattgaacacagtgaaacaaatggtatttgaagaaatgtaatatcttttatattctatttatgatatccataatcaaatgagattattttaccacataaatgttttaaatatcagatttttagtttgcagttttaggaaaatgctttagatagaaaaggttcttatgcattgaatttggagtactaccaacaatgaatgaatttattttttatattcttacacattttattggtcattgtcacagatagtaaatactaaaaatttcaggtcagtttgttttgaaactgaaattggaaataaatctggaaatgttttgttgcactaaaataataaaatgaattgtacaaaaaattgtgggtgggcgaaattaaaatgttgggggcaggagaaagggaggcagacggggagggtccaaagcnnnnnnnnnnnnnnnnnnnnnnnnnnnnnnnnnnnnngggggcccctttaaatttttttaaaaaaaaaccttccaaactttcccttgaacnnnnnnnnnnnnn

SEQ ID NO: 10355 - DNA, 265 bp, Homo sapiens
  misc_feature 264, 265: n = A,T,C or G
taccagaggccctggtggaggcaccatatatgaggagcctgggagcctggccaggtctctgttggtacctgcccgggcggccgctcgactgttggacttgaaccagcgcgcgttcaagaagttgccgggcaaccgcaccagcgccttcgtcgaactcgaccggccagccctgcgccccctgccggcggtgcgcatgcccatcgcgcgcttcaaacccgcccgggtcaacattgatttaccacgtcgagctcgacggccactacnn

SEQ ID NO: 10356 - DNA, 1660 bp, Homo sapiens
  misc_feature 1659, 1660: n = A,T,C or G
tagggagtcgacccacgcgtccggtctggtcgccaagatggcgtcctccgcctccgcccggactccggcagggaagcgagtgataaatcaggaagaattgcggcggttaatgaaggagaagcagcgtctgagcaccagtcggaaacggatagaatctccattcgcgaagtacaaccgtttggggcagctgagttgtgccctgtgtaacactccggttaagagcgagctcctgtggcagactcacgtcctgggaaagcagcaccgagagaaagtggccgagctgaaaggcgcgaaggaagccagccagggttcgtccgccagttcagcgcctcagtccgtcaagaggaaagcgccggacgcagacgaccaagatgtcaagagagcgaaggccaccttggtgcctcaggtacagccctccacatctgcgtggaccaccaactttgacaaaataggaaaggagttcattagagcgactcccagtaagccttcaggactcagtttactccccgattatgaagatgaggaggaggaggaagaggaggaggaaggagatggagaaagaaaaaggggggacgccagcaagccgctctccgacgcacagggcaaggagcactcagtttcctcttcacgggaggtaacaagtagtgtgctgccaaacgatttctttagtactaatcctcccaaggcccccataattcctcattcagggtcaattgagaaagcagaaatacatgaaaaagtggtggaaaggagagaaaacaccgcggaagcgttaccggaaggtttttttgacgaccctgaggtagatgcaagagtacgaaaggttgatgctccaaaagatcagatggacaaagagtgggacgaattccaaaaagccatgaggcaggtcaacactatttccgaagccatagttgccgaagaggatgaggagggacggttggaccgccagattggggagatcgatgagcagatagagtgttaccgacgggtggaaaagctacggaatcgccaggatgaaataaaaaataaacttaaagaaatcctgaccataaaagaactgcagaaaaaggaagaagagaatgctgacagcgatgatgagggggaactacaggatttgttgtctcaggattggagggtgaaaggggcattgttatagggttttaaagacccaaggtttctaacagcctctgctgttgtataaaaagtgctgtctctcagtagtatagcggttacttcatgcctcaagatttgggtacctggattgctaaactggattgttgagataaaatgagccagtgagctacagcactttggaaaatttgtgtaacatgtttttgaggtaaagttgtttttgaaatttctgaagtgttatataccaaaatgccaacttttccacgacagacttaactgtataatttcgttgtaaaatctgtaagttgtaaatattgtacatagttaaatctgtattctgttttgaatttttttaattaatagaaagaccaaccggcaaactttcagatgaatgcttactgtggtatttggaatgtatgtatcttctgaaccctacatcaagttgaaaaggttgtcgctagtaacttggtcggaaagggttttccgaacactcctaaaacatagtcatgtcgctacaccacacaacann

SEQ ID NO: 10357 - DNA, 1412 bp, Homo sapiens
  misc_feature 1, 1336, 1409, 1410, 1411, 1412: n = A,T,C or G
ncctcttctttattagaagccagcctgaatatttccacagtgccaggccactgaacagggtgttcagggtctcaacactagggtggcttaagtcttgtccccttcgaggaaagaaaaaatgggcagttttctctgagatgacctagctgtaggttccatgatctttccttcccatgtcctgtgacaggtaagacccagatccagtccgtggaaccatacacaaagcagcagctgaacaacatgtcatttgctgaaatcatcatgggctataagatcatggatgctaccaatatcctggtgtctccactggtctatctctatcctgacattcccaaggaggaggcattcggaaagtattgtcggccagagagccaggagcatcctgaagctgacccaggtagttgttgattttccatgttcctggcatttaatttttgggaaaagttggaaattttgggatccttggaggatagataggcaaatgcctgaataacctgggggataattatttctccttatgggaaagaattgtagtgagtgcttttgttggggtgaccgatgggatttgagaggagaatcagaatcacttagagtagtgtagttcctgctccacagagagtgcatgagtctaaagaggggatacagcctgggcaatatggtgaaacctcgtccctacaaaaaatccaaaaaaattacccggtgtggtggcacgcatttgtagtcgtagctacttgggaggctgaggtgggaggatcacctgagccaaggagttcaaggctgtagtgagcggtgatcatgccaccgcactccagcctggctgatagagtgagatactgtgtcaaaaaataaaaataaagaggggatcaatacacatacgtcccccaaaacatgcctgaaacacgagaagggaaagtgagggcagttaacaggatgccctgctggcacagtgcttcttagtagatgctagaaggtttgaggcccagatttcagcccagcatatggctttttgcctgtaactgaaccatgtcactgtgtgccagatggtctgaagaaagggtttctggaggaaattattattagctgcatgggagtatggtttacactagagtagaagagctgggagcatcacgtttgaaggggaagacagtgactgggtggaggggcaagggattagtatttagagtgtgcaactattgaaaataaggtatattttaatgtgtaagaggacatgtacttatatgttatatataaattaaagtgctgggattataggtgtgagccacagtgcccagccttgtttttgtttttgttttgttttgacagtctatcacttganccctgcaggcagaggttgtagagagaaaagatggcgctactgcactccaacctgggcgaaagagagccacgannnn

SEQ ID NO: 10358 - DNA, 1171 bp, Homo sapiens
  misc_feature 1, 2, 3, 4, 13, 1169, 1170, 1171: n = A,T,C or G
nnnncgcggccgngtcgaacacggctgcgagaagacgacagaaggggggaagtctggaggacgctgaggggcggaggcgggagaggcgagctcgcgatgagtggtctcggcaggctcttcgggaaggggaagaaggagaaagggccaacccctgaagaagcaatacagaaactgaaggagacagagaagatactgatcaagaaacaggaatttttggagcagaagattcaacaggagctacaaacagccaagaagtatgggaccaagaataagagagctgccctacaggctttgcggaggaagaaaagattcgaacagcagctggcacaaactgacgggacattatccaccctggagtttcagcgtgaggccattgagaatgccactaccaatgcagaagtccttcgtaccatggagcttgctgcccaaagcatgaagaaggcctaccaggacatggacattgacaaggtagatgaactgatgactgacatcacggaacaacaggaggtggcccagcagatctcagatgccatttctcggcctatgggctttggagatgatgtggatgaggatgaactgctggaggagctagaggagctggagcaggaggaattggcccaggagttgttaaatgtgggcgacaaggaagaagaaccctcagtcaaattgcctagtgtaccttctactcatctgccggcagggccagctcccaaagtggatgaagatgaagaagcactaaagcagttggctgagtgggtatcctgataaatctgggcttgtcttcctaatgctacctttgttggtcctttcttccttaagtgccaagtgctgagctaaaggaggataactttttggggaagtcatgctgagggtggtagtgtgaccctgcctgaaaaaagggtctcttaccctcccagccctggctcaactctgaagaaggatcttgctacagaaggagcccttgggctcccttctctttgatagcagttataatgcccttgttcccaataaaactgggcagatggaatcctagtgtctatactgccttgtctaataacatccgggcagagggaccacgatttaggacacaacgataagcagcgcatcatcgacacaaacaaatagcgtgcagttacacaacaaaatgatcgagatgcatgcatactcannn

SEQ ID NO: 10359 - DNA, 1767 bp, Homo sapiens
gaaatccatagggcaacctggagtcagcagctatgagggccccgccttccccagctgcatataaagggctctggggttggaggcagccacagcacgctctcagccttcctgagcaccttctcttctttcagccaactgctcgctcgctcacctccctcctctgcaccatgactacctgcagccgccagttcacctcctccagctccatgaagggctcctgcggcatcgggggcggcatcgggggcggctccagccgcatctcctccgtcctggccggagggtcctgccgcgcccccagcacctacgggggcggcctgtctgtctcatcctcccgcttctcctctgggggagcctatgggttggggggcggctatggcggtggcttcagcagcagcagcagcagctttggtagtggctttgggggaggatatggtggtggccttggtgctggcttgggtggtggctttggtggtggctttgctggtggtgatgggcttctggtgggcagtgagaaggtgaccatgcagaacctcaacgaccgcctggcctcctacctggacaaggtgcgtgctctggaggaggccaacgccgacctggaagtgaagatccgtgactggtaccagaggcagcggcctgctgagatcaaagactacagtccctacttcaagaccattgaggacctgaggaacaagattctcacagccacagtggacaatgccaatgtccttctgcagattgacaatgcccgtctggccgcggatgacttccgcaccaagtatgagacagagttgaacctgcgcatgagtgtggaagccgacatcaatggcctgcgcagggtgctggacgaactgaccctggccagagctgacctggagatgcagattgagagcctgaaggaggagctggcctacctgaagaagaaccacgaggaggagatgaatgccctgagaggccaggtgggtggagatgtcaatgtggagatggacgctgcacctggcgtggacctgagccgcattctgaacgagatgcgtgaccagtatgagaagatggcagagaagaaccgcaaggatgccgaggaatggttcttcaccaagacagaggagctgaaccgcgaggtggccaccaacagcgagctggtgcagagcggcaagagcgagatctcggagctccggcgcaccatgcagaacctggagattgagctgcagccgccagttcagcatgaaagcatccctggagaacagcctggaggagaccaaaggtcgctacctgcatgcagctggcccagatccaggagatgattggcagcgtggaggagcagctggcccagctccgctgcgagatggagcagcagaaccaggagtacaagatcctgctggacgtgaagacgcggctggagcaggagatcgccacctaccgccgcctgctggagggcgaggacgcccacctctcctcctcccagttctcctctggatcgcagtcatccagagatgtgacctcctccagccgccaaatccgcaccaaggtcatggatgtgcacgatggcaaggtggtgtccacccacgagcaggtccttcgcaccaagaactgaggctgcccagccccgctcaggcctaggaggccccccgtgtggacacagatcccactggaagatcccctctcctgcccaagcacttcacagctggaccctacttcaccctcaccccctcctggcaatcaatacagcttcattatctgagttgcataaaaaaaaaaaaaaaaaaaaaaaaa

SEQ ID NO: 10360 - DNA, 411 bp, Homo sapiens
aggtccgggctaaccgactctacactcatctagccatcatggacatagccatccaccacccctggatccggcgtcccttctttcctttccactccccaagccgcctctttgaccagttcttcggagagcacctgttggagtctgacctcttctctacagccacttccctgagccccttctaccttcggccaccctccttcctgcgggcacctagctggattgacactgggctctcagagatgcgtatggagaaggacaggttctctgtgaacctggacgtgaagcacttctctccagaggaactcaaagtcaaggttctgggagacgtgattgaggtgcacggcaagcacgaagagcgccaggacgaacatggcttcatctccagggagttccacaggaagtacctgcccg

SEQ ID NO: 10361 - DNA, 3975 bp, Homo sapiens
  misc_feature 1, 2, 3, 4, 5, 6, 7, 8, 9, 10: n = A,T,C or G
nnnnnnnnnncaggttgtctttatggttttttttaaaaaattgcaacagaataaacggttttgcagttattttgtgtgaacttttaaatgctatagaaagtaatttacctaaaacactcaaactttaatcactataaataaaaaaaagtaacgaaaatattttctttaaaggctttatttgcattcttgtaaattttattatttcaagtcaatgtgttaagaattactgcgcatatagttatttcttttataaatttgttttccgtgattccttcaaaagctttcttattgttggcctttattttctgcagagaagactacagttttacagcttatgctaccatttcgtatttgaaaataggacctaaagctaatcttctgaacaatgaggcacatgctattactatgcaagtgacaaagtccacgcagaactctttcagggtaaatggctattaattttcagttttatatattttaaaaagtatattaaagcctatgggatgcttttctgtcatattcccctaggtccagttgaacatgagaaaagtcagttttctgattagatttctgggtatggaagagagaaaatatagttttctgtaaagatgtaagtgaaagaatttagactggccttttaacataaactaggggtttccagtttcttggaatgggaggactccgtttgaatatctaattttgttatgcactctgctcttatttggttgtgattactaatagttgagaagtctgtttctgctgttccagtggttagaaaccactgttttaaaccaaatactatcaagtctgcaaaagcatgtcaagtcaagtgccattgtgtctaaggacatttgaggtctttagaacttctctcacaacgtagccccttttattcaaaatagagctcatatttgaatagaaatttgtagataaaaaaactagacccctgtatacttaaaaagccaactgatacagaaagaatattttgaaatatttaatctcatgagaaaactgaatagctggatttttaccaaggtgcttgctttgtttttttttttttttttttgtaggctgaatcgtctcaaacttgtcattctgaacaaggtgataaaaagatggaggaaaaaaattcaggcaacttccagaagaaggctgcaaacatgcttcagcaatctggttctaagaatacaggagctaagaaaagaaaaatcgatgatgcctgatatgactgttactaaattttctaattaaagatggtttatgcatgtatatgccattatttttgtagttagcaatattatactgacagaggctcactgagtgatactttaagttaaatatgtagatcaaggatgtccaatcttttggcttccctgagccacattggaagaagaattgtcttgggccgcacataaaatatgctaacactgatgatagctgatgagcttaaaaaaaaaattgcaagaaaaatctcatgttttaagaaagtttacaaaaaatgtaaaatatttgagaataagttcatgtaattgtcttaagttttttatgcctttatatacttagctatattttttcttttgacataaccatctttttgaaagcaatattatactgacagaggttcactgagtgatactttaagttaaatatgtagatcagggatgtccaatcttttggcttccctgagccacattggaagaagaattgtcttgggccgcacataaaatatgctaacactgacgatagctgatgagcttaaaaaaaaaaaaattgcaagaaaaatctcatgttttaagaaagtttacagatttgtgttgggctgcattcaaagctgttctgggctgcattagacccgtgggctagagttggacaagcttgtagatgatttcaggttataaaaccagaagtacaattcaacaaaaaaggagtaagtcatcaatataaatattagcaaacgagatattgctacatctctatttaaagtaaaatacaaccgattttaaagttcctgaaaccatagccatattttgacatttcacaaagaatggttctagtctactagagtacatttggctaagtagataacttacctaaatttgctccaaagctaaatcacaagtaaacatatttatgtttaaaacacagaaataaataacttaagatttttatctaagcggtcagtgttgtattggaaagatatatctataaataaactttgaactgatttcaaacttagaatttatgtttttatatttttccactaatatcattatcacttctgtaattttcagtgtggtcatcattaactcaatacagtcattcattttattgacttgtgatttttctggtgtcatttggaactttatatgattcctgaagaaattccatttttagtcaaaataatcttctatatcaatatttggatctagcagatcttctccatatgatgaaagattcatttggtttaagattaggttttcaaatgtttcttctaaatcggtttcaccaattaagacagctcccatcattcgtccattttgcatgacgactttgatgtattctcgtcctttggtacatctcagcattaattcatgatctgaacctaagccctgtgcattgtattttcccagcagtacaaccttatagttaaaaaattttgtcacatgagcaaacagttcaaagctgaaatccatgtcaatagagtctcctgaactcgctgcagccatgcactttgctgcataccatcccatctgtctagcctgggtccacagcctcatctgctgccagactgggctcagctgccaggatgtagtacaagatgtcaccggcagcatagatatcaggaagggatgtgtgcatatgatcatccactttcaggccaccatcttctcctagatcaaaactgttaccatggagaaaaggttctacatttggtgtaactcctgtagcactgacaatgaaatcgcagccatatatcttttcattggtcaattccacatagacaggccacatctctgtatcagctgtaactgacttatggtctcttggaaaagtgaaggactttttcttcaaaattctaaactcatcctgaaggtagattttctttacttcacacatagtttcaaggtgaatcttatgagaaaactcttttgttcctttaagattcaagccttcatgccaatctggtcccaatgcacttcctacattatctgctttagatttgcttctagcttcctttttccttccttcagttgtatatctggttcttttatgtgcaattttagcctctgatttttcagcaatgagctttgaagtcaagaattcagctgctcctgcatcgaagaaagtattccctatagctttatctttaatggcccaaatcacttcacagccttcaatttcatacactaactcaagtgcaataccaccgttccctatgatcattattcttttagctttagtaagctgtttctgaaattcctgagcactgtctgtatcacggattcctaatacataaggatttccttcacatatcaactttggtttagctccagcacacagacagagtttcttatatacgtgctgattgccatcttctgttacaatgcagtgttcttcactcttcagttgctttacgccagattctataaccttaatgttgggaaagcgttttcctaacatggtacttgattgttcttcaacatcgaattcttccaatattttagaaatctgcttgaaatttgtaactgctttaataacaggagaagctgttaccaagagaatatcttccgatggaaagtgagtagccaactgctccgcacaagtgacgcccgcgatgccgccgccgaccaccacgaacttccctgccgtcgggggagggcgcgctgcctccatgctgccggactcccagtggtttactgaatatcgcggcggagcaacgggactctggactccagcggacgcgtgggtcgactccct

SEQ ID NO: 10362 - DNA, 127 bp, Homo sapiens
  misc_feature 126, 127: n = A,T,C or G
cgaggtcttgcggatctggcggacctgctggtgctgcgcataggatgtctttctaatctggttgttacgtttcttagtgaaaccaacacagaaaagtcggagcaaatacccatcggtcgttttcann

SEQ ID NO: 10363 - DNA, 1021 bp, Homo sapiens
  misc_feature 1, 2, 3, 1000, 1001, 1002, 1003, 1004, 1005, 1006, 1007,1008, 1009, 1010, 1011, 1012, 1013, 1014, 1015, 1016, 1017,1018, 1019, 1020, 1021: n = A,T,C or G
nnnaagacataatgtaagaatccgcacctattatctgtctcctgtaccctttttcgaatatcttccaaggggaccccagtactgccccggcttctctaattcggcataatttgccatcacatggacttcacgcataagtctcttcataccggcttacccaattcacctaccccctatattgcgtgaactcccccaacacttatatggcgagtagactacgttcttcccacataagactccagtccacctcataggagtgaaaaaggttttgttttttgcccatctgtaagatgttcctgagacaggccaggtaataaaacatacaagcactggagttcggttttgtacttctctttacatcactactaaactgttagactgagatgtggaatgcaggtcatgtactatgaaaagttgattgtagcacaactgttcaatcagtaaaaggtcttcggcaaattccctttagagtatactttctataaactacatgttccacaaaaaggtcaattatatatacaattgatttgttttacttaatcttatttgctcagatcttgcaaatgcaatgagaatattaagcctgaggctagttctcagtgtataggtttaacaaattaaggctcattttcccaaatcaaaatagtttttagttttccttttaaattatgaattacattcatagtacctgccaccagccttgccctcaatgaaatcttaatgcaggagcagcattctacttcattatggaatttccctgacaccagcacttagccccttctaaaaagctcccatctgcactagccttacagcatattacattgcctctggcttgcacctctgtttccacctgtgtatttcacagaagcccaacacagattagttgaaatattcacacaactgtttttcaaaacaatttattgcatcatatttggtaccttatgtttgacaacaaaaaggaaattacatctgtaactgcaagaaaaagaagctggtctgnnnnnnnnnnnnnnnnnnnnnn

SEQ ID NO: 10364 - DNA, 207 bp, Homo sapiens
accaggctaagtaggtcgtaatactctaactggcccagcaggagaggatggctctctccccccccgcgtacttttttttttctttttttttccagacaaaataccacgctcacaccacacataccacaagacaaagaacaggtaaagagggcacacacacttttaccgtttataccaaaccaaaatcacgaaattcaaaatccgagt

SEQ ID NO: 10365 - DNA, 1025 bp, Homo sapiens
  misc_feature 1, 2, 1023, 1024, 1025: n = A,T,C or G
nnagtcacccacgcgtccgcttgagattatcactaaggctgaagagatgctggagaaaggcccagagaacgagtactcagtggatgacgagtgcttggtgaaattgttgaaaggcctgtgtctgaaatacctgggccgtgtccaggaggccgaggagaattttaggagcatctctgccaatgaaaagaagattaaatatgaccactacttgatcccaaacgccctgctggagctggccctgctgcttatggagcaagacagaaacgaagaggccatcaaacttttggaatctgccaagcaaaactacaagaattactccatggagtcaaggacacactttcgaatccaggcagccacactccaagccaagtcttccctagagaacagcagcagatccatggtctcatcagtgtccttgtagctttgtgcagcagttccgggctggaagacagagacagctggacagagctcctgaaaacatttcaaaataccccctccccctgccctgccctgcctttggggtccaccggcactccagttggatggcacaacatagtgtatccgtgcagaagccgagctggcattttcaccagtgtagccaagggcctttgccaagggcagagcaggtggagccctctgcctgccctatcacacatacgggtacttgctttttcaactggtgatgttttaagagaatggttttaaccagggttccctttttcccttagaaatacctcgcggggatcccagcggctttaaaaccacaagaataacaaccggaaggcttgtgtcaaccaatatcaatctgagggcaacgcctctatatggatgaggccagggactttgcgtttcaactccgcaggccagcggtgaggagagggctcaaaggacacaggagcgcggaagaaaacacgggccagcatggtggggcagagcgacacgcagccgccgaccgaagtctcattttatccctaatggggtcagaaaagagcagcaaacacagaaacagggagactctacaannn

SEQ ID NO: 10366 - DNA, 1323 bp, Homo sapiens
ctcagcggtgccctcccgcttggatgttccgggaaagtgatgtgggtaggacaggcggggcgagccgcaggtgccagaacacagattgtataaaaggctgggggctggtggggagcaggggaagggaatgtgaccaggtctaggtctggagtttcagcttggacactgagccaagcagacaagcaaagcaagccaggacacaccatcctgccccaggcccagcttctctcctgccttccaacgccatggggagcaatctcagcccccaactctgcctgatgccctttatcttgggcctcttgtctggaggtgtgaccaccactccatggtctttggcccagccccagggatcctgctctctggagggggtagagatcaaaggcggctccttccgacttctccaagagggccaggcactggagtacgtgtgtccttctggcttctacccgtaccctgtgcagacacgtacctgcagatctacggggtcctggagcaccctgaagactcaagaccaaaagactgtcaggaaggcagagtgcagagcaatccactgtccaagaccacacgacttcgagaacggggaatactggccccggtctccctactacaatgtgagtgatgagatctctttccactgctatgacggttacactctccggggctctgccaatcgcacctgccaagtgaatggccggtggagtgggcagacagcgatctgtgacaacggaggtgagaagcatcccctccccctacattgctgtctccctgacggcgcccagcccgaggagtgggcactcggctccggacactgtaactcttgctctctaccttgctcacggggcctcaggcttcagtgcttacctcgatgtctcatacctctgcagcggggtactgctccaacccgggcatccccattggcacaaggaaggtgggcagccagtaccgccttgaagacagcgtcacctaccactgcagccgggggcttaccctgcgtggctcccagcggcgaacgtgtcaggaaggtggctcttggagcgggacggagccttcctgccaagactccttcatgtacgacacccctcaagaggtggccgaagctttcctgtcttccctgacagagaccatagaaggagtccctatgctgaccccaatacttgcagaggtgattctggcggccccttgatagttcacaagagaagtcgtttcattcaagttggtgtaatcagctggggagtagtggatgtctgcaaaaaccagaagcggcaaaagcaggtaccctagccatgctgagctgcagaggccacaggacagctctccccgcgt

SEQ ID NO: 10367 - DNA, 1862 bp, Homo sapiens
  misc_feature 1, 2, 1859, 1860, 1861, 1862: n = A,T,C or G
nncccgctgcacacgctcgcagtctgtgggccctccgggaggcggcggaggtcaccgcggggagaggggcgggcgcagatggcagcctccttacggctcctcggagctgcctccggtctccggtactggagccggcggctgcggccggcagccggcagctttgcagcgggtagtatcttccccagcagatgttgctgaaaaagctgacagaattattacaatgctgcccaccagtatcaatgcaatagaagcttattccggagcaaatgggattctaaaaaaagtgaagaagggctcattattaatagattccagcactattgatcctgcagtttcaaaagaattggccaaagaagttgagaaaatgggagcagttttcatggatgcccctgtttctggtggtgtaggagctgcacgatctgggaacctcacgtttatggtgggaggagttgaagatgaatttgctgctgcccaagagttgctggggtgcatgggctccaacgtggtgtactgtggagctgttgggactgggcaggcggcaaagatctgcaacaacatgctgttagctattagtatgattggaactgctgaagctatgaatcttggaatcaggttagggcttgacccaaaactactggctaaaatcctaaatatgagctcaggacggtgttggtcaagtgacacttataatcctgtacctggagtgatggatggcgttccctcggctaataactatcagggtggatttggaacaacactcatggctaaggatctgggattggcacaagactctgctaccagcacaaagagcccaatccttcttggcagtctggcccatcagatctacaggatgatgtgtgcaaagggctactcaaagaaagacttctcatccgtgttccagttcctacgagaggaggagaccttctgagtgtgccctttggccacggacactgttgggaaccaaactctgtcttggagcctccttttagctcactccacaagtaaatggatttaatcaaaggtcacctatctgcttttgattgtctaggtcacagtaatccctaggatttttcaccgcttattctttttgtctttttaacaaacatattatccgaattttttttctgcaagccactgatagtctctgctaactagcttaattgacctttttacaaagtttgatccccaagcatcctcaactaaatcattgaatacttcaatcaggatattatctgctttactttacaaataaaaccaaatcttttgtcaacaggatgaaacccatcttaaaggaaagaaaaggaattggtgtgaagagagaagttagagaagggaaatgcagtgaattactatctgtgtccatcaggaagtttgtcctgttaaccaaatggttactgcactaccagggttactggtttattttccagggagctgataaagcaggagaactgttgctgcatgttttctatttggactccgtcacaatatggtaggatatccctcaccaactcccgacactcagcagacttgtttttatatttttttctttcttgtacattcttactacgtattttttgacttaagaatgacatctttagacgcatttcagagccaatgatgatatttgctttagataattattatattattataaatatagccatattattttgaattcaaataaatttctatactggcaaaaccacacatgaggaacccaaaacggacaacccacaacggggggccaagtctccgggcgcctcgccccttttagacggccaagattatacagaagcggacaagagagacagtatgggacttgggtgaccacacacgatatgtttcggcgctcatataannnn

SEQ ID NO: 10368 - DNA, 762 bp, Homo sapiens
  misc_feature 1, 617, 618, 619, 620, 621, 622, 623, 624, 625, 626, 627,628, 629, 630, 631, 632, 633, 634, 635, 636, 637, 638, 639,640, 641, 642, 643, 644, 645, 646, 647, 648, 649, 650, 651,652, 653, 654, 655, 656, 657, 658, 659, 660, 661, 662: n = A,T,C or G
  misc_feature 663, 664, 665, 666, 667, 668, 669, 670, 671, 672, 673, 674,675, 676, 677, 678, 679, 680, 681, 682, 683, 684, 685, 686,687, 688, 689, 690, 691, 692, 693, 694, 695, 696, 697, 698,699, 700, 701, 702, 703, 704, 705, 706, 707, 708, 709: n = A,T,C or G
  misc_feature 758, 759, 760, 761, 762: n = A,T,C or G
naagcagttctctttataaagtgttattttgatagtttgtggattctaaaatatatatatatttatataaacaccatataagtcaaatatgtatttaacaaagcaatatgtattcattcactttcaagatttgttttggtgtcaaaataacatgaaaaggtagatggagttgcttctgttgaattagctctgccaccaatatgtatcttcatacacgtttggaaatgtttcctgcagcattaggtatgacttgttctgagtactgcttccggtgctaaaatgaacaaagaatttgtacttaatggcatggactctggagaatctatgcgaatcaacctttctaccttaatatctccccaaaaatgtatagtgccttgtttttatgtacagtttatatacagaaaagtttgctctgcatttttgatgtacagtttatatacagaaaagtttgctctgcatttttgatgatggtttggaacattatctacaatgttactctcaaatagtcaaaataaaaacatctcaatttctaataccggttgttaacagtaccagcagaaacctggccaggctcccaggctcctcatttatggtgcatccaccagggccactggtannnnnnnnnnnnnnnnnnnnnnnnnnnnnnnnnnnnnnnnnnnnnnnnnnnnnnnnnnnnnnnnnnnnnnnnnnnnnnnnnnnnnnnnnnnnnagcagtataataactggcccccgtacctcggccgccaccgcggtgagcnnnnn

SEQ ID NO: 10369 - DNA, 332 bp, Homo sapiens
acgcaggcggcagcctcactctgaatggaccaaggcgccagctccttgtccaaagccaaaacctttgggcccaaagtttttggcatagcatcctttgcaatagatctcaccatccttgtctgccagggtggtcgactcgaggcctttgccacatttggcacatcggaagcaggacttatgccaggacttcccggcaccgatcaccttctccgctgcatagactgcctggctgcatcgcggacagcgctcagagccgccgatcttctgagcaaacttggatgcattggggttggtggtagcggacgcgtgggtcgactcaagacctgcccggg

SEQ ID NO: 10370 - DNA, 1709 bp, Homo sapiens
  misc_feature 1, 2, 3, 4, 5, 6, 7, 8: n = A,T,C or G
nnnnnnnnaagggctgtccaagccacgcctttccctcccccctgttttttctccccctccctgtctttttttccgcctcccttgtggccccttgtttcaaaaaagggtgatctcaaaatgttgccccccccgggatttttttcccccccccgccttttttttttttttttgctgtcttttttttttgttttttttttggaaatgattcattttttattcaaatataactacatttaacaatcaaggtcatgtggcttagaaacctgagcttggttttagactcagacagacagttcattgtcggcagccattaaaacaatgttcttgacccaagaccagatgaagagaagggacaaaagcaatgttttcaagtacacattaaatttcattcaataatagtatgtcttcataaaactaccatgaataaaacaaacgattctaaaaggcagtgggcataaggagggctgcttcacagtctaccccagtcaccacattgaataatcgtattgtgtttatatcataaagtgaagttctagtctcatcccagtgttgagttcacctgatgaaccctgacccttttccctgcccaactcatcctgcaaatagaaatcttacttctaagggaatccatttgtctttcttcccattactgtggttcaaaaactgatactacagctgcagaaggcaacccaatatttaaggattttaatcacagaatcctgtaactaagactttctttaaagaaagacaaccagttcttttttatgtcatttatttagaaaaacccatttgcccctagtgaatgtactaaccttatttaaacaaagataagtgagggaagtaagaagtgatttgaggaatgagcctgggatctgaggcccaccacacattccttaccttcaacttacctttccagtcttctcccaccactgctccacccacctgagattctaggtggagcaatctacaggatactctctgaatgtggttccagcttctcttgcctcacactcttgctcataacatttcctttccttggaaacattgccttcatctcagccccattcagtctttacttgttcacatcatactcttctttcaaaacccagtggaaaagctcaatttctcatgtagccttacctaactccatgcctccagaaagtcatgcaaactcatgccacaacacagccaacagcaacataccatcggcatggcactgagagcaagcaaaaaggacacggggtgacttcactgtctccacttgaagaacttaaggtctgtctgggtgaggggtgtacagtcttaaatattacagcaatcatttattagaaatattcatctgcttctaagttatataaacacttttaatgcaaacattcaatagggcatatttcccactgctctcaagatttcatctctttctgctgccgtaggcataaatggcttcactccgttctttcttctctgcatcacgatagaattccagaatctccggcagtttttgtacctcaagaagtaagtggaacacctttccctgtcatagttattttcatccagacatctggtggaagcatcagattccgacaaacaaggatttatgtcaggatctctcagcctctgtgttaccgagggcattctaacagtcttcttactccggcctccgcttcgccagcacccaggccgtctccagctccatttccttccggatt

SEQ ID NO: 10371 - DNA, 862 bp, Homo sapiens
  misc_feature 1, 2, 3, 146: n = A,T,C or G
nnncaactttttctttacatataattgaaaaagtgattataggtttagaccctttaaataaaaggggccatgggcccctcagtccccctgaactcctgtgtttatgtagtaatccccctctctcgtgtgtgtgtgtatatgtgtgngtcttttcttctaggaaagtcaatactcccagttatttacctatgagcaattctaagaattctgattcctctctaggttgagtaacacagactgcatcttgtgggctgacataacgcacatatgtgctttgacttctcttgtaaccaagagctgttcaacactgacaggcggcactgtaacccaaagagtactttactggtagatttcctagtttttccatgaccctggctgagcaaatgttctttagatttgacctagaaaacccttcttgtgtgttttgtaacctcacaagccactgctaatgtaccttcttcacttgggccacccaccgtgatttctgtcctggattccctgagccaaatacccatgatgggatggttcagtgatgtggatggatggctatttgtgtaagggccgaaaactagttttctaagatgggagagctgggcagttacttatactctgaagcccttctctttctctgctggggctttcccagcagttcctaatagttccttgtatttcagataagtcatcatgattgttaggaaaaaaagaaaaaagaaagttagtttttagcctcctgacttcttaagtcaagtgagacttttaaaatttagtaaataatagctcattatttttatggtagctatttgattattttaattctttagcagcactgaagaaattcagagaagttcaatagagagtaata

SEQ ID NO: 10372 - DNA, 1812 bp, Homo sapiens
  misc_feature 1, 1812: n = A,T,C or G
nccgggccgtggcttcaaaattgtttcatgattacataacttctttctagttaggaattaggacagtgtaagaaggccatctacaatcaagattgagagtggctctaacaagtgccatttttccttgttagctttcatttctcagccctttacaagattaaaatagtctgcagtttaatctctccaaagctttacggacagtgattctgtcctaaacaagacagtgactccaggatttctgaagactattgtggaagaagcatccattaaggccaagctataacatcagaaatggtgaatgaatacaagaaaattcttttgctgaaaggatttgagctcatggatgattatcattttacatcaattaagtccttactggcctatgatttaggactaactacaaaaatgcaagaggaatacaacagaattaagattacagatttgatggaaaaaaagttccaaggcgttgcctgtctagacaaactaatagaacttgccaaagatatgccatcacttaaaaaccttgttaacaatcttcgaaaagagaagtcaaaagttgctaagaaaattaaaacacaagaaaaagctccagtgaaaaaaataaaccaggaagaagtgggtcttgcggcacctgcacccaccgcaagaaacaaactgacatcggaagcaagagggaggattcctgtagctcagaaaagaaaaactccaaacaaagaaaagactgaagccaaaaggaataaggtgtcccaagagcagagtaagcccccgggtccctcaggagccagcacatctgcagctgtggatcatcccccactaccccagacctcatcatcaactccatccaacacttcgtttactccgaatcaggaaacccaggcccaacggcaggtggatgcaagaagaaatgttccccaaaacgacccagtgacagtggtggtactgaaagcaacagcgccatttaaatacgagtccccagaaaatgggaaaagcacaatgtttcatgctacagtggccagtaagactcaatatttccatgtgaaagtcttcgacatcaacttgaaagagaaatttgtaaggaagaaggtcattaccatatctgattactctgaatgtaaaggagtaatggaaataaaggaagcatcatctgtgtctgactttaatcaaaattttgaggtcccaaacagaattatcgaaatagcaaataaaactcccaagatcagtcaactttacaagcaagcatctggaacaatggtgtatgggttgtttatgttacaaaagaaaagcgtacacaagaagaacacaatttatgaaatacaggataatacaggatccatggatgtagtggggagtggaaaatggcacaatatcaagtgtgagaaaggagataaacttcgactcttctgccttcaactgagaacagttgaccgcaagctgaaactggtgtgtggaagtcacagcttcatcaaggtcatcaaggccaagaaaaacaaggaaggaccaatgaatgttaattgaaatatgaaagctgaaatgcaacaaacaacttccgcttaaaacaattaagttgttaataactgtgattttgtaaatttcagtaattcatttaaatgatgtttcagtagatatattctagcatattaagagcttttataactgagttatagattagtttgctttctggaataaaattttcttcttatactcttccttttttttagatattacattttgcttttatgacattcacgaggcaaaaaataaaatatctttttttgaacggcggccgttactagtggaccgagtcggaccaan

SEQ ID NO: 10373 - DNA, 625 bp, Homo sapiens
  misc_feature 624, 625: n = A,T,C or G
gatggtccagccacatgatgacgtttcgatgggaatccccttcctggttgactggtaatgggtgaaactgcttatccaaaacaaccagagaacacgtggcatcaaacccaagtcctcgaatttggtttaaatcaatcccttgtacctgcccgggcggccgcccgggcaggtacttctgttgctgtgttctgtcatgagttgcctcatgaattaggtgactttgctgttctactaaaggctggcatgaccgttaagcaggctgtcctttataatgcattgtcagccatgctggcgtatcttggaatggcaacaggaattttcattggtcattatgctgaaaatgtttctatgtggatatttgcacttactgctggcttattcatgtatgttgctctggttgatatggtactcgggttgattccattccattccattccaatccatgccattccactcgtgttgattccattctttccattccattcaagttgtatccattccattgcattccattccattcgattccattcgattgcactcgggttgattccatggcattgcattccattccattccattccattcctttccattccattccatgttattgcacacgggttcacnn

SEQ ID NO: 10374 - DNA, 433 bp, Homo sapiens
acgcgggggtcacttccggcttccttcagtccgctggtcccgagcacgagctgtgaggggattcacttgtgtgcggaactcctcggaaccatggcgtccctttcccttgcacctgttaacatctttaaggcaggagctgatgaagagagagcagagacagctcgtctgacttcttttattggtgccatcgccattggagacttggtaaagagcaccttgggacccaaaggcatggacaaaattcttctaagcagtggacgagatgcctctcttatggtatcgagcggccgcccgggcaggtacccttaaactggcaggacatttttgaaatcacaaatttgcacataaagaatgtcacgaacagccatgtatccatatacagcaatcaaataaggaacttatgacctaaagcaaaggtaaactttcttgaaac

SEQ ID NO: 10375 - DNA, 2829 bp, Homo sapiens
  misc_feature 1, 2, 2809, 2828, 2829: n = A,T,C or G
nnagatgatcccacaaagggagaaaacgaattataattatccgcttaattaaagatctttttttttttttttttttatcattccaattcatattcagccagtgtttattaagagcctactacacgccagacactttacatgctgatcacatttactcctcacaaccatcttgtaagggagacatcatcagtgccatttgaacaaatgaaaaactgaggctcagagagattcaataccttatccaaagctctccagacaataagtgcaaaaacaaggatttgaattcaggactgtttgattccaaatctggaactttctggaacctctgacacacacacacacacacacacacacacacacacacacacacgcaccatgtcctgagctgctgcctcctggactcccgccagactgcacctgacagacaaagccaactaggagggaggggagtgagggagaaggtcccacaggtgaccaatgcctggccccttcatgacagcaggggctagggctgtcccacagggactagagagaggtgtggaaggcagggactttcccataatgctccctcctctcagtgcacaagtgtgctatgttgagaaatggggcaaaagaacaaacagtccttgccacagagggagacaggcagcagccttatcaaacaagataaggagacccggatgatgtgccttttgaggcccctggtggtggaggaggattgagccaggtgaatgggaaaggaagaaaagatgaacccatcttggagtgttgtactttggttgctggagagccaacagtggagactggagacaaatatttaagtcattccggcaggccccatgtacgtgcctcacaatctaacaccgcccaccttggccagaaaggaaggcttcctatggaggtgctgccctgctcagtctgtcttctcaggctttctccaggacttgcgggtctccaggaagatcttgaccagggacaggaggatgggcacagccataggcaggaagagtgggatgtagatggcaaacttctggtcatcagggaaataaaggaggtggaggagtgacgggtcaaagaaggcaagctcagaggatgtcacagcttcctggctggcgacaaaggcagatgccaggtgcccagacgccaactcttctgccgacttctggacggcagctacagccttgtacacctcagatgccacgtcgtccttaatgacaatgttgctgatcttgcccagaagctgcgccagggaggtaagggtggtggtggctgtggccaggttctccactgaccgagcccagagcagccggtctagctcccaggtcattagcccttcactcgtaggccctgaaagcaggcattttggaggcagctggggctgagcaatcccaaagagcaaccgcaactgtgccaggaacacctccatcactcgcaccatgtccacctcgactctcactggcagcactgaggcattataggttttggagtcaacattatataccataatgccaccccagcggggactatggaaggcattggtggccactggagcgccatccttgtcctgaatgtacagcggtgagtgtgcaagctcaggcacgtagagtagaaagttgagcacagggtacaaggaggcagcactggatcccagccgggactccactgggttgatgacatgggggaggctgtgcatgtccaaatagtagctggaggaagctgagtcaaagcggggattcacccccaacattgcatagtaaagaatctgagagtccacagagaagttgccagcggcaccgagggcattcaggaaaggttgcacatagcgccggacagccccctcaatgtcccagtagacatcatgggacttggggtctgggttgagtaaactgaaggtgatctcatagcccaagctggacttgagaggccgcctcttctcagcgctccacttgtcctctggaaggtggtcagccagagcagcagcaagcacatcctcagtcaaagacatggcctgggccacctggactatgcggcggccaatgatgttaaaggcctcccggtgcattatcccccgcaccactgctgtcctcttgggcccaatgtagctcatcatgtcctggggaagaagtgaggagtgttcagatatcacgtacacagtcagggagccctccgcttgttcctgaggctcatctaacatggcttctgcctcttgcacactgcccgatgacagggcctcctcctcatggtccaaagccctccgataggccttctggaaacggcatttgattttcattttgtatttcagaggaatctctctttcatgcacaacggtgaagggcagcttctcctggtcgtccaggggcactgactcccgcgtaaacacgacagtgacaggcaccatgaggcggagctgaagggcattcaggccactgatctgggagtaaggcaacgaggcccggtaggtctccgtggtcttccaccagagcggtagccccagcacgatggccaccgcagcgaagaagagggcggcgcgcttgccccgggccacctctaagggtgtgtgtagccgcagccccggcgccgccatgcggctagggtaccggccccatccccgacgcggagaagccccaaccacccgcctccaggggcccgcgttcattgggatctccgtgcgaagggactctggcccaagcctgaagggaatctcgtctgaagagacccccgagccccccgtccgcgggacctctcgcacaccacaatccccacccctgctattcctcccttgccatcagctagctgcaggccccccacncgaagcccaccgcacctann

SEQ ID NO: 10376 - DNA, 930 bp, Homo sapiens
acgcggggagagggagctgggcagggcacagcagggcaggagtgtgtttgatgtgtcctgggaaccgccctgaggccgtcgtgtggctggagtgctgcaggtgtcaaggaaattgtaggagatgtctcctgagtgtgatggaatataaccagatttccagaaggaactgacatgatctgacttaaaaaggccacctacatttacatgaaggccgcctacctcagcatgtttgggaaggaggaccacaagccgttcggggacgacgaagtggaattatttcgagctgtgccaggcctgaagctcaagattgctgggaaatctctacccacagagaagtttgccatccggaagtcccggcgctacttctcctccaaccctatctcgctgccagtgcctgctctggaaatgatgtacatctggaacggctacgccgtgattgggaagcagccgaaactcacggatgggatacttgagattatcactaaggctgaagagatgctggagaaaggcccagagaacgagtactcagtggatgacgagtgcttggtgaaattgttgaaaggcctgtgtctgaaatacctgggccgtgtccaggaggccgaggagaattttaggagcatctctgccaatgaaaagaagattaaatatgaccactacttgatcccaaacgccctgctggagctggccctgctgcttatggagcaagacagaaacgaagaggccatcaaacttttggaatctgccaagcaaaactacaagaattactccatggagtcaaggacacacctttcgaatccaggcagcacactccaagccaagtcttccctagagaacaggaagagatcatggtctcctcagggtctgtagtttgtgcaggagttccggtggaaaagagacaggtgggaagtcctggaaattttaaaacccttc

SEQ ID NO: 10377 - DNA, 948 bp, Homo sapiens
  misc_feature 1, 2, 3, 4, 5, 6, 7, 8, 9, 10, 11, 12, 13, 14, 15, 16, 17,18, 19, 20, 21, 22, 23, 24, 25, 26, 27, 28, 29, 30, 504,512, 948: n = A,T,C or G
nnnnnnnnnnnnnnnnnnnnnnnnnnnnnnttagctatttacaaaattttatttcagtatatttttcagaagcataattttacgtttcttcatattttactttgttaaagtccggaccagtcaaggtccttttcatgcaaagatgtacatttaatgaggacaaagaagccacccagtcacctggtgaagctctgctgctttgtgcccctttttgggtcaggtcgtccaggacatccaggtcttggtctttctcctcttttcttgattttcactgcctgggcccagcatcacttccaaagacctccgtttgtttgattttactgtatttaatctgcttcacagaatgttaccgacttggctgacctctgaagaatcccccggtactgccctatgtcaggcaccacagccagctgtgctaaattcgggcacctttagctctgctgactactgaccctgggcatgcagtccggccggcgagatagtgagtgcaaagtctcacacaanttgagtcnatagaagtgaccctgaacaactgggctatttcataatttaagtttatcaaagagagactttaacatcctctccctccctcccactgaaaacccaacactgataatatagattttatattgatcacaggacactacacaacaaacacaaagacactacacttctagtaggacgagtcacgatttcctttgatgttgggctatggaatagctagaaagttactgctcatcaccacagcagggtaccatgcgagtggatagcttaataaatgcattcattagttaatggcttcctcggttagctattatatatatggaatgaggaaacctcattaggaatggccacagtctcagcaaaactcagctctaaatatgcaaagactttgaagtcctgctattaacaagatgacatgaattgtaagaatacatttgacaggcn

SEQ ID NO: 10378 - DNA, 586 bp, Homo sapiens
atagcccgacagacccagcccttagagccaatccttatcccgaagttacggatccggcttgccgacttcccttacctacattgttccaacatgccagaggctgttcaccttggagacctgctgcggatatgggtacggcccggcgcgagatttgcaccctgcccccatcccgggaggagatgaccaagaaccaggtcagcctgacctgcctggtcaaaggcttctatcccagcgacatcgccgtggagtgggagagcaatgggcagccggagaacaactacaagaccacgcctcccgtgctggactccgacggctccttcttcctctatagcaagctcaccgtggacaagagcaggtggcagcaggggaacgtcttctcatgctccgtgatgcatgaggctctgcacaaccactacacgcagaagagcctctccctgtccccgggtaaatgagtgcgacggccggcaagcccccgctccccgggctctcgcggtcgcacgaggatgcttggcacgtaccccgtctacatacttcccaggcacccagcatggaaataaagcacccaccactgccctgggaaaaaaaa

SEQ ID NO: 10379 - DNA, 2522 bp, Homo sapiens
  misc_feature 1, 2, 3, 4, 5, 6, 7, 8, 9, 10, 11, 12, 13, 2519, 2520, 2521,2522: n = A,T,C or G
nnnnnnnnnnnnnaaacaacgggtgaccttaattcaaatattcctaccaccatagctacaaaataaaaaaaactaattcaacaaatgtacttatttaacccaatatatccccaacaattattgcagcacataatcaatataaacattatatatatgaactatttgacactatttgacatttcttcttccacatccagtgtatctgacatttagcgcacatttgatttgcactcacccactttgaggagctcaattgccgcttaagtccgtggctagtggctgccctaaagttcagcaccgccacggagctttgggtccacccggactgtaaaaaggaagcacttccgttagcatgacccggcctgaagtagcggcggaacggaagtcgcttgtgtatgaacgcagcggcggacctgtgaggggatccgacttgccggcagaacttacgctgcgggaccccgggcactgttgctgctgcgggagactgtgggctgtttagtgccatgcaccctttacagtgtgtcctccaagtgcagaggtctctggggtggggaccattggcctctgtgtcttggctgtcgctgaggatgtgcagggcacacagcagtctctctagtaccatgtgtcccagtccagagaggcaggaggatggagctcggaaggatttcagctccaggctggctgctggaccgacttttcaacattttttaaaaagtgcctcagctcctcaggagaagctgtcttcagaagtggaagacccacctccctatctcatgatggatgaacttcttggaaggcagagaaaagtctacctcgagacctatggctgccagatgaatgtgaatgacacagagatagcctggtccatcttacagaagagtggctacctgcggaccagtaacctccaagaggcagatgtgattctccttgtcacgtgctctatcagggagaaggctgagcagaccatctggaaccgtttacatcagcttaaagccttgaagacaaggcggccccgctcccgggttcctctgaggattggaattctaggctgcatggctgagaggttgaaggaggagattctcaacagagagaaaatggtagatattttggctggtcctgatgcctaccgggaccttccccggctgctggctgttgctgagtcgggccagcaagctgccaacgtgctgctctctctggacgagacctatgctgatgtcatgccagtccagacaagcgccagtgccacgtctgcctttgtgtcaatcatgcgaggctgtgacaacatgtgtagctactgcattgttcctttcacccggggcagggagaggagtcggcctattgcctccattctagaggaagtgaagaagctttctgagcaggggctgaaagaagtgacacttcttggtcagaatgttaatagttttcgggacaattcggaggtccagttcaacagtgcagtgcctaccaatctcagtcgtggctttaccaccaactataaaaccaagcaaggaggacttcgttttgctcatcttctggatcaggtctccagagtagatcctgaaatgaggatccgttttacctctccccaccccaaggattttcctgatgaggttctgcagctgattcatgagagagataacatctgtaaacagatccacctgccagcccagagtggaagcagccgtgtgttggaggccatgcggaggggatattcaagagaagcttatgtggagttagttcaccatattagagaatctattccaggtgtgagcctcagcagcgatttcattgctggcttttgtggtgagacggaggaagatcacgtccagacagtctctttgctccgggaagttcagtacaacatgggcttcctctttgcctacagcatgagacagaagacacgggcatatcataggctgaaggatgatgtcccggaagaggtaaaattaaggcgtttggaggaactcatcactatcttccgagaagaagcaacaaaagccaatcagacctctgtgggctgtacccagttggtgctagtggaagggctcagtaaacgctctgccactgacctgtgtggcaggaatgatggaaaccttaaggtgatcttccctgatgcagagatggaggatgtcaataaccctgggctcagggtcagagcccagcctggggactatgtgctggtgaagatcacctcagccagttctcagacacttaggggacatgttctctgcaggaccactctgagggactcttctgcatattgctgacctgagaggatggcctcagagctgacttgggcaatcctccccaacaggaaggggagacattgcctgccactgaggaaacaggtcatgaaggtggagataagctgcaaggggcgaagcaactttatgtcagtggaaaacgtgtctctttaaagctgctatgtgaacagcttttacagtcattaaatttacctaaactaaggcaaaaacaccggtctttggcggaaagtaagggcttctcccctttcaggtaannnn

SEQ ID NO: 10380 - DNA, 517 bp, Homo sapiens
  misc_feature 1, 495, 511, 512, 513, 514, 515, 516, 517: n = A,T,C or G
nagccatgtggtattcctaagcacaagaaggctataatgtacttctggagaaaataagtgtgttagataagacttgttcatgcatgagtgatagtgctgttagtgtgaattcaatgttaatgaatcaataaaatatatgaaataaagtgtctttaaacagtaacacaaggttgtatgttactcagttgacaaaaacattgtgaccagaggctcacaggagtcttaagtctgcatttccccaggagcaatggcttagcatttactaatcgagtattcctggcaactttatagaacataactactgtaaataatgagaatcaactggatattataaatccccaaatatatattttgctttacataattgagtgtttttcaaaggcatatagaaaagaaaaaataggcttttatatgtacccacgtacccatcttcttcaatccttttgaaggtccaaatttcaatgtgggatcattgtctgcccgcgttaattaatnctagaagtaccccgannnnnnn

SEQ ID NO: 10381 - DNA, 766 bp, Homo sapiens
  misc_feature 1, 2, 3, 4, 5, 6, 7, 8, 9, 10, 11, 12: n = A,T,C or G
nnnnnnnnnnnncgaaagtcttctagaattaattaacgccgggatcatctggaagaaatctgaaaaagcaataaattttttcagattgtcttaataaataacatgagaaatgtactggctaaaaaatgcttaaccatttaaatatatatatagttcaccaacaagtttcaattattaatatttgtaggaataaactcaatgcaaaatgtattttttatacgtatgccagagccaaaaatttaatttttctgagaatgaattctaaacttcaaaaaccctcagattatctttcaaaatgaaaatagaaagcataaggttgtaaatttccttcaaatatacaaaagtgtacttaacatcccctattaaatgttatataatccttaaaccccttcccttctcagtaaaagtgtacttatatataatgtacacagaaattcctagactacaagatgtcatccttctagaagaagacctaaagcatacactgggaggaaagttttacaggggaatctagactacttaattttttcttcacagtaacaaatgacaaagcaccaatatctaaaggttcccaacacacaggataaacaataaggaagttctcccagtgtttcccattttaggcaaaaaaaaaaaaaaggatttcagctagcacagtgcatccaaatgaccaaaaatactacaatgccgatgttttttaaaaataaatataaaagattttaaggattttgtcttactggaataataaaattaatggtgaatgggt

SEQ ID NO: 10382 - DNA, 308 bp, Homo sapiens
  misc_feature 1, 2, 33, 308: n = A,T,C or G
nnctccaccgcggtggcggccgaggtacgcggngatccagaatacatttccaacaagagcactggccaagtcagcttcttctgagagagtctctagaagacatgatgctacactcagctttgggtccctgcctcttactcgtcacggtttcttccaaccttgccattgcataaaaaggaaaagaggcctcctcagacactctcaagaggatggggagatgacatcacttgggtacctgcccgggcggccgctcgaccgcctggaccaacttgtcggaaaccacctttctgatgccgcccacggcagcn

SEQ ID NO: 10383 - DNA, 2948 bp, Homo sapiens
cacccacgcgtccggtgggcctgggcgcgggggagaggcgggtctgtcctcgggaactgcaaggccctgtgagcgggaggactgggatcccggccgcggctgctggaagcgtcgaagctcagcggggccgcggacactgacctgtgcttagaactcatcctggcccgcagagcctgccgcgagtccctggcgtcccctgtggcgggctcttggagccactttcccgagcggaagtcagcccgcggctcggactccgggcgggacctgctcggaggaatggcgccgccgggttcaagcactgtcttcctgttggccctgacaatcatagccagcacctgggctctgacgcccactcactacctcaccaagcatgacgtggagagactaaaagcctcgctggatcgccctttcacaaatttggaatctgccttctactccatcgtgggactcagcagccttggtgctcaggtgccagatgcaaagaaagcatgtacctacatcagatctaaccttgatcccagcaatgtggattccctcttctacgctgcccaggccagccaggccctctcaggatgtgagatctctatttcaaatgagaccaaagatctgcttctggcagctgtcagtgaggactcatctgttacccagatctaccatgcagttgcagctctaagtggctttggccttcccttggcatcccaagaagcactcagtgcccttactgctcgtctcagcaaggaggagactgtgctggcaacagtccaggctctgcagacagcatcccacctgtcccagcaggctgacctgaggagcatcgtggaggagattgaggaccttgttgctcgcctggatgaactcgggggcgtgtatctccagtttgaagaaggactggaaacaacagcgttatttgtggctgccacctacaagctcatggatcatgtggggactgagccatccattaaggaggatcaggtcatccagctgatgaacgcgatcttcagcaagaagaactttgagtccctctccgaagccttcagcgtggcctctgcagctgctgtgctctcgcataatcgctaccacgtgccagttgtggttgtgcctgagggctctgcttccgacactcatgaacaggctatcttgcggttgcaagtcaccaatgttctgtctcagcctctgactcaggccactgttaaactagaacatgctaaatctgttgcttccagagccactgtcctccagaagacatccttcacccctgtagggggatgtttttgaactaaatttcatgaacgtcaaattttccagtggttattatgacttccttgtcgaagttgaaggtgacaaccggtatattgcaaataccgtagagctcagagtcaagatctccactgaagttggcatcacaaatgttgatctttccaccgtggataaggatcagagcattgcacccaaaactacccgggtgacatacccagccaaagccaagggcacattcatcgcagacagccaccagaacttcgccttgttcttccagctggtagatgtgaacactggtgctgaactcactcctcaccagacatttgtccgactccataaccagaagactggccaggaagtggtgtttgttgccgagccagacaacaagaacgtgtacaagtttgaactggatacctctgaaagaaagattgaatttgactctgcctctggcacctacactctctacttaatcattggagatgccactttgaagaacccaatcctctggaatgtggctgatgtggtcatcaagttccctgaggaagaagctccctcgactgtcttgtcccagaaccttttcactccaaaacaggaaattcagcacctgttccgcgagcctgagaagaggccccccaccgtggtgtccaatacattcactgccctgatcctctcgccgttgcttctgctcttcgctctgtggatccggattggtgccaatgtctccaacttcacttttgctcctagcacgattatatttcacctgggacatgctgctatgctgggactcatgtatgtctactggactcagctcaacatgttccagaccttgaagtacctggccatcttgggcagtgtgacgtttctggctggcaatcggatgctggcccagcaggcagtcaagaggatcgctgcagagcagagcagtagattggcaaaatataggacactacgaacagcacattagttccagaagaaagatggaaattctgaaaactgaatgtcaagaaaaggagtcaagaacaattcacagtatgagaagaaaaatggaaaaaaaaaaactttatttaaaaaagaaaaaagtccagattgtagttatacttttgcttgtttttcagtttccccaacacacagcagatacctggtgagctcagatagtctctttctctgacactgtgtaagaagctgtgaatattcctaacttacccagatgttgcttttgaaaagtttcgaacaattggtggtaaattggttttgggaactaacaggaagggcgttccccactagggaaaaaacaacaaaatccaacaaacaacaacacaccaaaaccaaaaccaaccaacaacacacaacacaaacaaaaacacaaaccaaccgcgggcaacaaaaacacagaccaacaacacacgccgccacacccccacaacgcacccaaaactaccccacccacacgctaggccacaccaccagggcaggggccaccgccatcaccgacgaaggcagggtaacatagacagcagcaaaaagaacgaagacaagccactaaaacgacgaaaagcaacacacgaaagcagcacatagcagaggcaagcaagcagcaaacctcgcggtgtacgaccagcacacagagaggcaagcggcacagccacctaacggagcagcccgacacaaaagaggcaacaagaacgcgaaga

SEQ ID NO: 10384 - DNA, 1963 bp, Homo sapiens
  misc_feature 1, 2, 3, 4, 5, 6, 7, 8, 9: n = A,T,C or G
nnnnnnnnnttttttttttcatcatcattaaatatttattgagtgcttactgtatgcaaggcactggggatacaaagaggtataattcatggctctgcccttaaggagctcacaatctagttggaaaaacaagacatatatatatatatacatacaaaaatcagtaacaacacagaggcctgaacaattgccaagtggacaacagtacagataataaagaagcaagaaacgagggttcactaaaggctatagtggggaagggagtgcttcactgagagagtgggacttgaactggtattaaaaacaagagcatcccgggcaaagggaacaacactcacagctcagaggcaggaagacactctgcgggtctaagaaatgaagagttaaatgtggctagattggaggtttggtgcagggctaagagagtaatactcgcttagccaggaaaggatgcatttgttttacgcattttgtgcgtctgaggggctggcaggccttgcacgtggcagtgtctatcctgtcagatttgggaggtcagctattaattagatcagctattaatcagactgttctcctaacactttaacttcatggatgtaccttccttcctttcctaatgccaactctgtttcccgggtaggtgtttcactgcctgaatgaaatcctagatctctgtcacagtttttgttcgctggtcagtcagaacctaggcccactggatgagcgtggagccgcccagctgagcattctcgtgaaggtgcgtctgcctggaagtatgcagccttgccgaaaggacagaggtggttttgccaatggagaattcatgatctttcctctgagtcagtaaagcatttcctcaatacacacacgtacagagataagatacaaagataaaaatgttggtatcagttgattttgaagcaggtaattactgtgccacctcacagtgctcaaaaatagttcagtcctgaatagtttattcagcccatcaaataagcattgggttgttctaacttcctcacatcctcccccctccttacttccttgaactaacccccatctcactgagataattatctgcttgtaatcaaaacgggttctccccaaccccagtacttgacaaaatacattaactggaaaccagctactaaattcctactgatgaaagagtactttcataggaagtcatgcatgtatggatttggtacaagtcattttaggaactaatagaaataggaatgtgggaaggccaggtggttctgtagaattttgaacaaggcttttccaagaaactcctccctccgcccccatcctccatatggagagttggtgagctgaagtggaatgacagctgagtccttctctctgcagggctttagccgccagtcttcactcctgttcaagattctctccagtgttcggaatcatcagatcaactcagatttggctcaactactgttacgactagattataacaaatactatacccaggctggtggaactctgggcaggtaggagcaacccttgggtaactcagtagactttttaaggtggctttttaatgagttgtagaattctagaactggaagaagactttagtccaaataccctcattttataagtaaggcttagagatagaggtgtgaccatctttaataattttaatggaggttattttctagtagaagtcatcatcatcataaaatactaaaaaacctgacagtgagataggtgttaagtcctttgctaggttatgtattgctatgctgggaggcagtgggccttccactcccaattctgatatgaactagctgtgcagccgtgggcaccccgccttgctggtccctagcttccgcatctgtgaaaggaggcgaccacccgttgtaactctaaactttaaaaaaagctgataccgagattcagtggtagctggcttcccagaggtctgtcattccccggacgc

SEQ ID NO: 10385 - DNA, 1789 bp, Homo sapiens
  misc_feature 1, 2, 3, 4, 1789: n = A,T,C or G
nnnncgcggccgcgtcgacacggctgcgagaagacgacagaagggtacggctgcgagaagacgacagaagggcaacacataaaaaaaaaaaaaaaaaaaaaaaaaaaaaagcggccgctcgaattcgagaagacgacagaagggtacggctacgagaatacgacagaagggtacggctgcgagaagaggagaccgcggaagttgatgccgagcgcagatcgcttgcagcttgctagctgtgtgggctgggaggtctggtagggctgagcttgcaagaggatcaacatgcctttggctagagatttactacatccgtccttggaagaggaaaagaaaaaacataaaaagaaacgcctagtacaaagtccaaattcttactttatggatgtaaaatgtccaggttgctacaagatcaccacggttttcagccatgctcagacagtggttctttgtgtaggttgttcaacagtgttgtgccagcctacaggaggaaaggccagactcacagaagggtgttcatttagaagaaagcaacactaatgattcaaacagcttcctgaattttaattttgtgttgtctcacagaaagccttatcataaattccataattctaattaatttaccaagataatgtaattacatttggttttgtaaggtatacagcagtaatctcctattttggtgtcagtttttcaataaagttttgattatgggcaaaaaaaaaaaaaaaaaaaaaaaaaaaaaaatttaagtatgccatacatttatatatatggtgtatatgaattctggtttaaacattttaaaatttatctgattagttcggtcttcacacttggcacaacacaagtccggaccgccaaccacaacacggagccacggcgcaacaccggctcaatggaccagccccccggccacgaatccggtgcgtggacatccaaagatccggtatactagcggacccccccactgctgcgtatcgcgtcccactcacggaataaacctaaaatatgtcgacgcctaccagagacaacgggaagcactacagacaacatgtgaacaatgatggcaggcgcaccacaaacagtgtcggccgcaaacaaaatagaacaacgcgacgcaccgctcctttgtctgtgcatcacattcatctctcctacgtgagaaggagagaaagaacgcgagagagggagcagaacagagcagacagagaagaagcaagccaaaaaaaaagggagccagaagggaagagccagcagagcagaaggaacgaagagagagagcagaagagactgagacagaggagaaagaaagagacaggccaacaaagagagagagaaaagagaacagaaagaaagagaacagaagaaaaaagacacaacaaagaaagagaaggacaggccccaacgaacgagaaaaggcgaagagaggacgagagacagagaaagaagagaaaacagacgccaacgagggaacaagcgaacgcgagcaacaaacaacaagaacagaacacacgacggaagaagaacgagagcagggagcaacgagacgcaagcacagagaaggacacgaaacagagagcacgagagaacaacgcaaacagagcgaacgaacaaaagcgaacagaacaacacacgcgaccccggacaaacagccgaaaagcaaggacaacagcagaagcacgcagagagaagacgagcacagaaccgaagcgcaacgaggccgggaccacgaggacacaggcagcgccagatccgaggagccaagaacaccgacgagtacaagaan

SEQ ID NO: 10386 - DNA, 546 bp, Homo sapiens
aggtacgcggggcaggtgatgtttgttttcacgatggtcttcagatgcccacgtgggcactgctgagaaagccacttggtaaaactgatgccggaaatggggctttttgggatccctgctcagctgcttctgagtcccagcatgccctggttacctatggccctctttcccatgggacctgacctatgatcggcccccgctcctaggcgtggtgaccaagatgaagatgcagaggaccattgtcatccgccgagactatctgcactacatccgcaagtacaaccgcttcgagaagcgccacaagaacatgtctgtacacctggtccccctgcttcagggacgtccagatcggtgacatccgtcaccagtggggcgagtgccggcctctgagcaagacagtgcgcttcaacgtgctcaaggtcaccaaggctgccggcaccaagaagcagttccagaagttctgaggctggacatcggcccgctccccacaatgaaataaagttattttctcattcccaaaaaaaaaaaaaaaaaaaagcggccgct

SEQ ID NO: 10387 - DNA, 1478 bp, Homo sapiens
  misc_feature 1, 2: n = A,T,C or G
nngtgcaacaaaaggggcttatgcccccctgttttttccccccccttttttttttttttttttttttttttttttttttttttttttttttttttttttttttttttttttctgatttcaagtcaagatttattgctttacaaacaaacattatacttggtcttaatagaaaaatgacaccagatacatccaaaatacatttcacattgggatagctgccagttcagcacaaaacatacattactaggagcagggaggcatgaaaataaactatatcttactttttggtacgtcaggaacacttttgcctgaagtaagccctttagtactattttttattttatttatttttttaatccacccatctgcacactggccctttagtactctttaagtataaaactttacttgtcctgggctttgacccttgtgtttgatctaaatgacatttcaaacataaatgtcttttgactagtgcgcttactgttatgtacagaatttaaaatgtgatcgtttgaatataaaatctggtttgatacatgatataaaagttgtatatttaaattcaagaaaatgtttttgtggactatttctactaaagaatattaaattaaaataatttaaaaacttatgaagcaatgatctgttaactggacaggtcaattatctgagctgtgtaaatcattgtctggcactacagttgaatcaccttgacactgagctcaggagcagcccatttaagaagcatcttgtaaataacaaagtgacaccttcgagattacagttgcagctatgcaagtcattcacagagtagctgagggctctcttctgaaggaggacccattacatgaaggtagacctttcatgtcttgttgccgacgtccaagtctcttgcggtccagaaatgccaggatggttgtttcaaatgcattgggtatgaactgcaccttgaatctgcccttccctttttcgattaaaccttttcacatagctgctgctgctccttagcagtccatcccctggacggaggcggcctctcaggacctggagcagagctgtagggagctgccgtctcttatggtagatgtggcccatcacaatatacctgctgccaggtttaaactctggacacggcttattgcagctggaggagtccagggctaacatgtggactcggaagaagaagccgtcgggggtgaggtacaggcggttcatcttgtacagcccgtcccgatccaccagcagggtcaccagccggatgcccgcgcccagcacgtccacatcgtgcacgatcccgttcaccgcgaattcgctctcgcagaacgcctcgcgttcgtccagatcggaccggcaggcgcgcgcgcagggctcagcgccgggctccgcgtccctctgcggcgggctgaggccgaagctgaggctgaagcgcggcggcggcgcgggcgcgggtcccggggccagcgcggcgacgcgcggcc

SEQ ID NO: 10388 - DNA, 1232 bp, Homo sapiens
  misc_feature 1, 2, 3, 952, 1216, 1217, 1218, 1219, 1220, 1221, 1222, 1223,1224, 1225, 1226, 1227, 1228, 1229, 1230, 1231, 1232: n = A,T,C or G
nnncgcgtccggaaataacctgaccgagagcatcaccccctaacatggacttgcagaattccacagaagagaggagactggcctatacagacagccccaggagctgatggcccaacaggctttgtaccctggatgctgctcccgtgccttggcgccggccgcaataacctgacgtgtacagaagggccatgctgttattactcttacacaaggaggcagccctcgagccacagggtccagctgttggctataatagcctaccggtctctgatgatcaccatgtttctggaattcaagccaggaagaagcagcaatctgtcttctggattaaaactgaagatcaacctactttcaacttactaagaaaggggatcatggacattgaagcatatcttgaaagaattggctataagaagtctaggaacaaattggacttggaaacattaactgacattcttcaacaccagatccgagctgttccctttgagaaccttaacatccattgtggggatgccatggacttaggcttagaggccatttttgatcaagttgtgagaagaaatcggggtggatggtgtctccaggtcaatcatcttctgtactgggctctgaccactatggtttgagaccacgatgttgggagggtatgtttacagcactccagccaaaaaatacagcactggcatgattcaccttctcctgcaggtgaccattgatggcaggaactacattgtcgatgctgggtttggacgctcataccagatgtggcagcctctggagttaatttctgggaaggatcagcctcaggtgccttgtgtcttccgttttgacggaagagaatggattctggtatctagaccaaatcagaagggaacagtacattccaaatgaagaattcttcattctgatctcctagaagacagcaataccgaaaaatctaatcctttatctnaggctcgaacaattgacgattgagtctatgaaaacatagcgggggaatctccatcatcggttaccagtaaccatttgggcctggaaaacccgaaggggcccggggggggtacccccagccaagagaaacacataaggaaacagagcatgaagaaaaaccggggggggacaacaacaggcgggaaaaataatactcggaagggcgcccgggggagacaacaagagaacgggggcgccgccaaaatagggcgtgaaagaaacacannnnnnnnnnnnnnnnn

SEQ ID NO: 10389 - DNA, 1485 bp, Homo sapiens
  misc_feature 1, 2, 1483, 1484, 1485: n = A,T,C or G
nngacgcccgtgcagtacatttgccaagtggcaccttctttcaatttatgttttattttgctatggtggtgattctttatttgctggttgtcttttctcacacatctttctctctgtctctctctttcctgctctttgtttttctgcccagaaaaacctgacttcgataccaaaaaagatgaaactacagaaactcaaatttaaaaaaaactttaaaagaaacaaaaaaatactcaacgattctttcagctttattaacattttccattgtttcttgcgacttgtgtctcgttctttgtagtattgatgatgaacatttgataatgaatgttcttgtatattcagataaagaaaaaaaaaaccaaaaaagcggtctgaatttaatagtgtttataataaaaattttaaaaatgaccctcatagcacgcaaaacaggatggggaatttcccctcttctttctgtgacaatgcgcatcattcctgcattagtttttaacaccagactacctacattcatcatttccctcatttttcttttattttcttgcatttgtgaattagttcaagaatgctagaaaagtgtcgagttgtgcacatccatttcttgtttcacaatgtttaaaagtgacagtaattcattttgtaaactaaaaaaaaaaaaaaaaaaggttggaatagtgagcataataggtacaacctaacacattattatgtttattaactttgagacccagaaataaattcttttcttttcttgattcttgctcttaaaaatacaaaaaaaaaaatgttttgttttgtgttatttttggtttgtttattggggggctttttttaattgtcaggattatgatcttgctgtttttcttcaatatgtatacaaggtgatgtgaaaagatgacttgggcagaggagtaagaacaagtaggcttgttcttctactttgcttcagaattcagttaatgccaaaagcgaagatcaagcccatgttgatgtctcgttgctcacctgcatttccagagagtgtgacactcatgcagtccctgagaaaaataaaatcagggacatacttctccttttagccttttaaaaattcaaaaacgtttagtccaagggaactttttatgctatcaggaaaggtttttgctgtttttgattctgattatcacagccaagtacttgtttatttctcccctaatttatatctacattccggggggcctcttccaaccagagaggccttttcttccaggagaagtcccgcaggcagatggctggtattgaatgcggcacccattggctctaaagtaacacctacatgcaggaagacattctttgggcgcccagtctctgccagcttgaatcctggtttgggatgaacgagcttaactgagcatatgggggccaggtccaatgatgtcagttcacaacgcaagaaggtacgccacttcacagagtacacctctagtcactctgacttaannn

SEQ ID NO: 10390 - DNA, 3499 bp, Homo sapiens
  misc_feature 3499: n = A,T,C or G
cgtccggttcctcttgaataaagagttgcttttcatatttgaggatcgatactgtaatgacaggttgttaaatctcagccactgtctgattaagctggtggtgtgaatggcttaaagataactacacctgaggagcagttcactctcatttcatctacaccccaggaaaagacaaagtggctacgagctataagccaagccgtagatcaggctttgagagggatgtctgatctccccccttatggaagtggtagcagtgttcagagacaggaaccacccatttcacgcagtgccaaatatactttctacaaggatcctcgcctaaaggatgccacctatgatggacgctggctttcagggaagcctcatggcagaggggttttgaagtggcctgatggaaagatgtattctggcatgttcaggaatggcttggaagatgggtatggagaatacagaatcccaaacaaggcaatgaacaaagaagaccattatgtgggccattggaaagaaggaaaaatgtgcggtcaaggagtctacagctatgcttctggtgaagtatttgagggctgttttcaagataatatgcgtcatggtcatggtcttctacgaagtgggaaattgacgtcctcttctcctagtatgttcattggccagtgggtaatggataagaaagcaggatatggtgtctttgatgatatcactaggggggaaaagtatatgggaatgtggcaagatgatgtgtgtcaagggaatggtgtggtggttacccagtttggattatactacgagggcaactttcaccttaataaaatgatgggaaatggggttttgctttccgaagatgatactatctatgaaggagaattttcagatgactggactcttagtggaaagggaacactgactatgccaaatggagactacattgaaggttattttagtggagaatggggatctgggataaaaatcactggaacctacttcaaacctagtctatatgagagtgataaagacagacctaaagttttcaggaagctaggaaacctggcagtgccagctgatgagaagtggaaagcggtgtttgacgaatgttggcgccaactgggctgtgagggcccaggccaaggggaagtttggaaagcatgggacaatattgctgtggccttgaccaccagtcggcgccagcacagagacagtccagaaatattgagtcgttcacagactcagacactagagagtttggaattcattccacagcatgttggtgccttctctgtggagaaatatgatgacatcaggaaatatttaataaaggcctgtgacactcctctgcaccccctgggcaggcttgtggagacactggttgcagtgtatagaatgacatacgtgggcgtaggagccaaccgcaggttattgcaggaggctgtaaaggagattaagtcctatcttaagcgaattttccagctggtgaggttcttatttcctgagctgcctgaagaaggcagcacaattcctctctctgctcctctgccaaccgaaaggaagtctttttgcactgggaagtcagattcccgatctgaatcaccagagccaggttatgtagtaacgagttctggattattgcttcctgtgctgctacctcggctctacccaccgctgtttatgctttatgctttggataatgatcgcgaggaagacatttactgggaatgtgtccttcgactaaataagcagccagatattgctctcctgggctttcttggggtgcagaggaaattttggccagcaaccttgtcaatccttggagagagtaaaaaggttttgccaaccacgaaagatgcttgttttgcctcagcagtagaatgtctgcagcagatcagcacaacatttaccccatcagacaaacttaaggtcatccagcagacttttgaggagatctctcagagtgtcctggcgtcactccacgaagacttcttgtggtccatggatgacttgtttcctgttttcttatatgtggtgctacgggccaggattaggaatttaggctctgaggtacacctcattgaggatctaatggacccctatcttcagcatggggaacagggtataatgttcaccaccttgaaggcatgttactaccagattcagcgtgagaagcttaactaggctgcataacagcttgaaaactggattatctactacagagtgttataacaccatctggagtcttcctgtagtggcaaaaaagaacagtgttgaaattggaaaggactttgtgttatttaggttgttagaatgagccttaccaataataagagccctgagcccagaaaaaaggactgtatagtttaaagggaggattgaaagggaggtaaaaaatcagattagaccagttcttggcctatgataagttccaaaaataccatttatctactatttgaaaaaagaagaggatatcccttcctacagtaaagggtatgtcagctacatgaagttgtaagaaaagcttccagtagagcttcttatattaaagaagttgatggatatttttgaatttctggtttgcctgaatccacctgcagttaccccgatccgtttgcaagaaccagatcgtacttgaaactatagtggccacactctgccttcctgagtcccttccagtcatgtgtgcatcatgtctctttgccaagggaggggagaaaggaacttttaaactgcagttttaactttttctaagctgtttcttgatgggagaggttctgtgcaaaactaccacattctgtccccaaaatgtggaatgcatccaaataggagtcttctgcctcttaacttaaaagaacataggaattttgtttttggtttctttatcatgctacagagagtgaatacactggaattcagacaccgactctgagctgctaggaacctcatttgtccatgtgcaaacgctgtattccaaggcctgtgaatggcagcctgaggaagttttgcatgcaggctgtgttttcgagcaggactaacaactgggaaataagcaaaaaactgcatcgatccccagcctggtgttgttcttccctatacttcacactgaactcaggatgggaagaaaaaggaaacaagctttggctttttccatctcaaaagtattgtggcacctcaacatttcagtgttttgctttttaaaaaatgccctattgtaagttgttggtttatactgtataagtaacactagtagctgttttgaataacataggtgctcttcctcatctcatctcctacaccgtggtgagcatacagagtgtcctgatttgtgttaagtgactgagaagatgttaattacttttgaaaaaggatcatggtttttgctctactttataatcaagacaagtgtttattaaaatactgttttggaatgttggctgtaatgtaacagcaattttcataataaaaggcattcatctttaaaaaaaaaaaaaaaaaaaagggcggccgctagacn

SEQ ID NO: 10391 - DNA, 1450 bp, Homo sapiens
gcgtccggccaaacaacagcttcacaagactctgggttctttagccctcatctccttcaatccaccctctttataaccagtccttcttgtttttcccctcccagctttgttcagcagcatgcccttcacccagaccttgtcttgtcactcatccctactcgccatcattctttcattcctcttggcccaatctctctccactacttcctgcctacatgtatgtaggttattcatttccctctcttgattccccccacccaactctctttctccatttcttgcctttcagaagaacatgtgatcatccaggccgagttctatctgaatcctgaccaatcaggcgagtttatgtttgactttgatggtgatgagattttccatgtggatatggcaaagaaggagacggtctggcggcttgaagaatttggacgatttgccagctttgaggctcaaggtgcattggccaacatagctgtggacaaagccaacctggaaatcatgacaaagcgctccaactatactccgatcaccaatgtacctccagaggtaactgtgctcacgaacagccctgtggaactgagagagcccaacgtcctcatctgtttcatcgacaagttcgccccaccagtggtcaatgtcacgtggcttcgaaatggaaaacctgtcaccacaggagtgtcagagacagtcttcctgcccagggaagaccaccttttccgcaagttccactatctccccttcctgccctcaactgaggacgtttacgactgcagggtggagcactggggcttggatgagcctcttctcaagcactgggagtttgatgctccaagccctctcccagagactacagagaacgtggtgtgtgccctgggcctgactgtgggtctggtgggcatcattattgggaccatcttcatcatcaagggagtgcgcaaaagcaatgcagcagaacgcagggggcctctgtaaggcacatggaggtgatggtgtttcttagagagaagatcactgaagaaacttctgctttaatgactttacaaagctggcaatattacaatccttgacctcagtgaaagcagtcatcttcagcgttttccagccctatagccaccccaagtgtggttatgcctcctcgattgctccgtactctaacatctagctggcttccctgtctattgccttttcctgtatctattttcctctatttcctatcattttattatcaccatgcaatgcctctggaataaaacatacaggagtctgtctctgctatggaatgccccatggggcatctcttgtgtacttattgtttaaggtttcctcaaactgtgatttttctgaacacaataaactattttgatgatcttgggtggaaaaaaaaaaaaaaaaaaaaaaaaaaaaaaaaaaaaaaaaaaaaaaaaaaaaaaaacccaaaaaaaaaaaaaaa

SEQ ID NO: 10392 - DNA, 313 bp, Homo sapiens
  misc_feature 1, 2, 3, 4: n = A,T,C or G
nnnnacgcgggggctgaaaagtgcgccctacgaaaggacggtcgactccggcggggcccaggtgccaatgggtcatgtttggttagaaggtgacaatctacagaattctacagattccaggtgctatggacctattccatatggactaataagaggacgaatcttctttaagatttggcttctgagtgattttggatttttacgtgccagccctaatggccacagattttctgatgattagtaagcatttattcttttgacttgattattgtctccttttcatgtgaatttattactcccgttgaaaccgtgt

SEQ ID NO: 10393 - DNA, 4649 bp, Homo sapiens
  misc_feature 1, 2, 3, 4, 5, 6, 7, 8, 9, 10, 11, 4514, 4515, 4520, 4525,4526, 4647, 4648, 4649: n = A,T,C or G
nnnnnnnnnnnccacgatggagcgcgacggctgcgcggggggcgggagccgcggcggcgagggcgggcgcgctccccgggagggcccggcggggaacggccgcgatcggggccgcagccacgctgccgaggcgcccggggacccgcaggcggccgcgtccttgctggcccctatggacgtgggggaggagccgctggagaaggcggcgcgcgcccgcactgccaaggaccccaacacctataaagtactctcgctggtattgtcagtatgtgtgttaacaacaatacttggttgtatatttgggttgaaaccaagctgtgccaaagaagttaaaagttgcaaaggtcgctgtttcgagagaacatttgggaactgtcgctgtgatgctgcctgtgttgagcttggaaactgctgtttagattaccaggagacgtgcatagaaccagaacatatatggacttgcaacaaattcaggtgtggtgagaaaaggttgaccagaagcctctgtgcctgttcagatgactgcaaggaccagggcgactgctgcatcaactacagttctgtgtgtcaaggtgagaaaagttgggtagaagaaccatgtgagagcattaatgagccacagtgcccagcagggtttgaaacgcctcctaccctcttattttctttggatggattcagggcagaatatttacacacttggggtggacttcttcctgttattagcaaactaaaaaaatgtggaacatatactaaaaacatgagaccggtatatccaacaaaaactttccccaatcactacagcattgtcaccggattgtatccagaatctcatggcataatcgacaataaaatgtatgatcccaaaatgaatgcttccttttcacttaaaagtaaagagaaatttaatcctgagtggtacaaaggagaaccaatttgggtcacagctaagtatcaaggcctcaagtctggcacatttttctggccaggatcagatgtggaaattaacggaattttcccagacatctataaaatgtataatggttcagtaccatttgaagaaaggattttagctgttcttcagtggctacagcttcctaaagatgaaagaccacacttttacactctgtatttagaagaaccagattcttcaggtcattcatatggaccagtcagcagtgaagtcatcaaagccttgcagagggttgatggtatggttggtatgctgatggatggtctgaaagagctgaacttgcacagatgcctgaacctcatccttatttcagatcatggcatggaacaaggcagttgtaagaaatacatatatctgaataaatatttgggggatgttaaaaatattaaagttatctatggacctgcagctcgattgagaccctctgatgtcccagataaatactattcatttaactatgaaggcattgcccgaaatctttcttgccgggaaccaaaccagcacttcaaaccttacctgaaacatttcttacctaagcgtttgcactttgctaagagtgatagaattgagcccttgacattctatttggaccctcagtggcaacttgcattgaatccctcagaaaggaaatattgtggaagtggatttcatggctctgacaatgtattttcaaatatgcaagccctctttgttggctatggacctggattcaagcatggcattgaggctgacacctttgaaaacattgaagtctataacttaatgtgtgatttactgaatttgacaccggctcctaataacggaactcatggaagtcttaaccaccttctaaagaatcctgtttatacgccaaagcatcccaaagaagtgcaccccctggtacagtgccccttcacaagaaaccccagagataaccttggctgctcatgtaacccttcgattttgccgattgaggattttcaaacacagttcaatctgactgtggcagaagagaagattattaagcatgaaactttaccctatggaagacctagagttctccagaaggaaaacaccatctgtcttctttcccagcaccagtttatgagtggatacagccaagacatcttaatgcccctttggacatcctataccgtggacagaaatgacagtttctctacggaagacttctccaactgtctgtaccaggactttagaattcctcttagtcctgtccataaatgttcattttataaaaataacaccaaagtgagttacgggttcctctccccaccacaactaaataaaaattcaagtggaatatattctgaagctttgcttactacaaatatagtgccaatgtaccagagttttcaagttatatggcgctactttcatgacaccctactgcgaaagtatgctgaagaaagaaatggtgtcaatgtcgtcagtggtcctgtgtttgactttgattatgatggacgttgtgattccttagagaatctgaggcaaaaaagaagagtcatccgtaaccaagaaattttgattccaactcacttctttattgtgctaacaagctgtaaagatacatctcagacgcctttgcactgtgaaaacctagacaccttagctttcattttgcctcacaggactgataacagcgagagctgtgtgcatgggaagcatgactcctcatgggttgaagaattgttaatgttacacagagcacggatcacagatgttgagcacatcactggactcagcttctatcaacaaagaaaagagccagtttcagacattttaaagttgaaaacacatttgccaacctttagccaagaagactgatatgttttttatccccaaacaccatgaatctttttgagagaaccttatattttatatagtcctctagctacactattgcattgttcagaaactgtcgaccagagttagaacggagccctcggtgatgcggacatctcagggaaacttgcgtactcagcacagcagtggagagtgttcctgttgaatcttgcacatatttgaatgtgtaagcattgtatacattgatcaagttcgggggaataaagacagaccacacctaaaactgcctttctgcttctcttaaaggagaagtagctgtgaacattgtctggataccagatatttgaatctttcttactattggtaataaaccttgatggcattgggcaaacagtagacttatagtagggttggggtagcccatgttatgtgactatctttatgagaattttaaagtggttctggatatcttttaacttggagtttcatttcttttcattgtaatcaaaaaaaaaattaacagaagccaaaatacttctgagaccttgtttcaatctttgctgtatatcccctcaaaatccaagttattaatcttatgtgttttctttttaattttttgattggatttctttagatttaatggttcaaatgagttcaactttgagggacgatctttgaatatacttacctattataaaatcttactttgtatttgtatttaaaaaagaaaaatattcctatcctgctcactggtaattaacataggtttaaaatggcttcaaatgtggccctatagacggttaaaattgtaccttatcttggcaaaacttcagagcaccagtcagtgcatgcaaggtgccattttttattgagatgcttagaatgtttctttctgtgcacaagacttaccctaccagcagcagagccattctctgttgagtggttcattttgaagttccacagattgaagagaacatgccaccaatcacctcacatcttcttggtggacatgataaatgacacaatgaacttgatttctttactaccttgctgtagctttttatccctacctgtgaaccttcaaagactgcattaacttttaggctacataggtccaattgaggtataatatcagtacaccaaagatttttatatggccttcgtgtgaccattcttcaacggcctaagggccagctgcaaagacttttggaaaatacaatttacaactcaaaattatttaataatttaggaagttgcttttttttttttttttttcagtcctgcagtttcctgaagctctgtatatgatatttttttcagcctgcttctctctgttgttcagattaggtaattttattcttctgtctcgaagctcactgattctttattctgtctaatctgttctgctgttgagcccatttattcctgatttttatattttagttattgtatgttttatttctaaaatttccattcagtttttctttatatcttctatttgctgagaatttctgtctctttgctgagactttctacgttttcatttgtttcaagtgcatttatacttgcttgttgaagaatttttatgatggctgctgtaaaatccttatcagataattccaacatctgtcacctcattgtttgcatctactgatggtcttttttccattcggaaacattttcctgtttcttggtgtgtggaatgattttttattgaaacctggatatttttaggtaaaannaacanaaaanntctctttactcttaatttttttctcttatttttttttattttatataaaaaacctcggggggggggcccccgggcaccccaatttcggcccctattaggtgggggcggttaattaccaaannn

SEQ ID NO: 10394 - DNA, 2027 bp, Homo sapiens
  misc_feature 1804, 2025, 2026, 2027: n = A,T,C or G
gttgctgggtagatgaggccaacacaggttgcaagaagaggcggggtttagaggcgtgaaactccgcagtgctcagccaagcagggagcaacgctaggaagggcgggcagaaagggcacgctcttgtgggtgactacaggttaggagaccgttgaacctggaggggccctaggatggaccccgtggaaagattcagagactgcgccctctccctggcgccgccttcccctacacgcggcgggtatattctgttgcagttggcccaggacctgtttccaagactctgccccctcgcacttccgtccctcctggttttgtaaagtgatgctcataggaacccccaccccgcgtgacactactcccagctcctggctgacttctagtcttctggttgaagctgcgcctttagatgacacgaccctacccacccctgtttccagcggatgcccgggcctggagcccacagaattcttccagtccctgggtggggacggagaaaggaacgttcagattgagatggcccatggcaccaccacgctcgccttcaagttccagcatggagtgattgcagcagtggattctcgggcctcagctgggtcctacattagtgccttacgggtgaacaaggtgattgagattaacccttacctgcttggcaccatgtctggctgtgcagcagactgtcagtactgggagcgcctgctggccaaggaatgcaggctgtactatctgcgaaatggagaacgtatttcagtgtcggcagcctccaagctgctgtccaacatgatgtgccagtaccggggcatgggcctctctatgggcagtatgatctgtggctgggataagaagggtcctggactctactacgtggatgaacatgggactcggctctcaggaaatatgttctccacgggtagtgggaacacttatgcctacggggtcatggacagtggctatcggcctaatcttagccctgaagaggcctatgaccttggccgcagggctattgcttatgccactcacagagacagctattctggaggcgttgtcaatatgtaccacatgaaggaagatggttgggtgaaagtagaaagtacagatgtcagtgacctgctgcaccagtaccgggaagccaatcaataatggtggtggtggcagctgggcaggtctcctctgggaggtcttggccgactcagggacctaagccacgttaagtccaaggagaagaagaggcctagcctgagccaaagagagagtacgggctcagcagccagaggaggccggtgaagtgcatcttctgcgtgttctctatttgaacaagcatttcccccagggaagtttctgggtgccccactaagtagaataaagaaaaacggttataaataaaaaaaaaaaataaaaagaaagaaaaaaaacaaaaaaaaaaaaaaaaaataaaaaaaaaaaaagaaaggggcgggcgccgcagcacataaaatctccccgcggaggggcggcccccacgaatagcagccaccccaccacacttgtcgatgacaaaaacggggcggcccccatataaggaggggccattattattatcagcatagtagacgagcgagcgtagccgagaagaaacaaacaacgccgcccgagcagaggagcgggaaccaacagcgcgcacacacggcgaggcgcgaccactcgtgtggcacagagagcagcccacccaccacaccgcacgcgagggggggggagcgacacccaaactaaggtcgcgcggccaccacaaaccaccccctcacagcgacgcaaataactatgngaacggcaccccccacgagagggcgacacataacacacacacacactccaccgagcgcaggatcatcggtcggcggatgaaaaccacccaaaccgcccgacacacaaagcgatacgcagacgcgcacgcagactgaaaagacgatggaggagcaactaatcgaacgcagatgatcagctactctgcgaccaccagacaacctctaatctacacccgcgacnnn

SEQ ID NO: 10395 - DNA, 1052 bp, Homo sapiens
  misc_feature 1, 2, 3, 4, 5, 6, 7, 8, 9, 10, 11, 12, 13, 14, 15, 16, 17,18, 19, 20, 21, 1030, 1031, 1032, 1033, 1034, 1035, 1036,1037, 1038, 1039, 1040, 1041, 1042, 1043, 1044, 1045, 1046,1047, 1048, 1049, 1050, 1051, 1052: n = A,T,C or G
nnnnnnnnnnnnnnnnnnnnngcttcctctgagtgttctcatctgtctctcctgtgtctatagtgtctttctgcgtgttcgtctgcgtcgttccattgtcctgtctgtccttagtctgtttttccttgactttttcggcgtctggtgtcactctactttagggtgttcgtcttgtgtatcccgccccttttcgtgttttgcgttcctgggcttgtttgacatagccgcccagacagatgtagtttcttttgggagtgctcggtccttggccaatccttcggaagtagcctagctgtacatagtttagctcttcaggcctctggtttttggaggcagaagtccagagatactggctctgccaagctgtcgtactgggctgtggcacagccttcgagacaacacgggtgtatctctgatcctgccctacctaggcttcaaggggcttctgtctggagaaatgccctcaaagggtaaccagtaggtgtggcattgaattggccagtgttagcatctacagccatcaccgagatgagtccactgccgttgcctgcccgagggccccctaaggttatagacggtatcagcagggaggccgtcccgctggttttctaggagagcccacaggaggaagggagcctcttcaggggcactggaatcttttgtgccaggggcttcttttcatcagagccggggagtacattgcagtgacttcttaaacatttgtgtgggacagacgagcgtgagggaggttttaagccaggcacaaagttagtttccaatactagttaataaatctatttttcttcatttcctttttttgcacagaagctggtaatctaggacctacgtgtgaacaactttatatgaatattttttgtacttggtttacttgggttggtatgatacattatatttaagttccttgaacactgtggatcccctaatgtgtatgaatgactgaggctttgtaaattaagggacgtttgtgtgaataaagttatttgatggggtcaaagaagccatatgtgannnnnnnnnnnnnnnnnnnnnnn

SEQ ID NO: 10396 - DNA, 1152 bp, Homo sapiens
  misc_feature 1, 1149, 1150, 1151, 1152: n = A,T,C or G
nctgcaacgccgagcggaggaggcaggaaccggagcgcgagcagtagctgggtgggcaccatggctgggatcaccaccatcgaggcggtgaagcgcaagatccaggttctgcagcagcaggcagatgatgcagaggagcgagctgagcgcctccagcgagaagttgagggagaaaggcgggcccgggaacaggctgaggctgaggtggcctccttgaaccgtaggatccagctggttgaagaagagctggaccgtgctcaggagcgcctggccactgccctgcaaaagctggaagaagctgaaaaagctgctgatgagagtgagagaggtatgaaggttattgaaaaccgggccttaaaagatgaagaacaagatggaactccaggaaatccaactcaaagaaagaaagaaagaagactgtgtttttgccactgatttagccatgtgaaactcatctcattacccttttctgggtttgaagctgctgtctctagaagtgccatctcaattgtgctttgtatcagtcagtgctggagaaatcttgaatagcttatgtacaaaactttttaaattttatattattttgaaactttgctttgggtttgtggcaccctggccaccccatctggctgtgacagcctctgcagtccgtgggctggcagtttgttgatcttttaagtttccttccctacccagtccccattttctggtaaggtttctaggaggtctgttaggtgtacatcctgcagcttattggcttaaaatgtactctccttttatgtggcatattaggggcgattgtgcagaacgcgaatcctagtggcacggttggactgcatttgcacgtgtttttggaagaaaaaagagggttcgtttcaaaaaaaaaaaaagaatcggcgggctttatttggtgggcgaaaaaggtgaaaaggggataggtagtgatgatgtgaccctttgttaaaggggaagtggggcccatagatgagtactatggagcagtaagtagcatattcgattaaagtagtgaatgagcatcattgagggtagccaagagtagaatagagtaaagtgttaatggtacttaagtaactgcagtatgagtacgattgagatttgttgtcattagtaagttaggagtagtagtgnnnn

SEQ ID NO: 10397 - DNA, 1579 bp, Homo sapiens
  misc_feature 1, 2, 1577, 1578, 1579: n = A,T,C or G
nnccgatttcttcctgtgtttgagaatgaacatttttaaattttaaagttgtacaggttttttgcttttccattatttttatccttgtttggtaacttctatgaaaatatatatatatatatttttttgccatttaactgttgtatgttactctgtgtctgtaccatatagaaaaaaaattgtttttgtttttggttctctatgtgatatcagttaacaatgtaacactagctttacctgtcaaattctgctaggtcttctctgaaaacgttgtttttaaaaatgatattgcttggtaatagtgcaatttctatccttttccctcccccctcaacttttaagttcttttctttataattttgctgccccctccctgatggtttgggtttttgtttttgtttttgtttttttttttcatggagctactatgccatcctccctctgtgaggcagagtgactgtcagtgttttgttatgccatgccttgagctgtgggtgtttggcgacaataaggtggttgaatagattggctgagcacacttccacccacctagtgttctcagaggggttatgtgattgtttcaacctggagtgggttgcacccttaatgctttcctctgcaactaaaccgcccacatatatgttcattgaaaaaagtaagaataattctcagcactaacccagaagtagcaaagcagtcagtgatggtgaacattagaggtcaaacatgagttagatgtttgtgggctgacagccatcgtggctatgaccagtactatttacaaagcatgaattcactacaatgctcaactgtttgtttagctttatctcacttggggaatttattcctgtctgctgcattgtaggtagctgggtaggatatatttccacttgctttttaaattagttcttcacctccattgacactcgttttttggttttctccctatagtgtgggttggtgctagacaccagtctgacccacagaatgggagttatttcatccatctttcctccatccttccaaaaaccacatatctacacaaggaaaaatttaatacatctaggaattttttttttaattacaagctatttaaagagatgaatgtggccaaagttttacacaattgaaaataaagtaaaacagacggcatgtgtttaaacctgagtttatcaggcatggcaggaagttgcaggagagagaggcagtgacccaagccagtgcacttgatgttcatggacatatattttttttaaataataaattaaaacattttaaatagaagcataaattgagttgtttgttggcgctgagatactgcccactgtgaaacaaagctttgactagttttttgtttgtttactttcttcaggggggaggggggcaagtttgggtaggaaagaaagcataaatgaacgtgaccctgaggtgaagaggtatatgaacagcctttgcaatgtacccctgcccggacaaccgaacgcaaatacacaaccacacacacctataagcacgttgaaaccaacaactgccgtcccggccgttatactattacagtgaacactggacaactaccnnn

SEQ ID NO: 10398 - DNA, 1222 bp, Homo sapiens
  misc_feature 1216, 1222: n = A,T,C or G
acgcgggggttcccaggatggtgatccgtgtatatattgcatcttcctctggctctacagcgggaagagatggatcaagatggtgaaatagaagactccaccaatcatccccttcacacgaacaccaatttaacaactatctacatgcacacacacaaaagcttcatcaatttaacaactatctacatgcacacacacaaaacctttgtaagaactcaaaatcagattaagaagaaacaacaagatgtgcttggtttcctagaagccaacaaaataggatttgaagaaaaagatattgcagccaatgaagagaatcggaagtggatgagagaagatgtacctgaaaatagtcgaccagccacaggttaccccctgccacctcagattttcaatgaaagccagtatcgcggggactatgatgccttctttgaagccagagaaaataatgcagtgtatgccttcttaggcttgagagccccacctggttcaaaggaagcagaagtgcaagcaaagcagacaagcatgaaccttaagcactgtgctttaagcatcctgaaaaatgagtctccatgtgcttttataaaatagcagaattagcttggttcaaaaagaaataggcttaatgttgaaataatagattagttggggttacacatggcaaacattcaaaatgaatacaaaattaaaattgaacattaatggtgataaatggtgaggagaatgggatattaaccataaaattatattactcagtagatatcgtagaaatagtgttgtcaccttgccaagccatcctgtatacaccaatgatttttacaaagaaaaacccttccgttcttctggcattaatatggaaaattaagtgtatctgcaggtctacattaacaggagaaagagcaataactgtctctcattctagtgcttattagtttcatgaacaagaatttgtcacgtttggagtgctatattactgggatacaaagttctggagggtaggtaatgacatgtaacgtgtacttccatggtatattacatccacatttggttaggaagtttattggacagattttgagtaagggcttagaattgggacgaagattttagcacagaagttcagggaggtgaaacaggaagaggtacagtggagtagttagaggggatagggcacgaataactagagggaaaaaaaggcggtggagatgtgcatgatcatgangagccn

SEQ ID NO: 10399 - DNA, 2804 bp, Homo sapiens
  misc_feature 1, 57, 58, 59, 60, 61, 62, 63, 2800, 2801, 2802, 2803, 2804: n = A,T,C or G
nctgccaacaagaagcattagaacaaaccatgctgggttaataaattgcctccttcnnnnnnnaggtacgcggggacactttcaggctctgatcgcggccgcagtttttttttttttcttctgccgtcgccttctctgcctcttctcatcctttctcgctctgctgctctgcagtgtgacgagtccgaatcctcttcccacccagcccgcgcctttcttcttttgcctgcgctgttctatttctccttcggccgccgccgccactgctgcacacagctggtgtcggtgccgcgcttttacccccaagtcgttcccgcagcctatggcccaggccgccttgggtatttctgctcaaggtaaccacatccctctttaaaaattccgccgaaaaagagaagacgctttacccgactctttgggccgttatctcacggcgaactttctgaccaagtatacaactacccagagggcctaggagaagtgctgtatagagagcagttcgacttcaacgctgagccaccttgggaacctagctgatgataggggggttccatctcccaacttgtccatggaggtcttcacttcagaaatccaagactcatattcatccagcttggtgtcaagtgggctgttgctgccagaattatcttgtgattatttgagagatgtatcagtttcttctgaagtacaatcaactgtagaagcctttgtagcagtttgttgcatattctaaggacccagacataggcttggtggcccgtctcttgtctttcctggtttatgactttcggctttgtggaatacggctgagatgaaaggatttattgatgatgcaaactactccgttggcctgttggatgaaggaacaaaccttggaaatgttattgataactatgtttatgaacataccctgacagggaaaaatgcattttttgtgggagatcttggaaagattgtgaagaaacacagtcaatggcagaatgtagtggctcagataaagccattctacacagtgaagtgcaactctgctccagctgtacttgagattttggcagctcttggaaccggatttgcttgttccagtaaaaatgaaatggctttagtgcaagagttgggtgtacctccagaaaacattatttacataagtccttgcaagcaagtgtctcagataaagtatgcagcaaaagttggagtgaatatcctgacatgtgacaatgaaattgaattgaagaaaattgcacgtaatcacccaaatgccaaggtcttactacatattgcaacagaagataatattggaggtgaagagggtaacatgaagtttggcactaccctgaagaactgtaggcatctcttggaatgtgctaaggaacttgatgtccaaataattggggttaaatttcatgtttcgagtgcttgcaaagaatctcaagtatatgtacatgctctatctgatgctcgatgtgtgtttgacatggctggagaaattggctttacgatgaacatgttagacattggtggaggattcacgggaactgaatttcaattggaagaggttaatcatgttatcagccctctgttggatatctactttcctgaaggatctggtgttaagataatttcagaacccggaagctactatgtgtcttctgcatttacactcgcagttaatatcatagcaaagaaagttgttgaaaatgataaatttccctctggagtagaaaaaaccggaagtgatgaaccagccttcatgtattatatgaatgatggtgtttatggttcttttgcaagtaaactgtctgaggacttaaataccattccagaggttcacaagaaatacaaggaagatgagcctctgtttacaagcagcctttggggtccatcctgtgatgagcttgatcaaattgtggaaagctgtcttcttcctgagctgaatgtgggagattggcttatctttgataacatgggagcagattctttccatgaaccatctgcttttaatgattttcagaggccagccatttattacatgatgtcattcagtgattggtatgagatgcaagatgctggaattacttcagactcaatgatgaagaacttcttctttgtgccttcttgcattcagctgagccaagaagacagcttttccgctgaagcttaaacaggcattaacgcttctttagatctgaagttgcaggttaagcttgtctggtcaacattccagtgtggaaaaataatttaaacaatcttattctcttaattcttttggcaacaaaaactattagtaatagctatttgggaccagacaaaatcagctttcatctataattcattggggataatgggagatttagataatgtatccagatttaaacctaccagtttgtcctaccccttaagcgtttaaaataaaatatgcaacaaaatggatgacttagtggagatggaagcccattaattgggttccccattaaatcgtttacatacaagaacacagtttttatactaaggatttgtgtttaaagtcttgtaaagttcatgtctttcacccagatatatcaaatgttagaagaccagtgtgacttcattagataacgtttagtgtatttagaatgtgtaaatttgtgctttgaactgtagtttaataaatgtaaaattgcatcatagtatttgttgacctaatgtaacccttgtatgattgcaataaaattttgtgtagattttaaaaaccaccaaagcctagacacacaaccggggcccaaatcccggggccactcgtaccctattggaaggcccagggcannnnn

SEQ ID NO: 10400 - DNA, 933 bp, Homo sapiens
  misc_feature 923: n = A,T,C or G
aggtacgcggggggagcgctttaggctggccggcggcgctgggaggtggagtcgttgctgttgctgtttgtgagcctgtggcgcggcttctgtgggccggaaccttaaagatagccgcaatggctgaaaatggtgataatgaaaagatggctgccctggaggccaaaatctgtcatcaaattgagtattattttggcgacttcaatttgccacgggacaagtttctaaaggaacagataaaactggatgaaggctgggtacctttggagataatgataaaattcaacaggttgaaccgtctaacaacagactttaatgtaattgtggaagcattgagcaaatccaaggcagaactcatggaaatcagtgaagataaaactaaaatcagaaggtctccaagcaaacccctacctgaagtgactgatgagtataaaaatgatgtaaaaaacagatctgtttatattaaaggcttcccaactgatgcaactcttgatgacataaaagaatggttagaagataaaggtcaagtactaaatattcagatgagaagaacattgcataaagcatttaaggtatgataatacagactttttctagttttaaaatatatgggacataacttaaaaaaatattttccttcctttttacagggatcaatttttgttgtgtttgatagcattgaatctgctaagaaatttgtagagacccctggccagaagtacaaagaaacagacctgctaatacttttcaaggacgattactttgccaaaaaaaatgaagaaagaaaacaaaataaagtggaagctaaattaagagctaaacagtaagtatgttgaactaatcacgacataatttgaattccttaaaactctgacagaaatatagctggtgagctctggaaatagtggccgtaggaccttttntctttgctag

SEQ ID NO: 10401 - DNA, 1479 bp, Homo sapiens
  misc_feature 1282: n = A,T,C or G
ccacgcgtccgggctcatgctcgggagcgtggttgagcggctggtgcggttgtcctggagcaggggcgcaggaattctgatgtgaaactaacagtctgtgagccctggaacctccactcagagaagatgaaggatatcgacataggaaaagagtatatcatccccagtcctgggtatagaagtgtgagggagagaaccagcacttctgggacgcacagagaccgtgaagattccaagttcaggagaactcgaccgttggaatgccaagatgccctggaaacagcagcccgagccgagggcctctctcttgatgcctccatgcattctcagctcagaatcctggatgaggagcatcccaagggagagaaccatcatggcttgagtgctctgaagcccatccggactacttccaaacagcagcacccagtggacaatgctgggcttttttcctgtatgactttttcgtggctttcttctctggcccgtgtggcccacaagaagggggagctctcaatggaagacgtgtggtctctgtccaagcacgagtcttctgacgtgaactgcagaagactagagagactgtggcaagaagagctgaatgaagttgggccagacgctgcttccctgcgaagggttgtgtggatcttctgccgcaccaggctcatcctgtccatcgtgtgcctgatgatcacgcagctggctggcttcagtggaccaaattttcaggatggctgtattctgcggtcagaatgagagagtcaagctgggcagaatctctcgccaagagttcagtttcgcatagtgtaaacattcactatgtcttttaccttccctgctcctcccatctgggaggcgctgatgctattacccagtgctgaaaaatggcactctaaaggtatgggaaggaaggagcccaaggcaaccacctgctgtcctttcagccttcctttggagactgctccatcagtgccgaggtgtgtgggaacaggcttcactgcaccgccgtcttactgagttgcttcacgtgaggaaaagggggctttggccctgtgactcagttccacattttggattgcatactggaaaagaagccaatcttcttgctagtaaaccagcaacccggctgtatacagtggtgacccaagcaatggatataaacctaaaaatctgagggaggggagaggtggaatacagtagttcttggaatctgaagtctcctatttgatcaggttattttccctggacttggcaaaaatctgatggggtggggatctcctagganctagtgacatctggtattaattttaatctcaggaaaaacaagaaattaaccagagagagtctgggtttcggaattccaggtagtaacttcaagaacgtggtgtctggctccattttgcttgtaattcagtcctgaattaaggtggagcactttggtataggctgggtgaaaggtggggggttcctcatttctcccta

SEQ ID NO: 10402 - DNA, 561 bp, Homo sapiens
  misc_feature 1, 561: n = A,T,C or G
ngcaacgcacccggacaggagtggctttagaagtggaactagcctcggagaagagaggcgagaagaagttgtctgacaggcgttaggacccaggaggcaagggtcaggatagataggatagaagggcaagtctcacttgggcgatgtgactttgagagttccactcatggccacaaggtcaactaacttgttgtcgggaccccgaagctgaatggctttcctctctggtgaccctcggctcagcccagaagtacaggagatgtggaacctggttccaggcaaaccaacgcttccaactccaaagagttgggggttgttagagagccctttcccagaaagcccgacactcatgtctttagtctggcagctgcactagtcactttcaactggctgacaggtgcccagtatttagcccccaaattctaaggaaaagtaggacagaatagcaagtgaaagggatccgatggtaccccccacttggcgatagctgattgccccatctgggtcaccaaagtgtgtccagaatgggttccttccagtgggttctgggtctcgctgacn

SEQ ID NO: 10403 - DNA, 2516 bp, Homo sapiens
gggagtcgacccacgcgtccggccgggagcccaggagttcctggatccaaaggagagcacggattcatgggtcctccggggccccagggacagccggggttaccgggatccccaggccatgccacggaggggcccaaaggagaccgcggacctcagggccagcctggcctgccaggacttgcgggacccatggggcctccagggcttcctgggattgatggagttaaaggtgacaaaggaaatccaggctggccaggagcacccggtgtcccagggcccaagggagaccctggattccagggcatgcctggtattggtggctctccaggaatcacaggctctaagggtgatatggggcctccaggagttccaggatttcaaggtccaaaaggtcttcctggcctccagggaattaaaggtgatcaaggcgatcacggcgtcccgggagctaaaggtctcccgggtcctcctggccccccaggtccttacgacatcatcaaaggggagcccgggctccctggtcctgagggccccccagggctgaaagggcttcagggactgccaggcccgaaaggccagcaaggtgttacaggattggtgggtatacctggacctccaggtattcctgggtttgacggtgcccctggccagaaaggagagatgggacctgccgggcctactggtccaagaggatttccaggtccaccaggccccgatgggttgccaggatccatggggcccccaggcaccccatctgttgatcacggcttccttgtgaccaggcatagtcaaacaatagatgacccacagtgtccttctgggaccaaaattctttaccacgggtactctttgctctacgtgcaaggcaatgaacgggcccatggccaggacttgggcacggctggcagctgcctgcgcaagttcagcacaatgcccttcctgttctgcaatattaacaacgtgtgcaactttgcatcacgaaatgactactcgtactggctgtccacccctgagcccatgcccatgtcaatggcacccatcacgggggaaaacataagaccatttattagtaggtgtgctgtgtgtgaggcgcctgccatggtgatggccgtgcacagccagaccattcagatcccaccgtgccccagcgggtggtcctcgctgtggatcggctactcttttgtgatgcacaccagcgctggtgcagaaggctctggccaagccctggcgtcccccggctcctgcctggaggagtttagaagtgcgccattcatcgagtgtcacggccgtgggacctgcaattactacgcaaacgcttacagcttttggctcgccaccatagagaggagcgagatgttcaagaagcctacgccgtccaccttgaaggcaggggagctgcgcacgcacgtcagccgctgccaagtctgtatgagaagaacataatgaagcctgactcagctaatgtcacaacatggtgctacttcttcttctttttgttaacagcaacgaaccctagaaatatatcctgtgtacctcactgtccaatatgaaaaccgtaaagtgccttataggaatttgcgtaactaacacaccctgcttcattgacctctacttgctgaaggagaaaaagacagcgataagctttcaatagtggcataccaaatggcacttttgatgaaataaaatatcaatattttctgcaatccaatgcactgatgtgtgaagtgagaactccatcagaaaaccaaagggtgctaggaggtgtgggtgccttccatactgtttgcccattttcattcttgtattataattaattttctacccccagagataaatgtttgtttatatcactgtctagctgtttcaaaatttaggtcccttggtctgtacaaataatagcaatgtaaaaatggttttttgaacctccaaatggaattacagactcagtagccatatcttccaaccccccagtataaatttctgtctttctgctatgtgtggtactttgcagctgcttttgcagaaatcacaattttcctgtggaataaagatggtccaaaaatagtcaaaaattaaatatatatatatattagtaatttatatagatgtcagcaattaggcagatcaaggtttagtttaacttccactgttaaaataaagcttacatagttttcttcctttgaaagactgtgctgtcctttaacataggtttttaaagactaggatattgaatgtgaaacatccgttttcattgttcacttctaaaccaaaaattatgtgttgccaaaaccaaacccaggttcatgaatatggtgtctattatagcgaaacatgtacttggagcttataggacttattctgtattaaatattttcaggttttaaacactaatcaccaactgaatgacttgatttcaaagcaacacttaaggcggcattcattagtttctcattctctccggtgaaacagtctgtgacccggttcgttttcccgtagcctctggcatcgggtccaga

SEQ ID NO: 10404 - DNA, 7404 bp, Homo sapiens
  misc_feature 1, 2, 7380, 7401, 7402, 7403, 7404: n = A,T,C or G
nncgtccacgcgtccgcccgcggcggtgctgcgcggatccggcgtcggggcccggcatggcgggggccggggccaagccgggccggacccggacctaaatgcctctgttcttctccgcgatgggcacctgcagcatcggtctggggagaacagcattcgagctgccgggtggcttgtggtccggttggccaccaagtggtgtcagcggaagctgcaggcggagctaaagattggctccttccgctttttttggatccagaatgtcagtcttaagtttcagcaacaccagcaaacagtggaaattgataacctgtggatttccagcaaactccttagccatgatcttccagcgctggggtggatcaaaaggaactgtccttcagcccatccttattgaagatcttctgccaactattctccattcatgtagatgctataaacatcatggttctcaaggtggatacctctgagtccttatggcatattcagatcagtagaagcagatttcttttggatagtgatgggaaaaggctaatctgtgaggtgagcttatgtaagatcaacagcaaagttctaaagagtggtcagctggaggacacctgcctagtggagctttcactggccctggacctgtgtctaaaggtgggcattagcagtcggcatctcactgctatcactgtggatgtgtggacactccatgctgaactgcatgagggcctcttccagagccaactgctgtgccagggcccaagcctagcatctaagcctgttccctgttcagaggtgacagaaaacttagttgagccaactctgcctggcctattccttctccagcagctgccagaccaggtcaaggttaagatggagaacacaagcgtggtattgtccatgaatagtcaaaagaggcacctgacttggactctgaagctgctgcagttcctgtaccaccgtgatgaggatcagctgccccttcgaagcttcacagcaaactctgatatggcacagatgagcactgaactgctgctggaagatgggttgttgttgtcccagagtcgccaacgcattgtctgcctcaactccctcaaggctagtgtgcaggtgaccaccattgacctctcagcctccctagttctgaacacttgcatcattcactaccggcaccaggaattctctcactggctgcacctgctagcactggaaacccaagggtctagttcacctgttctaaagcaaaggaaaaaaagaaccttcccccaaatcctggctcccatcatctttagcacctccatctccaatgtcaacatttccattcaacttggagatacaccaccttttgccttgggattcaattctatctctctggattaccagcacctcaggccacaaagcatccatcagcggggcgtcctaactgtggaccacctctgctggcgtgtgggcagtgactcccacattcagcgggcgccacacccacccaatatgcatgtttggggtgaggcacttgttctggactccttcacactacagggtagctataaccagcctctgggcctgtccagcacccagtcagataccctttttcttgattgtaccattcgaggacttcaggtggaagcatcagatacctgtgcccaatgtctgtctcgtatcttatccctgatgggtccacaatctgggaagtcagctgtctctaggcactcttcatttggggaatctgtgtcattactgtggaaggtggacttgaaggtcgaagacatgaacttgtttaccctttctgccttggttggtgcttcagaggtacgactggacaccctaactatcctgggcagtgcagagacgtccactgtggggattcaaggacttgtgttagcgctggtgaaatcagtcacggagaagatgcaaccctgttgcaaggcccctgacatccctaccccagtgctcagcctttccatgctctccatcacctatcacagcagcatccgctctctggaggttcagtgtggtgcagggctgaccttactttggagccccccagatcacatgtacctgtaccagcatgtcctggccactctacagtgccgagacctactaagagccactgtgtttcctgagactgtaccatcccttgcactagagacttcaggaactacttctgagctagaaggccgtgcccctgagccattacccccaaagcggctgctaaacctaaccctggaggtgagcacagccaagctcacagcttttgtagctgaggacaagttcattaccctggctgcagagagtgtgtcactgagccggcatggaggttccctgcaggcatactgtccagagctggctgctggctttgatggcaatagtatcttcaacttcaaggaggtggaggtgcagctgctacctgagctggaagagatgatcctccaccggaaccccttccctgcgctgcagaccctccggaaccgtgtttggctcctctctttcggctcagtctcggtggagtttccttatcagtatgacttttctcgaactctagatgaggctgtgggagttcagaagtggctgaagggactacatcaagggactcgtgcttgggcctctccaagccctgtcccactcccacctgatctactcttaaaggttgagcacttctcatgggttttcttggatgatgtttttgaggtgaaacttcatgataactacgagctgatgaaggatgaaagtaaggagagtgccaaaagactacagctactggatgctaaagtggccgcccttcggaagcagcatggggagttgttgcctgcccgcaaaattgaggagctctatgcctctttggaacgcaaaaacattgaaatctacatccagcgttcccgtcgtctctatggcaacacacccatgcgccgggcactgcttacttggagcttagcagggctagaactggtagctctggcagatgcctccttccatggtcctgagcatgtggtagaacaggttcaagagcttgatccaggcagcccttttccccctgagggattagatcttgtcattcagtggtgtcgaatgctcaagtgcaatgtcaagagctttctggttcggatcagggactatccacggtacctgtttgagatccgtgactggcggctaatgggtcgacttgtgggcaccgagcagagtggtcagccttgctcccgtcggcgtcagatcttgcacttggggcttccgtggggtaacgtggcagtggagaggaacatgcccccactcaaattctaccatgactttcactcggaaatattccagtacacagtggtgtggggcccatgctgggatccagcctggacactaattggccagtgtgtggacctcttgaccaagccctcagctgaccccagcccacctttgccctggtgggacaagagccgtcttctgttccatggagactggcacatggacattgaacaggcgaacctgcaccagctggccactgaggatccatacaacacaactgaaaatatgcactgggagtggagccacctgtcttttcattggaaacctggtcagtttgtgttcaagggtgacttggatatcaacgtgagaacagcctctaagtatgacgactgctgcttccttcacctgcctgacctctgcatgacactggacctgcagtggctgtgccatgggaacccccatgatcaccatagtgtcactctgcgggccccagagttcctgcctgaggtgcccttgggccagcttcatgactcctaccgggcctttcgctcggagaacctcaatctctccatcaagatggatctgactcggcacagtggaacaatatcccagccccgaattctgctatatagtagtaccctgcgctggatgcaaaacttctgggcaacttggacaagtgtcacaaggcctatctgcaggggaaagctcttcaataacctgaaacccagcaagaagaaacttggtcagcactacaagcaactttcctatacagccctctttccccagctgcaggtacattattgggcctcatttgcccagcaacggggcatccagattgagtgcagtcagggccatgtcttcactcgggggactcagcggcttatacctcaagcaggcacagtgatgcggcgccttatctctgattggagtgttacccagatggtgagtgacctaagtcaggtgaccgttcacctgatggcctcacccactgaagagaatgctgatcactgtcttgatcccttggtaacaaagacccacctgctgagcttgtcctccctcacctaccaacggcatagcaatcgcacagctgaggaggagctctctgctcgtgatggggatcctacctttcatacacatcagctgcacttagtagatttacggatttcctggacaactaccaatcgagacattgcctttgggttatatgatgggtacaaaaaggcagctgtactcaaacgtaatctttctactgaggccctgaaggggttaaagattgatccacagatgccagccaaaaagccaaagcggggtgtcccaactagtgcctcagccccacctcgtgttaacactcccagcttcagtggacaacctgataaggggtcatcaggaggtgcttacatgttgcagaagctaattgaagagacagataggtttgtagtgttcacagaagaggaatcaggcatgagtgaccagttgtgtggcattgctgcctgccagacggatgacatatacaaccgaaactgccttattgaattggtcaactgtcagatggttcttcgtggagcagagacagaaggctgtgtcattgtgtcagctgccaaagcccaactgctgcagtgccagcaccatccagcctggtatggtgatacattgaagcaaaagacatcctggacttgcctcttggatggcatgcagtactttgccaccactgaaagcagccccacagagcaggatggccgacagctctggttagaggtgaagaatatcgaggagcaccggcagcgtagtctggactctgtgcaggagctgatggagagtgggcaggcagtgggcggcatggttaccacaaccacagattggaaccagccagctgaggcacagcaagcccagcaagtccagcggatcatttcgcgttgcaactgccgaatgtactatattagttacagccatgacattgatcctgaactagcaactcagattaagccacctgaagttcttgagaaccaggaaaaggaagatctcctaaagaagcaggaaggggctgtggataccttcacccttatccaccatgagctggaaatttccaccaacccagctcagtatgccatgatcctggacattgtcaacaacctgctgctccatgtagaacctaagcggaaggaacatagtgagaagaagcaacgggtcaggttccagcttgagatctctagcaatccagaggagcaacgcagcagcatactgcatttgcaggaggctgtgcggcagcatgtggcccaaatacgacagctggagaagcagatgtattctatcatgaagtctttgcaggatgacagcaagaatgagaatctgcttgacctgaaccagaagcttcagttgcagctaaaccaggagaaggccaacctgcagctggaaagtgaagaactgaatatcctcatcaggtgttttaaggatttccaactgcagcgggctaacaagatggagctgcgaaagcagcaagaagatgtgagtgtggtccgtcgcactgagttttactttgctcaggcacggtggcgcctgacagaggaagatggacagctgggaattgctgaattagaactgcagaggttcctctacagcaaggtgaataagtctgatgacacagcagaacatcttctggagttgggctggtttaccatgaacaacctcctccccaatgctgtctataaggtagtactgcggccccagagctcctgccagtctgggcgacagctagctctccgcctcttcagcaaagttcggccccctgttgggggtatctctgttaaggagcattttgaggtaaatgtggtgcctctcaccatccagctgacacaccagttcttccacagaatgatgggctttttctttcctggccgaagtgtggaagatgatgaagttggtgatgaagaggataagtccaaactggtgactactggaataccagtggtgaagcctcggcagctgattgcaacagatgatgcagtaccactgggccctgggaagggtgtggcacagggtttgactcggagttctggggtcagaaggtcatttcgcaaatcgccagagcaccctgtggatgacattgacaagatgaaagagcgagctgccatgaacaactccttcatctacataaagattccacaggttccactgtgtgtcagctacaagggtgagaagaacagtgtggactggggtgaccttaacctggtgctgccctgtctggagtaccacaacaacacatggacatggctagactttgccatggctgtcaaaagggacagccgcaaagccctggttgcccaggtaatcaaagagaagctaaggctgaagtctgcaacaggctctgaggtccggggaaagctagaaactaaatcggacctgaacatgcaacagcaggaagaggaggagaaagcccggctcctcattggtttaagtgtgggcgacaagaaccctggcaagaagtccatctttggcaggcgcaaatgatttggcgattcgagtggctgcagtacaggatctgactctggctcaggctccagggacttgtggggtgggaggggcttcccgttatccacgaggatttgtgggtgtcagagcccataggcatcactcttcagcacctggtctgttcgctgcagggcatggtggacagtaatgctgagttctgtctcacactgatcaggctcagggccagagaggcaacaagagagcaagacccagggaatgggcccagggcaggaccctattcccttggggtcaagtgaaagggtagggggatagtcctgatcaagtgtgataaatttttatagacatatataaatatatatatattatatatatatttctaagtgtaactgtccttcctctgtgccaggaaacgggagggggctgatcctctgatcctcactccactgtcatgtttgaaagaggtattggtgttctggagtgggggtcaacccctccccagtctctgtgctaagttcacttgggaggatggcagtaggagccagggctggccatgggtcccctacccttccccgtaggatataccctggagaatggcaaaatgatttaaagagaaaaaaaaagatattttaaatttgatgcaaattcttccggtatgggctcgaaggaactttggcntctcttatctacttctttccnnnn

SEQ ID NO: 10405 - DNA, 231 bp, Homo sapiens
aggtacgcgggcgccgtggagtgggagagcaatgggcagccggagaacaactacaagaccacgcctcccgtgctggactccgacggctccttcttcctctacagcaagctcaccgtggacaagagcaggtggcggcaggggaacgtcttctcatgctccgtgatgcatgagggtctgcacaaccactacacgcagaagagcctctccccgtctccgggtaaatgagtgcga

SEQ ID NO: 10406 - DNA, 1040 bp, Homo sapiens
  misc_feature 1, 2, 3, 1036, 1037, 1038, 1039, 1040: n = A,T,C or G
nnncgcactgaccagtgaagcgcagtgaagcagtgggaaccggaatatccaaagagtggtttgaaggagaaagaagcattgtggctttatatcctctgggcctgggtttcctgaagtcaccacacatagaggagagagaaaatggctgagttaaagtacatttctggattgggaatgagtgtcttcagaggatcctcgctgccaggttccctgccagaaggacagaataatcctcaggtctgcccctacaatctctatgctgagcagctctcaggatcggctttcacttgtccacggaggcaccaaataagagaagctggctgtataggattctaccttcagttttctcacaagccctttgaatccattgacgaaggccatgtcacttcaccaatgggatgaagttgaatccttgattcctaaaaccaaggtttaggatggaaaccaatttgtgagaatttcccaaaaaagccattcttccagaaacgaaacggtcagcactttctgtggaaggtgggcttgcaatttaccttggttggttgggaggcttggaggaccacttacacgtcttaaccacatgggggttgtggctaattccaacatttgtgtccttctgggcataacctcccatggggagaaaaccacgaatggcgttttaaccaacttcccgattgggagaccctttcttgtgatgggtgtcccggcgcagaaaggggaaccctttcttcaattttaaacacccgagggttatgggaacgatggcttggtcacagggcccacatgaggcattctggcggtcgctttggaaaggcaatggggggtcaccgcctagattgcctttggaggaaaccaggggcctacatcttggaggtctatggtgtccactttgagttacctgaccttggaccaattggggccaatggcttggccaatcctcgtgattttttgatacccattgcctggtatgaggatcgccaagtacctcgggccgctctagaacttagtggaatcccccgggcctgcaagaattcgatannnnn

SEQ ID NO: 10407 - DNA, 7167 bp, Homo sapiens
  misc_feature 1, 7005, 7006, 7021, 7049, 7060, 7062, 7075, 7092, 7095,7153, 7154, 7155, 7156, 7157, 7158, 7159, 7160, 7161, 7162,7163, 7164, 7165, 7166, 7167: n = A,T,C or G
nagcagcagcagtagcagcagcagcagcaacaacagcgctgcttgtcacgaatcgaggatgcaatgagctcatcgttttctccttgcagcttcacaactgccctggcttcctggctactgtctgctgtgtcttctcacacatagacacgcacacacacacatagacacgcacacacaccctttctcgcacacacacacacacacacacacactctcacacattctcacatgctagacccttctaagcagcttgtccgtttttacacatgtatctgaactctcctgcatcactcttggccattttctcgcattcgattgcttttgccgttttttatttagatcagtacttgatttcattttcattttccagtctactttggggttctcgcagtggataatttagccaaaatgtttttcttgtggagacattagctgacaattcccaccacagactggcttgtacgtcctcccagggagacctaaacctggctcccctcccaccgcagttcttaatattgtggataagagatccatctttctcattctggatacctacttagtgctcatggaagaaggggtgccctgcccagccccagctgctaagctcacacctcctgtcaaaaagtcccaggacatgcacgacgagaggagcaagctggtgaatgagtatgcgtgtcgagtgctggaacttctggggatggggcatcgtctgtttgtgcctcggcttctggcgacctcaaaggaagaccttctgcaggctgattttgaaggtgctttaaagttctttagagttcagcttccaaagagatacagggcagaggaaaatgcaagaagactgatggagcaggcttgcaatattaaagtaccaaccaagaagctgaagaaatatgagaaagaatatcagacaatgcgagagagtcagctgcaacaggaagacccaatggatagatacaagagggagaaccgaagattacaggaggccagcatgaggttggaacaagagaatgatgaccttgcccatgaactagtaacaagcaaaattgctctacggaatgacttggatcaggcagaagacaaggcagatgtgttgaataaagagctccttttgaccaaacagaggctggtggagactgaagaggagaagaggaagcaagaggaagagactgcccagctaaaagaagtcttcaggaaacagctagagaaggcagaatatgaaataaagaagactacagctatcattgctgagtataaacagatctgttcgcagttgagtaccaggctggagaaacagcaagcagccagcaaggaggagctggaagtggtaaagggtaagatgatggcatgcaaacactgcagtgacattttcagcaaggagggtgctttgaaactagcagccacaggcagagaggaccagggaattgaaacagatgatgagaaggactcacttaagaagcagctgagagagatggaactggaactggcacaaaccaaactgcagttggtggaggccaagtgtaaaattcaggaacttgaacatcagagaggagcccttatgaatgaaatccaagctgcgaaaaactcttggtttagcaaaaccctgaactctatcaaaacggccacgggcacccagccattgcagccagcaccggtcacccagccacccaaggagagcacatagttccagccttacccaagcacaagagcacaatgttcaaaccaatggaaatctgggaggattcttcctggtgtccctttgaaggaaagtcaaggaggccagaaaacaagccagaatttttcagtagctctcactctttcttgtatgacacttttcaaagggatgctatttaaactgacctgttctatgttgaatacctattttccagcttctggaaggccatgttcagatccatcatagtattacacattattttgtttgcctgatgtttagttggaaataagtaattcagaactaaatgcttttttatttagaattattcataattatttttatcttacataaaaatggagacatctgttattccaaggttgaagtgataagaagatctttgtcacaggaaaaaaaaaaattgaaacctaaacatcttaagttttcaggatttattcagataaagcacactgtggggccaggcatgaccactctcaggtttcctcctgagcctgattcccagggaagtgttaatcctgtccaaaggaaagaaccaatcagcgatcattggtttactttcattttctgttcggtacatctggaaatgaagtgccaggaatagacgggctgttcagattatacgctaggtaaaaggaactgaaattttaataagtgtaggtcaggatcatttgggctgtggtattctaacagatccttttaagaatgccacataggacttgtgagttcctaagtacaccaaagtatggacacagatgtgacttctggcaattataaagttaaaggtggatattgcaccttacagacttagggagcctttaccagagacgcctaaaaagccccaggttcagccattgtgctgaatagagtggaatatagaaccagggacagagtatttcatttaacgttgatatatacttgctaaggaaacactaacaatactgtaactttgttaaaggacatagtattgaaatgggaaatagaggtcaggctcacatcatcttagtttaatgctgggcaactttttctgatttctgtagttccctgaaaatgtgtccttcgtacccataaagagatacaaatgcatttgtaacatttttgattgaatataaaacctttacagaaatacttatctcatggaaaggtaaagctattgtttaaaaattagtggaaatattttttcaattatatttaacatgcctataaaaatagtccttgcaggaaattatttgataagagcaaaactatttttattttataaactattttggaggcctctgatcctttcaaaccaaccaaactactattagatatgtacaataacatttgttgatattaatcattggcctcattgttgaacatattatttgcaaagaatcttaaactctgtagtgccagaatgattctcatctgtgccatattttgcaattaaaagtaacacacccttagaagaatcaaataagagccatctacatcccaggaggatgcaccaagttgctcacagtggatcttttcctctaaaatgatcttttatgttctaaaaagtgaaatcccctttatctgtgtttatattctctacagcccataaaactgatgtgattgttatgttatactcatcagataatacttttcttacataaatctttcattgttgttctgacatctttcattacaaaatttattttcttaacaaaaaggaacataacccagcattccaagtgtctgtgttggctttaacattctctacatggtggtctagataagctaattttttttttttttttttttgtaaaatgtaatagctagaaaatgttatcttggcgcttgtttttgtaaatcatttagtataggctgttagctttactggtactttacgctttgattccaagaagccttgtgcagttgccttatcaaatggccagctaaattaaagatgctcttttgtgttgtgaatttcatagttctgtacagagcttgtttcaatttacaaaaataagtacattccacagaatgcctaaattgtgtaattttctttaaataatagtaggtgagggagaaacataatggctctaggtcaatcccttatctaaagaccttgttcaacttcatagtccctttccttttaaagaggagaagagaaaaatcccccctggccaggcatggtggctcacatctgtaatcccagcactttgggaggctgaggtgggtggatcacctaaggtcaggagtttgagaccagcctggccaacatggtgaaaccctatctctactgcaaaatacaaaaattagccgggcttggtggcgggtgcctgtaatcccagctactcgggaggttgaggcaggagaatcacttgaacccaggaggcagaggttgcagtgggccaagattacggcattacattccatccagcctgggcgacaagagcaaaattccgtctcgaaaaatcaccaggtacatacctctcaagtttgataagtccatcttttgagttttcttttagctctttcaaaagattacgagggcaatacatattttttttttttttattctccagccccatatcatacttgggtatgcctgttggtaccataagcctaaactctccttcactgcaatgcctttgagtcagtagcaatagtaaagactagaaacaaagaaaattcagaatttggtatgtgatatgattgttcatacaatatgttataatagcaatattccaaacaatatgtccttcactgtctattgttggaaaactcatgcatcccagcatgaagtaactcctagttttaattttagttattttgagatatatttgagaattgcatctcttctcttgaatttcatttagaagagattaaccagccaaatatccaggaaagtttcaaaacattctagtgtttttcatcctttgctaggatgcactctgtacaaaacattcctctgaaaatctaatatttgcagtatctaagaattgatcatttctattttcattaaattctgtggaaaaaattaaatgaatgaaattcaacttcataattcagttcatcagcttttgtatcttgagaatctaaacacgtctttaaatctgaaagaaaccaagctggattttgcagtgcatatgtttgctagcttcccacatcctgaaccatgtcaaaatttggttttatttagttacatataatttaatgcaaagaaattctgttacttaatgttctgtttatttatgagtgcctatcaggaacactaataggaatgccattcaaccagtgtcttctgcccctctcccagctgttaaattagtacttcttcattggctttctgaaatgtcctgagtaaagtagaaaagcaacctttgtatggatgtggggatatttaatagtatgtatcttgtttcatttttttcctatgatgtattaatatttatttttctccaacccctgctccattttcttaaaatattttccagttaataactagttgctttatttcctagctgaagtgagaaaaccaacggaaaacaatacagatttgggcagaggagatagagttacatctttaaaggagtgagccagtcacccaggagaatcacatgtgtaactgatgtaggggtttaagtcttcatactttcactaaaatctgtctactaactctcccaccaacctttgcatcaaacacttaggtacctgcctgattaggggggcccctttaagggaaaaaacttttaaaaaattaaatgccttggttttgttttatcttctgggaaagaacacttttacttgattagcaagatgattatattatataacttgcccttaaaaacactccaaaatactgactccttttctccaattacaaatgagtgtgaagaaattctgttgtatgatttgaacactattaggtttgtatgtgtgtttaattggaagaattttatatagagtatctctgctgcttttgtttacctgggtaccacacaaccaaatacacattgagatttcaagaaatgatgatgaaagccagaaggccagaccacagctctgcagcctgtttcctacaaccagatataaaactctttctcgtcgccatgctgatagtcacactgaactagaactgtcccaacacattcttcctctctcataatggcttccatttaatacaggcaaagccctttaccttagcaaattctttatctttcaaaagtgaccaaaatgaggacttcaaccttggctgcacctcaataggagatgctgatcttgagttgtaatgagaaaagtgggcatataggagattttagtgactgcagtcagctgtctggcattcctttctcagtttgcatctaaaagactacatatgtcaagcttatctccacctgaatttgctgcctgctataaaaacatttcattaatatatcccattcttcctacctccatctctggtttgtcattagtggtattctgaaaagcttaagaaaaaagaatcattgagtagaaagtgaacattttaagttattttcctttttcattggcaattagttaacatgtaaaatcttttccattaaactgtataacttttaataactatatattatatatgggataaaatatatggactgaattgtgagaatataaatgcatcgaaagactctggtgtcatgaaagcacaagaataaggctggagatggtcccagatccaagatgtcccaaaagccttttgtatcagtttctctatttttggtattttgcataatgcatggatccttagttcaaatgagggacaaagtttctcagtcagccccacttcctttctttctaactcctacctttcccttgcagaggaggtagtagagattctggaattgtctatttttatgaattccattattttgtccatggcatctctaatgaaaacaggttctagaataaaggagttgattagtctgaacagtactaattaactacaaaataaacgttagtgatcagcctcttcctctataaacaatgaccaattagacgtttccgtaattccatgtattatgtatagtacactctataaatgtaaatgtaatgcttgtctaaaaagtgcaatttattgtacattgtcccaacaaatgtttacttttataatcgttatgaacttgaattggattagtatcttgtttttatgtgtgaatgaagccttgtgaaataaacaaatgcaactgagaaggtaacaaggtgactgtttttgtgagccagtgatgttttcaatgctttgtgttgcccctttggccccattaagcagtaataaacatttgttctgaagcccgagcccaaaaaaaaaaaannaaaaaaaaaccccgngggggggcccgggccccaatccccccanaagggggcggnanaaaaaccccgggncgcggtaaaaacgcggnccnggggaaccccgggggacccaaccaaacctcttagggaaatggggaggagaaaaaagannnnnnnnnnnnnnn

SEQ ID NO: 10408 - DNA, 1878 bp, Homo sapiens
  misc_feature 1875, 1876, 1877, 1878: n = A,T,C or G
aggtacgcggggggaaaagcgggctgtctcggaaactcagagccgggttcctcccgggtttctgccgggtttctccctgcggctcctgggttgttgagactcttgtgaagatggcttgcgctgccgcgcggtccccggccgaccaggacaggtttatttgtatctatcctgcttatttaaataataagaagaccatcgcagagggaaggcgaatccccataagtaaggctgttgaaaatcctacagctacagagattcaagatgtatgttcagcagttggacttaacgtatttcttgagaaaaataaaatgtactctagagaatggaatcgtgatgtccaatacagaggcagagtccgggtccagctcaaacaggaagatgggagcctctgccttgtacagttcccatcacgtaagtcagtaatgttgtatgcagcagaaatgatacctaaactaaaaacaaggacacaaaaaacaggaggtgctgaccaaagtcttcaacaaggagagggaagtacacaacccacacacacacaagccgacaatagtcgcctctctcccgcgcacctcgacgtccaccaaggaggcacgcaccggtcgaccgacaactgccagcggcctggcagatattcggggtgtaacccgccccggcccaaggttgtccctgcggagaagttgtcctccgtctgtgcaccccatgcgcagatactttactctacgaccctctggtgcacccggcacacatgtggcactgccctctggctgctcgtccagcctatgcgcgaaccataattccaaggatcccattccggtatgttggacacctccttcaaacactaaagcattcgctaatcaaatcctggcaaaatacggttccaactactgctccgatcaacacggctcccaacaagatcaccagcaatcctactccgctcattatgtccctaatcttacatacttttcttcatctcgatgacgagcagccaactatacaaagcaccgcacacaaacaacactgaaatgataaaaaatcaagatacaacaacaacgaccactaaacacgaactccagagaacaacagcagatccacaacaactcgcatcacactaatcgacgaactcagacacacgagagcaggcgagacgaaggagcgagacaagaccaacgcagacagcaaacagcgagagcatagacacagcgaccggacgaacacagcagagcaggacagcgcagcggagcaaagggcaacaacgaggccggagacgagcaagtgacagacagcggacgagagcagaagcgagagacgcaggagctgggaaagagcgagcgacagaaggcaccaagaggcgacacgcacacgaccgcaacgaaccgacgccacgagcaagcgacagcgaggaccaggagagagcaagacaacaagcgcgcgaagcgaggaggagcgaaggggaggggcggcgacagaggaaaggagagggcggagcaggaacgggcacgagagaagcgaggcagggcggcgcgagcgcccacgcgacggcgacgcggcggacagaggacggagaggagggggcgacgacgcagaagaaagtgcgacgagagaggagcagcgagaacgcgggagcggagcaggaggacgggcaaggaccgcagcgggaacagagaagcggaaagcgacacaggagcgagaggcgcgcgaacggcagaaggaagaggcgagagcagaggagaagaggagcggcggcggcgagaaggcacgggggcggacaagagcgaggcgcgccgacaaggcagagggccggacggggacggacgccacacgtagacggacatcggggcgaggacgaaggacctgcgggacgggcacggcaacggaacnnnn

SEQ ID NO: 10409 - DNA, 2584 bp, Homo sapiens
atagcctcaacaaccgatgtgagggaaaatcggtccagacacggacctgccacattcaggagtgtgacaaaagatttaaacaggatggtggctggagccactggtccccgtggtcatcttgttctgtgacatgtggtgatggtgtgatcacaaggatccggctctgcaactctcccagcccccagatgaatgggaaaccctgtgaaggcgaagcgcgggagaccaaagcctgcaagaaagacgcctgccccagtaagtgtgaggtccgctgcaagggtgagcatgggacatctgttctgcccagctggttgcctggcatctgcagcctgcagttcagtgggtcataggagcaggaaggttacctactagagaaacaaacagaagcaaagtcctgcaggctcagcaacttcttttaatgaaaaacaaactcaccctcttccccagcattctttccatgtgtcagagaagcagaggtttcttgaacgggcttaggagagtctatgacaagggagggatttgaaagttgatcttaattgttgcctggggttcatcttcttacagtcaatggaggctggggtccttggtcaccatgggacatctgttctgtcacctgtggaggaggggtacagaaacgtagtcgtctctgcaacaaccccacaccccagtttggaggcaaggactgcgttggtgatgtaacagaaaaccagatctgcaacaagcaggactgtccaattggtgagccacgcagcccaggatgaaacgacccaggagctttgctcttttactgaatgctgcagtcagcattcgaggagattccagcttggttagtcctgagcgatttgattgctctaagatgcaggtggacaacataatcccaacaagttatcggttccctataccctataatatcttacactgtgttaagtgcccagcatggcagtatggcagcttagaccaaccatttactgtgactgtctctctctccttgtctcagatggatgcctgtccaatccctgctttgccggcgtgaagtgtactagctaccctgatggcagctggaaatgtggtgcttgtccccctggttacagtggaaatggcatccagtgcacagatgttgatgagtgcaaagaagtgcctgatgcctgcttcaaccacaatggagagcaccggtgtgagaacacggaccccggctacaactgcctgccctgccccccacgcttcaccggctcacagcccttcggccagggtgtcgaacatgccacggccaacaaacaggtgtgcaagccccgtaacccctgcacggatgggacccaggcttgcactcgcagcggtacatggggtcgctatagtggcccaggtagttgcacttggcgttcttgttgcagtcgtgggtcccatccgtgcaggggttacggggcttgcacacctgtttgttggccgtggcatgttcgacaccctggccgaagggctgtgagccggtgaagcgtggggggcagggcaggcagttgtagccggggtccgtgttctcacaccggtgctctccattgtggttgaagcaggcatcaggcacttctttgcactcatcaacatctgtgcactggatgccatttccactgtaaccagggggacaagcaccacatttccagctgccatcagggtagctagtacacttcacgccggcaaagcagggattggacaggcatccatcaattggacagtcctgcttgttgcagatctggttttctgttacatcaccaacgcagtccttgcctccaaactggggtgtggggttgttgcagagacgactacgtttctgtacccctcctccacaggtgacagaacagatgtcccatggtgaccaaggaccccagcctccattgatggggcaggcgtctttcttgcaggctttggtctcccgcgcttcgccttcacagggtttcccgttcatctgggggctgggagagttgcagagccggatccttgtgatcacaccatcaccacatgtcacagaacaagatgaccacggggaccagtggctccagccaccatcctgtttaaatctcttgtcacactcctgaatgtggcaggtccgtgtctggaccgaggagccctcacatcggttgttgaggctatcgcaggaccggccgcgctgctgaattccattgccacagctcgtagaacaggaggtccactcggaccatggagaccagccatcgtccgcagagtcgctgggccaacagcgaggacagcattctccatcaggaactgtggcattggagcagggcatgatggggcaggacacctttttgcagatggtaactgagttctgacagtgacactcagtgcagctatcaacagtccattcctcgttatttctgtactgaactccgttgtgatagcataggggaggccgcctcagctcattggccaactctttgttctcttcagtcactttgcggatgctgtcctgcagcgtggtcacaatggtgcgcaggcccctgagttccaggaccatgctggacagctcatcacaggagatgccgcagatggcttgcaagtcctttgcggacgcgtgggtcgactc

SEQ ID NO: 10410 - DNA, 556 bp, Homo sapiens
agggcgaattggagctccccgcggtggcggccgaggtactacatgcacatcaatgtatgatgatgactatttggcttaaatgggatacaatattcgaccacctcaagaaccttcagtgcttgactgaaattgctaacactgatatttcttactgaaatgttcctttgggttttaaactgaggtttctattgtttgctttcaacagacatatgtttgacatacaaaatatggtaaagatccactacttctgcagtggtatatttccatattattcccttattggcctggattgcctcatcaatagcacaattcattcaaatgtggaaagaaaggcattgatacactgatcagagtaaggaaagtaatatcatatcatcaaaagtcacattaatctaaatgacaaatttattctctgttggtttccaaatctgggatgttttctaggagttgcacaataaataatatgatgtaattacctaggcttaaaagaaaagcaccattctaggaagaagtaatccactgcagtgtagcagtacctgcccgggcggccgctcga

SEQ ID NO: 10411 - DNA, 807 bp, Homo sapiens
acctcattactgctccccatgtggcctccttacccaggaaaattatgaaagtctgaactcagtctcttttgacaccatctcaacaggaggggaaggggcacctcattattgcctggcaagggaggaagtctaggttcctcactcagtctttgctggtgacacaggattctttgggaggccacttcaccaggctccacccattcagcccagcaggccgtgcttggtttgcgctactggcctggatcccatatcctgggtaaaatggtgaagggtgtgtgtgcaagtgggtgtgaggtctgaccacagtgcacagccaggcacacaggctgctgcagtggggctgggcaggcagctccagatgccagcacagatgcctccttcatgtgaggctgcagctggactaggcataccacaggcagcttctgccttaagtgccctcgctggatgaggggaatatggtggcacctaaaaactcagagatgccagcaaccagaaaaagccccaagggggtgttatagctttgtcacagctctggctcaggaagcctggaggtctgggcccccagaaggatcacagctcttctttcccatggtccagtgaacaggagcatgtcactgcccacagctcagtgagctggtcagagatgtgtgacagtgcttttcacacctgccatttggcgggtcccaggattttgtcctgtgtctgagaagaatgaggttatgtagacaatcagagactgagtaaggcagagaagagttttactgagtgacggaacagctctcagcagaaagaggaccctaagtgggt

SEQ ID NO: 10412 - DNA, 2139 bp, Homo sapiens
  misc_feature 2139: n = A,T,C or G
aggtacagtgtagaaagcagtgggaactgtgattggatttggcaacatgtcagctttatagttgccgattagtgatatgggtctgatttcgatctcttcctgatgtaaaccatgctcacccatatcccactatacaaatgcaaatggttgcctggttccatttatgcaagggagccagtactgaattatgccttggcagaggggagactccaaaagagtcatcgcaggaagaagttaagaacactgaacatcagaacagtctaccaagaaggacattggcatcctgggaaagtccgccttttcccttgaccactatagggtgtataaatcgtgtttgcaaaatgtgttatgatgtgtttatattctaaaactattacagagctatgtaaagggacttaggagaaaatgctgaatgtaagatggtcccatttcaatttccaccatgggagagcctaaaaataaattatggcatttagtatctaaggttagaaaaccacgcccacatgctaaaatgggtgttgaaaactaggttacttataatgcaaggaatcaggaaactttagttatttatagtataatcaccattatctgtttaaaggatccatttagttaaaatcgggcactctatattcattaaggtttatgaattaaaaagaaagctttatgtagttatgcatgtcagtttgctatttaaaatgtgtgacagtgtttgtcatattaagagtgaatttggcaggaattcccaagatggacattgtgcttttaaactagaacttgtaagacattatgtgaatatcccttgccaattttttttataataagaaaacatctgactaaagtcaaagaatgatttcttatggtttattttgatgaaagttcttttaacatgtcttgaatgtacacataaaggaatccaaagctttccattctaacttaatctttgtgataacattattgccatgttctacaaccgtaagatgacagttttcaatgtagtgacacaaaagggcatgaaaaactaactgctagctttcctttcatttcaaaagtccaagaatttctagtatatttggattttagcttctgttcaaagcaaatccagatgcaactccagtaagtggcctttgctcttttttgtaccaaagagcccagatgattcctacagtccctttcttctctaacatgctgtggttccttaaatatgagtaatttctctaagatataacccaggtgctttgagaagctgcattaaggtgttcaggccctcagatatcacatggtacacttgattagtaataaaaccagagatcaatttaaattgctgataggtcctgtctcagtgtgtggcattgactgttttcaggaaaatagatacagattaatatgagttatgcgtgtaggttgtgtatagattgagaagatagatacttctcaatctagtagtttgatttatttaaccaatggtttcagtttgcttgagcatatgaaaatcctgcttaatgtgcttaagagtataataaatgtgtacttttgtcctcaaacctagtagctgggttttaacactcatggacatggtcttaatcaatggagttaaataaacaaattcagcaagttattaaatctgacatggtaggagaggggagatgtgtcctgcttattaaatgtgttggtccattgaaagttacatggattgccaatttttaaaacactaaagttgaataaaatgcatgaacaatagaaaaatgctgaacattattttggatgctagctgcttggacattaactgtgttatttctgctttgagatgaaaatatatatttatctttgcttattttatcccagatgtgttctgaatatccttcttcataaatcatggaaaactcactgctgagatagtaaaccatgaaatcgccttttcagttggtgccatgtatctgacagttccatcttggaaggtttcaaaattaccttttaaaatgatctcagaagtctgtagattctcaatgatactgaaagctttgcacctctttggtagaaaccaggtctatttagaaaatggctttatgataaaatgtgcctcctgagtgataatgaaagtgttcctggatattgtattggaatttaatgtgcttaccacan

SEQ ID NO: 10413 - DNA, 1053 bp, Homo sapiens
  misc_feature 1, 1053: n = A,T,C or G
ncgaccacgcgtccgggggaggcgaggagtgtggcactttggcggggaaggggcggctcagccctcgggccctcgcccgccctctccgggtctggagcgtctcctcgcgccatccctgcaccgccagggggaacgtgcccatcgcagccgaggccagagggacccccgtccagcagagactggaaccctggtctctggccaccgcccccatccctcccccagctcctaacgccttctcttctgtgtccccatctccagaggaggctgcggaggaggaggaggaagaagaggaacgccccaaaccaagccgccccgtggtgcctcctttgatcccgccaaagatcccagaaggggagcgcgttgacttcgatgagcggcgccggtcagagagagccgagcaacagcgcttcagaactgagaaggaacgcgaacgtcaggctaagctggcggaggagaagatgaggaaggaagaggaagaggccaagaagcgggcagaggatgatgccaagaaaaagaaggtgctgtccaacatgggggcccattttggcggctacctggtcaaggcagaacagaagcgtggtaagcggcagacggggcgggagatgaaggtgcgcatcctctccgagcgtaagaagcctctggacattgactacatgggggaggaacagctccgggagaaagcccaggagctgtcggactggatccaccagctggagtctgagaagttcgacctgatggcgaagctgaaacagcagaaatatgagatcaacgtgctgtacaaccgcatcagccacgcccagaagttccggaagggggcagggaagggccgcgttggaggccgctggaagtgaggatgccgccccggacagtggcacctgggaagcctgggagtgtttgtcccatcggtagcttgaaataaacgctcccctcagacgctaataacccaaaaaataaaggccctttggcgggtccacccttaaccggattcttgcgattttcctgccccggcgcggaaattgaaattttgcaaaaattcataaaactggcggatcn

SEQ ID NO: 10414 - DNA, 1814 bp, Homo sapiens
  misc_feature 1, 2, 3, 4, 1812, 1813, 1814: n = A,T,C or G
nnnncgcggccgcatcgatacggctgcgagaagacgacacaaccgcgcgcgatgacgtcactgcaaggcgccgggggacacgttggctgcgttttcggcgggcttcccgggtacaaaaatggctgtggctagcgatttctacctgcgctactacgtagggcacaagggcaagtttgggcacgagtttctggagttcgaatttcggccggacggaaagcttagatatgccaacaacagcaattacaaaaatgatgtgatgatcagaaaagaggcttatgtgcacaagagtgtaatggaagaactgaagagaattattgatgacagtgaaattacaaaagaagatgatgctttgtggcctccccctgatagggttggccgacaggagcttgaaattgtaattggagatgagcacatatcttttaccacatcaaaaataggttctcttattgatgtaaatcagtcaaaggatcctgaaggccttcgagtattttactatttggtacaagacttgaaatgtttagttttcagtcttattggattacacttcaagattaaaccaatttaaattgtatgttttcaggctgtttgtatatttaattaagggatgggaggggttatttgtcatttacagtattggggtttttatgaatgtgaagcaaacaaaaaaaatttgtatgtaaactgaaaataagaaaatacattagcaagcttaatggttatccttacttgagtccacatgggttggacagtccccacacacattaaattctgtaaatgaaagccaccttttgttaaaaatttgctctaataaaacataccaaatccaaaaaacacagccaaagctccgcggagggaagggttcaaggggagggcggcttctatcgactggtgagatgtctcgacgttctagcgtcttgtggcggcgaccatccacaacacaccagacgatcacacacgacacagaccaccgcgaccacccaacgcatcgcgccacccacacccacacacgacagtagcactacgcgcactggacaccctcaccactacaccacagctccaccccagctcccccgacaacgccagcggactcagaccagcgcgcagtacgctcacggcagcaacgcggcagaccgccgcccgaccgtcagcggagaaagaggaggagagagccgccgagagggaacggaagagacaaaccacacaaccgccggccacggcacccggcgaaacggaggcgcagcgcagagcagcgcagagcaccacagcagcgccaagcactcacacacgcgacaccagccaagggagcgcacggcacccgctaccgacacgagcagccccgccacagctcaacgcgcacgcaccagcgctcatatcgaagctcgcagtgtccacgagcgcgagacgagggagcacacgccgggctgcttgccagagccacacgacgcgcgcatggcaccgccgcctacagaggccaaccggctagcactcagcgcggccgaccacgccgctcgaccgcaagacaccggcgccgcgtggcgcaaacagtatgaacaggcagccggaaccggcgagcagagacgaacgtggcgcgggtgggagcgtgagcgatgcaagcgttgtccaggccggcagagacgagcctcgcgcaccacggcagcggggaggggctagcgcgagctacgcgcagtgcagacggggggccagggccgcgccgcacacacactacgcctacgcggacgctccaacgcggagacggcctagggtcggggaggagtaggttgcgggacgccggacgatcacacgacccgcgcnnn

SEQ ID NO: 10415 - DNA, 1145 bp, Homo sapiens
  misc_feature 1: n = A,T,C or G
ncgttgttcctcttggtcccaatcccttgtccaacggtcaaaactttacacctgccttcatccctttcccccccctataggtctcggtctttttcttgtttcttttgctttttaaaagtttttatttcaaaaaataaagctgcagttcatttcacataaatatctggggagggaaggggagtgggatggggtgggggcttggcccctacctcctcttctctttcacactgtattgtaaaagcaaaggggatggcttgccgaaccagcgggagagccatatctgcttcattgtcatgtgatcagggagaacttcattgtcaaaaaggagctgcacatgctgagggtttagcatcaagcggtgacacaggaccctccggagatggcgtacctcagctctaacagaacatcggacatacttgttctgcaggacgcttttattcttgtctttgccagaactcagccgctccaggcacaggttcaactgctcatcatagcgatagtagtgggctttagagtggtcaaagctgctgaaggggaggccgaggttgctcagtgctggctcttccccagtgggctgggtgacccggtccaaacctcgggactggtagaattcccgaatccgtttctcttcactgtcttgcaagccaggcaccagcttatacacgatgtcctgcatgacccggtccagtttgaggttgagcagtggctgtgtctcgtggatcttaatgttgcacatggggcagtacttgctagtttggaggtacttcacaatacaactcttgcagaaagtatgaagacactctgtgatggtggtggcatccacgaagtagccggcgcataggcagcaaacaatgtgttcattcaagtctttgatcttcactcgaacctcctcctgaagatacaccctccgtcaccaatcatccaccctcaaaccccaacccgtgcgccttcccaccttgggggtcgcctccttcatcacactagacggccaagccccgcgccctgcgccatcagccggggattagctcctgggggctggcactccccctccgcccagcagagggctccgcgcacagcgggggccggacgcgtgggtcgacgcctgaccctcctttcccagggcccacgcgtccgcggacgcgtgg

SEQ ID NO: 10416 - DNA, 3130 bp, Homo sapiens
  misc_feature 1, 67, 73, 3130: n = A,T,C or G
ncatgagcctgtaaggacaaatggcatatttgggcatacctgcttgactctgtaactacttttttanaatcanaattgaaaaggtattaattgtttctggctttttaattttttttttagagacaaagatgaacccagataggaaatacagtttttatgttttctacttactaaaatattagcttcttctaaatattactttatttgtatttcactaaattccaaagcaaaaatcagatatctgagatgaacaattttgaatgggttaaggtaggagtaataagcattgtgttcactcatacataggtgagggaattttatttatagcgagaaatataaaagtattttgacttactcttttttcaaggagtcgctaggaaagggtagaagaactgagaataagacatctagattccatttctggtttatatgtagctcttttgcctaatttatatataattttgtcataagataagtccagtaactgtcctgtcttagataacgtacagaggctgaagtgaccaaagatccattccttattacttttctaattaaaagaagagttagctagatttctagtagtagtattctagatattgataagacattattcctaatgccaactacaaatattcaactactcagaatgtatttaaaaaattgtttggtacagcattaatgttggtgattcctttctcccatcttatttcccttcccttctattctttcccatgtatttcttttgcctaaaagaatattggtatgattctcatttgctactttgagtatataactccatcagactttccagagttcttcagggatggagctcaaagtttacatttttccatatatgtctttttttttcttgacctttttccaccctgtaatttccccttgacttacccactgccctccccaatctgcaacagtgacagtttgctgcctcaaaacagagcattcaaatgaattcgcttagccaataacttctgtgaagttgccttttctaatggtgttattactcagtgatgcacaaatgtggtatttgccctactggtaggcaaacaaaggtctggttaagaatggtaacctgctgttttctttaaaggagagccaaagacttgtgctttactctgttttggttttgggggaagtagtagccattttgatcatgaaaccttttagtatttgtgagttgattgtactgtgtaagtagatttatctaaagttaactgttaaagttagctagccttataaaatgtaaaagtaatgaaaattcatcagtttctctaagccagtgaatgtcgtcttttgtaatattgtgtataagcatttgtgcccaccccagcttctgctatcactgtggtcaagtcatgggtctgagtaaaagaattcttgagtatgtgactggtgagaaataactaactatagtcagtacatgtacagattgttaaaattcaagacaaaatactttcactaaaaaaaaggattcgtctcagtaaagaagtattcagttgctgtcacttacatacaaatggtggtgggtagcagtctcaccatttttctactctctttttgctcgttttaaataattgagtaaaggttttatttgtaaaatctatctgtaaaaagcacctgtaacgatttatatgtcattgaaaggaatggcccagttactttttaggagagattaataacctacctggaaattaactgcagtgtttacttagattttttccccctaataagagtctaagtgtgttaaatttttaactgatgatatggttacagtgttgcaaggtgatctcttcccctgaaaaatctgcctatccttttaagaaaaattagacctactaaactaaagcaaattttactttcatcattagcacctaaacaagcaagcagtctactactgtcatcattttacctgagtgcccattttgctgatccacattcatacctttctaccttggacagctatgatttttatatttatttgttgcttcagctcaggtttatgaaattttcctgctgaaatgacttattgggagttgtaggttgattatagttactattaaacattttctcaatttagcttttctgagccacttcaagaagaaagctgtttttgtcaaaaggtactattaattgtagcaagtaaatcttaagatttgaatttttaagattttatttctgtgttcactaaagatctttccacaagtaatagattataattgataagtaatactagctatagtgttaataaagagtaagactatcaccaccaggaataagtaacaccttttaataataaatctattcctaataggtatgttttcaatactgcactgaacaaagtgggtaaagagccctttgaaatcttattgtaataaagggacttacctcaccactggaatccttgttttcagagcctctggattttcagccaaacactgaatttctcctaaactttatccctgaaacatccctagagaacgaactttattttcacaagaaaataaggcacaataagggggaagaacttaaacctcaacataatatcgtgtccaaaaatgtgtatttagaaaaataaaatcctgtggagtttgttatcctaatgtttattttatactagataaggtgacttgttttcttgtattgaggtcttactgtttcagatttgtttttgtttctgttctaactctaagcagacagagctcacaagtctttggcatccattttaggttgtacactcagagtcatcttataaccttggaaactggtccggtggtcccccaccccagcgaacgctttgaagagtccagacaaaggaatggaaccaagctatggggtgaattaatgggggggcccaattataaattataagtaataatggcgtttttatatccagtgtattggtgtacatctttctcgaggatggggggtccttaataatttggaatatcccataaaatatttcggggtaaggataaggttggtagggtactccctatactaagaggttgagaatgtttacaaggtgggaaagtagagtccggtaaatacacgggggaaaagaaaaatacgggatatgatatactgtggaggggtgtgacattggtgggcagan

SEQ ID NO: 10417 - DNA, 2083 bp, Homo sapiens
  misc_feature 1, 2, 3, 4: n = A,T,C or G
nnnnggttaaatggtttatacagggactgatttgcttcccttcctgccatggctggagctttgggaacagtctgtcctttctgagctgcaataagaaataaccaaagatgaagctggtcaaatattttcataacttgcttctgttgatttttttttttgtaaaactttcccaagacattttcagacttaaaaataaagtcagtgttacaggtgctggtcagccttcttacttgtacctcaaacactgggataaaggaggcggtccagggcaatgcagtgatgtctgtcaagacattccccctcccctaaactcagtagcagttgaggatgacatttcaggctagagagacccaaaatacctctgttccacctgagagcaaggtggaagttgcatcagctactgccccaagtgagcttcatcttctgattgtgggctttggaggaacgagagaactggctcttggccactgtgaggggtacagctttgccactcaaatataccttattgtggcattcagggagccagggtccagagctgcagggctgcggtccctggctcacttccacataggccatcacataacctgtcataaaggcatcaaaaccagcccggtgcaatccatccccaggcactgggttaggactggcttggctccctggcacttctgaggtagctctatcagctatttcaggccttgctgccttaatccccatctctaagtcatttttgttgccttgcttggagtgaggcaggttcctagtttcatcggcagccacctcctgctcggtttcttcaggcttgatgctatccccacagacctgcttcttgggaggaccatccttagcttccccagaggtctgtgtccccggtaggttcaataaagccctcttccgtttttccctacgtcgtcgccgtcgccgcttgtcctctgccgcagcctcatcagtgtcaatgataaggtcaatatcgtgagactgaggacactgtggtcccagggggcaccagccataagccgagaagttgtcacagatgctggtgggatgaggacggtgggttgctgggggcaggcagcagcggtaatcaatatggtccctcatgctggaaggatagttgcagaactccagggtaaggtgtgggctgccagctgcccgctgcttcccattttcccgttcacatttccggaaggcatattctaagtaggaggccacgaaacgggcatgaaactcagcagcatatttggtgtcataaatgcctgctgggaacatctcacacaggtcagcggtgaaggttcccagactctcagggaggtgtgcatagaagttctggtacaggaacaccaagtctataaggccattgtgtagcaccaggggccggcgggctcggattagctccaggaatagggtccgtactgactggctctggctctcatcacccttgtcattgcccttatggtaggggatgccttgggcatactgctggttgaagttgaagccatgctgtatcaggaactgcacagactttggttctatgacatactcctccatgcacagcagagtgagattgaacacttgagccagataggaatgttcacccttgtctggctgccgcttgaagcaggcgaggcccagggaaaggatagaacgggtcctggcagcatgacacacggccttgtaacgttcctcaatgcactggttcagcaaactcttcctgtccccaagcccactcagctccgtgtccacagccacgaaattagctgtctttatggctagcaggagggatggccacatctccttgaagttgttgctttgcacatccactacgggaacctggactactagctcctccccagatgttgtgcttttgctgacaccaccgtcggaagctgcgggagctgaaactgcgccatcgtcactgtcggcggccatgacaccgctcgtctcccgcctgagtcgtctgtgggtacgctggacttgcggtccgtctcctggcgcggttcaggcagtcggggatggggcggggtctcgccgtcgggtcgccgatgggtcgaaccggacgcggggcggacgcgtgggtcgactccct

SEQ ID NO: 10418 - DNA, 2218 bp, Homo sapiens
  misc_feature 1, 2, 2195, 2196, 2197, 2198, 2199, 2200, 2201, 2202, 2203,2204, 2205, 2206, 2207, 2208, 2209, 2210, 2211, 2212, 2213,2214, 2215, 2216, 2217, 2218: n = A,T,C or G
nnagtacgagctgggtttaaatcggcaccgaggttcaaattcgaacggctttggcgggccgaggaaggacctggtgttttgatgaccgctgtcctgtctagcagatacttgcacggtttacagaaattcggtccctgggtcgtgtcaggaaactggaaaaaaggtcataagcatgaagcgcagttcagtttccagcggtggtgctggccgcctctccatgcaggagttaagatcccaggatgtaaataaacaaggcctctatacccctcaaaccaaagagaaaccaacctttggaaagttgagtataaacaaaccgacatctgaaagaaaagtctcgctatttggcaaaagaactagtggacatggatcccggaatagtcaacttggtatattttccagttctgagaaaatcaaggacccgagaccacttaatgacaaagcattcattcagcagtgtattcgacaactctgtgagtttcttacagaaaatggttatgcacataatgtgtccatgaaatctctacaagctccctctgttaaagacttcctgaagatcttcacatttctttatggcttcctgtgcccctcatacgaacttcctgacacaaagtttgaagaagaggttccaagaatctttaaagaccttgggtatccttttgcactatccaaaagctccatgtacacagtgggggctcctcatacatggcctcacattgtggcagccttagtttggctaatagactgcatcaagatacatactgccatgaaagaaagctcacctttatttgatgatgggcagccttggggagaagaaactgaagatggaattatgcataataagttgtttttggactacaccataaaatgctatgagagttttatgagtggtgccgacagctttgatgagatgaatgcagagctgcagtcaaaactgaaggatttatttaatgtggatgcttttaagctggaatcattagaagcaaaaaacagagcattgaatgaacagattgcaagattggaacaagaaagagaaaaagaaccgaatcgtctagagtcgttgagaaaactgaaggcttccttacaaggagatgttcaaaagtatcaggcatacatgagcaatttggagtctcattcagccattcttgaccagaaattaaatggtctcaatgaggaaattgctagagtagaactagaatgtgaaacaataaaacaggagaacactcgactacagaatatcattgacaaccagaagtactcagttgcagacattgagcgaataaatcatgaaagaaatgaattgcagcagactattaataaattaaccaaggacctggaagctgaacaacagaagttgtggaatgaggagttaaaatatgccagaggcaaagaagcgattgaaacacaattagcagagtatcacaaattggctagaaaattaaaacttattcctaaaggtgctgagaattccaaaggttatgactttgaaattaagtttaatcccgaggctggtgccaactgccttgtcaaatacagggctcaagtttatgtacctcttaaggaactcctgaatgaaactgaagaagaaattaataaagccctaaataaaaaaatgggtttggaggatactttagaacaattgaatgcaatgataacagaaagcaagagaagtgtgagaactctgaaagaagaagttcaaaagctggatgatctttaccaacaaaaaattaaggaagcagaggaagaggatgaaaaatgtgccagtgagcttgagtccttggagaaacacaagcacctgctagaaagtactgttaaccaggggctcagtgaagctatgaatgaattagatgctgttcagcgggaataccaactagttgtgcaaaccacgactgaagaaagacgaaaagtgggaaataacttgcaacgtctgttagagatggttgctacacatgttgggtctgtagagaaacatcttgaggagcagattgctaaagttgatagagaatatgaagaatgcatgtcagaagatctctcggaaaatattaaagagattagagataagtatgagaagaaagctactctaattaagtcttctgaagaatgaagataaaatgttgatcatgtatatatatccatagtgaataaaattgtctcagtaaaaaaaaaaaaaaaaaaaaaaaaaaaaaaaaaaacggccnnnnnnnnnnnnnnnnnnnnnnnn

SEQ ID NO: 10419 - DNA, 1665 bp, Homo sapiens
tatagggagtcgaccacgcgtccgaatctgtacaaggtattgctattctttttgttgttgttgttttccttgtttgtatgttttcttttttaaaaaaagaatttgaagatggtaagaaattgttggacttttaattttaaatgcctttttttttttttttgccagaactcaagtcctttgaaattaaatgcttaactttttatgtaagattatatctttttcctaacgactcataattaatctgaattaataaatgcgttttcagagcaagtaaaaggttattattatggagatcttgccaagagatctcaaagttggtcacctggacagtcagtactgaaagataaaaagggctctgaaatgaagcttttaagtagatttagggaattgtactcacatctgcttatctttaaatcattttattctcttgtatatgggtcttgcattgcctcagacataaatgagcatattctgattgtactctttggatctgaactcatcttcacagatgccttcaattaagttgcagagttctgatggagagatatttgaagttgatgtggaaattgccaaacaatctgtgactattaagaccatgttggaagatttgggaatggatgatgaaggagatgatgacccagttcctctaccaaatgtgaatgcagcaatattaaaaaaggtcattcagtggtgcacccaccacaaggatgaccctcctcctcctgaagatgatgagaacaaataaaagcgaacagatgatatccctgtttgggaccaagaattcctgaaagttgaccaaggaacactttttgaactcattctggctgcaaactcctgaggagattcgcaagaccttcaatatcaaaaatgactttactgaagaggaggaagcccaggtacgcaaagagaaccagtggtgtgaagagaagtgaaatgttgtgcctgacactgtaacactgtaaggattgttccaaatactagttgcactgctctgtttataattgttaatattagacaaacagtagacaaatgcagcagcaagtcaattgtattagcagaatattgtcctcattgcatgtgtagtttgagcacagatcccaaaccttacggccaagtttcttctagtatgatggaaagtttcttttttctttgctctgaataaaactgaactgtgggttctctataagtggcattttgggctttccctcttttttgtaaagcaatgtctgcctagtttattgtccagttaactttagtgaccttttaaaagttggcattgtaaataaaacaacttgcaaaaaagttttctggaatagaattaacaaaatattatctttattcatgagttggaaactggaaaaaggcttcttgaagtaaatgttctgagtggagctactaggatgtcttccagcctcctgcagtcaaggagtaccactgtattgattagcctgtatgtagcagggctcccttcattgcatctgaggacttgttttctttttctttatttttaatcctcttagttttaaatatattgcctagagactcagttactacccagtttgtggttttttgggagaaatgtaactggacagttagcttttcaattaaaaagacacttaacccaaaaaaaaaaaaaaaaaagggtacctgcccgggcggccgttc

SEQ ID NO: 10420 - DNA, 7634 bp, Homo sapiens
  misc_feature 1, 2, 3, 4, 5, 6, 7634: n = A,T,C or G
nnnnnnaaaactgatcttttgacatttttgacaatgttcttataaattactttcttttttatcatatatggatgggatgaagcacagagtaagatagagtgcacagcaaaggggatctgcccctcctatctgtccaataccccacaggttttggtgataatcttgggcaatgttccagtcaaacctgcctcccacttctcactaaagttagtgaacatgtgacccacattccccaaataagagcctcttataaactccattcttggctttttcattcatagagatagctattttatgagacatagataaagcattttttagtgatgtgcacgatgccttttttcttaattattaacttctcaaaacataaacacattggaggcacttaataaagggagctgtacgtaccgccgtccgcgcctccaaggtttcacggcttcctcagcagagactcgggctcgtccgccatgtccgccgcagacgaggttgacgggctgggcgtggcccggccgcactatggctctgtcctggataatgaaagacttactgcagaggagatggatgaaaggagacgtcagaacgtggcttatgagtacctttgtcatttggaagaagcgaagaggtggatggaagcatgcctaggggaagatctgcctcccaccacagaactggaggaggggcttaggaatggggtctaccttgccaaactggggaacttcttctctcccaaagtagtgtccctgaaaaaaatctatgatcgagaacagaccagatacaaggcgactggcctccactttagacacactgataatgtgattcagtggttgaatgccatggatgagattggattgcctaagattttttacccagaaactacagatatctatgatcgaaagaacatgccaagatgtatctactgtatccatgcactcagtttgtacctgttcaagctaggcctggcccctcagattcaagacctatatggaaaggttgacttcacagaagaagaaatcaacaacatgaagactgagttggagaagtatggcatccagatgcctgcctttagcaagattgggggcatcttggctaatgaactgtcagtggatgaagccgcattacatgctgctgttattgctattaatgaagctattgaccgtagaattccagccgacacatttgcagctttgaaaaatccgaatgccatgcttgtaaatcttgaagagcccttggcatccacttaccaggatatactttaccaggctaagcaggacaaaatgacaaatgctaaaaacaggacagaaaactcagagagagaaagagatgtttatgaggagctgctcacgcaagctgaaattcaaggcaatataaacaaagtcaatacattttctgcattagcaaatatcgacctggctttagaacaaggagatgcactggccttgttcagggctctgcagtcaccagccctggggcttcgaggactgcagcaacagaatagcgactggtacttgaagcagctcctgagtgataaacagcagaagagacagagtggtcagactgaccccctgcagaaggaggagctgcagtctggagtggatgctgcaaacagtgctgcccagcaatatcagagaagattggcagcagtagcactgattaatgctgcaatccagaagggtgttgctgagaagactgttttggaactgatgaatcccgaagcccagctgccccaggtgtatccatttgccgccgatctctatcagaaggagctggctaccctgcagcgacaaagtcctgaacataatctcacccacccagagctctctgtcgcagtggagatgttgtcatcggtggccctgatcaacagggcattggaatcaggagatgtgaatacagtgtggaagcaattgagcagttcagttactggtcttaccaatattgaggaagaaaactgtcagaggtatctcgatgagttgatgaaactgaaggctcaggcacatgcagagaataatgaattcattacatggaatgatatccaagcttgcgtggaccatgtgaacctggtggtgcaagaggaacatgagaggattttagccattggtttaattaatgaagccctggatgaaggtgatgcccaaaagactctgcaggccctacagattcctgcagctaaacttgagggagtccttgcagaagtggcccagcattaccaagacacgctgattagagcgaagagagagaaagcccaggaaatccaggatgagtcagctgtgttatggttggatgaaattcaaggtggaatctggcagtccaacaaagacacccaagaagcacagaagtttgccttaggaatctttgccattaatgaggcagtagaaagtggtgatgttggcaaaacactgagtgcccttcgctcccctgatgttggcttgtatggagtcatccctgagtgtggtgaaacttaccacagtgatcttgctgaagccaagaagaaaaaactggcagtaggagataataacagcaagtgggtgaagcactgggtaaaaggtggatattattattaccacaatctggagacccaggaaggaggatgggatgaacctccaaattttgtgcaaaattctatgcagctttctcgggaggagatccagagttctatctctggggtgactgccgcatataaccgagaacagctgtggctggccaatgaaggcctgatcaccaggctgcaggctcgctgccgtggatacttagttcgacaggaattccgatccaggatgaatttcctgaagaaacaaatccctgccatcacctgcattcagtcacagtggagaggatacaagcagaagaaggcatatcaagatcggttagcttacctgcgctcccacaaagatgaagttgtaaagattcagtccctggcaaggatgcaccaagctcgaaagcgctatcgagatcgcctgcagtacttccgggaccatataaatgacattatcaaaatccaggcttttattcgggcaaacaaagctcgggatgactacaagactctcatcaatgctgaggatcctcctatggttgtggtccgaaaatttgtccacctgctggaccaaagtgaccaggattttcaggaggagcttgaccttatgaagatgcgggaagaggttatcaccctcattcgttctaaccagcagctggagaatgacctcaatctcatggatatcaaaattggactgctagtgaaaaataagattacgttgcaggatgtggtttcccacagtaaaaaacttaccaaaaaaaataaggaacagttgtctgatatgatgatgataaataaacagaagggaggtctcaaggctttgagcaaggagaagagagagaagttggaagcttaccagcacctgttttatttattgcaaaccaatcccacctatctggccaagctcatttttcagatgccccagaacaagtccaccaagttcatggactctgtaatcttcacactctacaactacgcgtccaaccagcgagaggagtacctgctcctgcggctctttaagacagcactccaagaggaaatcaagtcgaaggtagatcagattcaagagattgtgacaggaaatcctacggttattaaaatggttgtaagtttcaaccgtggtgcccgtggccagaatgccctgagacagatcttggccccagtcgtgaaggaaattatggatgacaaatctctcaacatcaaaactgaccctgtggatatttacaaatcttgggttaatcagatggagtctcagacaggagaggcaagcaaactgccctatgatgtgacccctgagcaggcgctagctcatgaagaagtgaagacacggctagacagctccatcaggaacatgcgggctgtgacagacaagtttctctcagccattgtcagctctgtggacaaaatcccttatgggatgcgcttcattgccaaagtgctgaaggactcgttgcatgagaagttccctgatgctggtgaggatgagctgctgaagattattggtaacttgctttattatcgatacatgaatccagccattgttgctcctgatgcctttgacatcattgacctgtcagcaggaggccagcttaccacagaccaacgccgaaatctgggctccattgcaaaaatgcttcagcatgctgcttccaataagatgtttctgggagataatgcccacttaagcatcattaatgaatatctttcccagtcctaccagaaattcagacggtttttccaaactgcttgtgatgtcccagagcttcaggataaatttaatgtggatgagtactctgatttagtaaccctcaccaaaccagtaatctacatttccattggtgaaatcatcaacacccacactctcctgttggatcaccaggatgccattgctccggagcacaatgatccaatccacgaactgctggacgacctcggcgaggtgcccaccatcgagtccctgataggggaaagctctggcaatttaaatgacccaaataaggaggcactggctaagacggaagtgtctctcaccctgaccaacaagttcgacgtgcctggagatgagaatgcagaaatggatgctcgaaccatcttactgaatacaaaacgtttaattgtggatgtcatccggttccagccaggagagaccttgactgaaatcctagaaacaccagccaccagtgaacaggaagcagaacatcagagagccatgcagagacgtgctatccgtgatgccaaaacacctgacaagatgaaaaagtcaaaatctgtaaaggaagacagcaacctcactcttcaagagaagaaagagaagatccagacaggtttaaagaagctaacagagcttggaaccgtggacccaaagaacaaataccaggaactgatcaacgacattgccagggatattcggaatcagcggaggtaccgacagaggagaaaggccgaactagtgaaactgcaacagacatacgctgctctgaactctaaggccaccttttatggggagcaggtggattactataaaagctatatcaaaacctgcttggataacttagccagcaagggcaaagtctccaaaaagcctagggaaatgaaaggaaagaaaagcaaaaagatttctctgaaatatacagcagcaagactacatgaaaaaggagttcttctggaaattgaggacctgcaagtgaatcagtttaaaaatgttatatttgaaatcagtccaacagaagaagttggagacttcgaagtgaaagccaaattcatgggagttcaaatggagacttttatgttacattatcaggacctgctgcagctacagtatgaaggagttgcagtcatgaaattatttgatagagctaaagtaaatgtcaacctcctgatcttccttctcaacaaaaagttctacgggaagtaattgatcgtttgctgccagcccagaaggatgaaggaaagaagcacctcacagctcctttctaggtccttctttcctcattggaagcaaagacctagccaacaacagcacctcaatctgatacactcccgatgccacatttttaactcctctcgctctgatgggacatttgttacccttttttcatagtgaaattgtgtttcaggcttagtctgacctttctggtttcttcattttcttccattacttaggaaagagtggaaactccactaaaatttctctgtgttgttacagtcttagaggttgcagtactatattgtaagctttggtgtttgtttaattagcaatagggatggtaggattcaaatgtgtgtcatttagaagtggaagctattagcaccaatgacataaatacatacaagacacacaactaaaatgtcatgttattaacagttattaggttgtcatttaaaaataaagttcctttatatttctgtcccatcaggaaaactgaaggatatggggaatcattggttatcttccattgtgtttttctttatggacaggagctaatggaagtgacagtcatgttcaaaggaagcatttctagaaaaaaggagataatgtttttaaatttcattatcaaacttgggcaattctgtttgtgtaactccccgactagtggatgggagagtcccattgctaaaattcagctactcagataaattcagaatgggtcaaggcacctgcctgtttttgttggtgcacagagattgacttgattcagagagacaattcactccatccctatggcagaggaatgggttagccctaatgtagaatgtcattgtttttaaaactgttttatatcttaagagtgccttattaaagtatagatgtatgtcttaaaatgtgggtgataggaattttaaagatttatataatgcatcaaaagccttagaataagaaaagctttttttaaattgctttatctgtatatctgaactcttgaaacttatagctaaaacactaggatttatctgcagtgttgcagggagataattctgccttaaattgtctaaaacaaaaacaaaaccagccaacctatgttacacgtgagattaaaaccaattttttccccattttttctccttttttctcttgctgcccacattgtgcctttattttatgagccccagttttctgggcttagtttaaaaaaaaaatcaagtctaaacattgcatttagaaagcttttgttcttggataaaaagtcatacactttaaaaaaaaaaaaaactttttccaggaaaatatattgaaatcatgctgctgagcctctattttctttctttgatgttttgattcagtattcttttatcataaatttttagcatttaaaaattcactgatgtacattaagccaataaactgctttaatgaataacaaactatgtagtgtgtccctattataaatgcattggagaagtatttttatgagactctttactcaggtgcatggttacagcccacagggaggcatggagtgccatggaaggattcgccactacccagaccttgttttttgttgtattttggaagacaggttttttaaagaaacattttcctcagattaaaagatgatgctattacaactagcattgcctcaaaaactgggaccaaccaaagtgtgtcaaccctgtttccttaaaagaggctatgaatcccaaaggccacatccaagacaggcaataatgagcagagtttacagctcctttaataaaatgtgtcagtaattttaaggtttatagttccctcaacacaattgctaatgcagaatagtgtaaaatgcgcttcaagaatgttgatgatgatgatatagaattgtggctttagtagcacagaggatgccccaacaaactcatggcgttgaaaccacacagttctcattactgttatttattagctgtagcattctctgtctcctctctctcctcctttgaccttctcctcgaccagccatcatgacatttaccatgaatttacttcctcccaagagtttggactgcccgtcagattgttgctgcacatagttgcctttgtatctctgtatgaaataaaaggtcatttgcaacaacaactacaccccacgccccaacacacagccccccacacacgccacacagaacaacacan

SEQ ID NO: 10421 - DNA, 681 bp, Homo sapiens
  misc_feature 544, 570, 574, 579, 672, 678, 679, 680, 681: n = A,T,C or G
acttttttttttttttttttttttttttttctgggacatcattcagatgttaccaaatcagtcaccttagtttttaatcctcactatcatgctaacatctaacacttggatagcattttgtgacgtgtaaagtgtttccacctctcccaggatattttaattttcatcttcataactgcctcaggagactgaagggcaggtttcatcatttaaagatgtaggaactgaggcttacggacatttgatgacttgcccaaagtcaaacagtttttgtttgtcaaaatagatattcaggggggccttttaatttcaaatatgggtgtccactccctgaagctgacctcatttgtcagaataatgagaaacttactatgagccaggcattgtgctaagcactttacctatattaacttatttaatcctcacaacaattctacataggttctagtattatacccattttacagatgaggaaaccaagatttgaatccagtgaatacagcttcagagtccccattcttattggatataacatttattgggntcaagatgagctaggaatgactattngcanagtanagccctgcatttagctgagacactcactttgacggcatactcttttgcattctgtaggctcacggcacctttgaccttggcataggctccctnttcaannnn

SEQ ID NO: 10422 - DNA, 950 bp, Homo sapiens
  misc_feature 1: n = A,T,C or G
ngacaaaaaggggaattgcctcaaggcgtttaagttgggtaaccgcaaggttttcccagtccgaccgttgaaaacgacgggcagtgaattgtaaatcgcctcacttaaggccgaattgggtaccgggccccccctcgagttttttattgttttttttttcatgaacagaaagaaaagtcttttattagtactgtgtagggaaggctaaagaaatatacatttaattcagaataatttttaagaaaaaacgtggggttccaagaaatggtgatttacattcaaatgaacatgtacatttgcaaacctggataagtagatattttcatgaagcacgctacaagaaaattcacacagaattatttgtttttcaaaggcctctttcaaagtacagactccaagtccaaagcaaatacccatggcatgaacaaataggatgcctaagattctaacatttgcttcggcatggctttcctcctcacttccctacctcacaacaagaaaaaatttcctagatgggacaatggcaagatattgtgctaatacatttcataggatttctagatgctgggctataacatccaggttacaatttggtgacggatttttttatttctattgcaaatggactacactccaaacacaaaaagattcttgccatagcatccaaacatccctatgtagacccacacttcctctcaatacagaaagagaatcactcagaaaggacaaagctggcagaccaagaaaggaggcaagggtaaactctgtcactggccaattatctaaaacaaaaatagcagcctctgttatcaaagttgtcagttaaaactgtcagctgtcaggcacagtgacacacacctgtaatcccaacactttgggagcccaaggtgggtggatcgcttgagcccaggagtttgagacaagactgggcaacacagagacggacgcgg

SEQ ID NO: 10423 - DNA, 255 bp, Homo sapiens
  misc_feature 1, 2, 3, 4, 5, 6, 7, 8: n = A,T,C or G
nnnnnnnnaaggccttccggcggaacatggcagtgaagtgcgccgaattgagctgttatagatcgtgccgtccgggcaggtactttaataagggtgacaaccattgcacagtctttccctgtgacagctcagtgatgtaaggccaccatggttaatagccttaaaagcatattctacttggtagagccgaccctcgggtgaaaaaatggtaatgtggcggtcaaaaccggcgctggaaccacgggacatgttggt

SEQ ID NO: 10424 - DNA, 4239 bp, Homo sapiens
  misc_feature 1, 4238, 4239: n = A,T,C or G
ncttcccatacggcagtggctgggggagagtgatggagagaaaggctaagctaaggtcaaagaaagtggaggaaggctggcttgtcccgctggacttgacggcggagctgctgcaatctcgcgggctgggcccttgccccgggtggacccgatgtgcctgcggggagtgcgggtgtggctcccccgggatggtgacagctggcggggcccgtaaggagctggtctgctcctggctcccctctctgtagccggcgccctgggaccatgcgcgtgagcactgtctcggagtgagtccgatgcgctgggcatgggccggggtggtcacccccgcccagcttccagtgggtgactgtgcctctgacgtcagacggcttttgggtcattccctggcacggggactttattttcataacagcatgaagtgccgtggaactggaataggcgtgtcctctccctcgaccctccccctccttgtccctctgctcacccctcgctcgttccctccctccggcgagggccgcctttataacaactgctcagagtgcgagggcgggatagctgtccaaggtctcccccagcactgaggagctcgcctgctgccctcttgcgcgcgggaagcagcaccaagttcacggccaacgccttggcactagggtccagaatggctacaacagtccctgatggttgccgcaatggcctgaaatccaagtactacagactttgtgataaggctgaagcttggggcatcgtcctagaaacggtggccacagccggggttgtgacctcggtggccttcatgctcactctcccgatcctcgtctgcaaggtgcaggactccaacaggcgaaaaatgctgcctactcagtttctcttcctcctgggtgtgttgggcatctttggcctcaccttcgccttcatcatcggactggacgggagcacagggcccacacgcttcttcctctttgggatcctcttttccatctgcttctcctgcctgctggctcatgctgtcagtctgaccaagctcgtccgggggaggaagcccctttccctgttggtgattctgggtctggccgtgggcttcagcctagtccaggatgttatcgctattgaatatattgtcctgaccatgaataggaccaacgtcaatgtcttttctgagctttccgctcctcgtcgcaatgaagactttgtcctcctgctcacctacgtcctcttcttgatggcgctgaccttcctcatgtcctccttcaccttctgtggttccttcacgggctggaagagacatggggcccacatctacctcacgatgctcctctccattgccatctgggtggcctggatcaccctgctcatgcttcctgactttgaccgcaggtgggatgacaccatcctcagctccgccttggctgccaatggctgggtgttcctgttggcttatgttagtcccgagttttggctgctcacaaagcaacgaaaccccatggattatcctgttgaggatgctttctgtaaacctcaactcgtgaagaagagctatggtgtggagaacagagcctactctcaagaggaaatcactcaaggttttgaagagacaggggacacgctctatgccccctattccacacattttcagctgcagaaccagcctccccaaaaggaattctccatcccacgggcccacgcttggccgagcccttacaaagactatgaagtaaagaaagagggcagctaactctgtcctgaagagtgggacaaatgcagccgggcggcagatctagcgggagctcaaagggatgtgggcgaaatcttgagtcttctgagaaaactgtacaagacactacgggaacagtttgcctccctcccagcctcaaccacaattcttccatgctggggctgatgtgggctagtaagactccagttcttagaggcgctgtagtatttttttttttttgtctcatcctttggatacttcttttaagtgggagtctcaggcaactcaagtttagacccttactctttttgtttgttttttgaaacaggatcttgctctgtcacccaggcttgagtgcagtggtgcgatcacagcccagtgcagcctcgaccacctgtgctcaagcaatcctcccatctccatctcccaaagtgctgggatgacaggcgtgagccacagctcccagcctaggcccttaatcttgctgttattttccatggactaaaggtctggtcatctgagctcacgctggctcacacagctctaggggcctgctcctctaactcacagtgggttttgtgaggctctgtggcccagagcagacctgcatatctgagcaaaaatagcaaaagcctctctcagcccactggcctgaatctacactggaagccaacttgctggcacccccgctccccaacccttcttgcctgggtaggagaggctaaagatcaccctaaatttactcatctctctagtgctgcctcacattgggcctcagcagctccccagcaccaattcacaggtcacccctctcttcttgcactgtccccaaacttgctgtcaattccgagatctaatctccccctacgctctgccaggaattctttcagacctcactagcacaagcccggttgctccttgtcaggagaatttgtagatcattctcacttcaaattcctggggctgatacttctctcatcttgcaccccaacctctgtaaatagatttaccgcatttacggctgcattctgtaagtgggcatggtctcctaatggaggagtgttcattgtataataagttattcacctgagtatgcaataaagatgtggtggccactctttcatggtggtggcagcagttaccagtaatgagcattagactctgggggatagaacacgggctgccctgagagcttcatgttggagctgaagttcaaggttcacttcctttgggtttgtacttgacccttcttcatgtgtctctcccgttccctctaaaacaagtgtgtttcccctcatttttgaggctgtcaatggtgtgagagccaggatcatcacggggcctgaggttttactccagaaaagcagaggagtggcaaccttggcttggggtttggcagcccaggaaaggcagggaggagagctcaaagccggtttcatgtttcacccaaggtctaattgtgggagaggacaaatccagatcccctgtttgacagaattagttcacaaatgtctcttggcaaaaacatgtgacacctaaccatgataattgacttaatccaagaaagagctctgtagggcagagcaataggaaatctctctttcgttatggaaaaaaaataatccctctacatagaaactgagtgacatgtaaaaatgtgtagctaagtcagggagttacttcctaagagcctgacgctctgcttttcatcaaaaggaaaaaccagcgtgaggcagaggcgagggaggtggaggtgagtggatgatgtgctgagttagggatgtttatatgccgcaaaggtttggttggtaggcttcgcgctaagattagcctggctttgtactgaaaagggggaaggacacatagtgacacagatccttctggtctttcccaggaggtgtgacctaatgaggtttgttgtgagaataaagcaatgtggtttcacatatattatctatcataggctagggactcaagaaatgcatattccccccccactttctttctctctttccttccttccttcctttcttctttctttctttctttctttctttctttctttctttctttctttctttctttctttctctctctctctctctctctctctttctttctttctttgagagatagagtctcactctgtcatccaggctggagtgcagtggcatgatctcagctcaatgcagctccgatcctgggttcaagcgattttcgtgcctcggcttctgagtagctgggattacagggtgagtgcgccacagcctggtaatatgggttttaggtccaggacagttcccctgttgaccagctggtctggacctgatctaatgatgccgctggctccagggtgggtcggggcacccaggccagccttacttcttctttcggttattacacccgggggtggcgcggctctcacttcggcggttctctgagagcactggcgggggggcaacccggcctggcgaccgcccgggacagcttttcaggggccgcctcgtcctcctcttctcgttcnn

SEQ ID NO: 10425 - DNA, 1444 bp, Homo sapiens
  misc_feature 1, 1433, 1434, 1435, 1436, 1437, 1438, 1439, 1440, 1441,1442, 1443, 1444: n = A,T,C or G
nccgggtgacaagagtaacaagagcgtgactgggttctaaatgaattcaaacatggaaaagctcctattctgattgctacagatgtggcctccagagggctaggttagtacaaactcgcattcatggcttggtttcccagaagatctccatttaacttttttaaagaaagtttattgctttctttaacctgcattttttctaagttttttttcacataaaggtgctgtctttgtggcaaggcctaggcatgacaatcggaggactcgagggggatggaggactagtgatcggctggctgcttccagtcgattagagaggtgaaaaagctgaacgtgtgccagtaatcttcaaaaggcagaacatatcacctctgccccgtaaactgttctctccgagggaaaaaatggaagttatcctcacagttcactgccgtggtatttcttctgtcccatgctttgcatgactgccatggtacagccttgtttcaaactgttcactgtgatctgtgggtctttgagtttcagtgagtttgctgaaatgtcgaagaagtagttccaaacttcaatgttcaatgaaatttttgttcaagtttgaaatggagagagcagctttaaaaggtactaagccttttacaaattggtgagtactggcacatgagatctagagcaggagcaacttctcacacatagtaagtgggaaaagaaagtgctttgaaagttcctccctcacctacacagtagtcgtcatgtcgagacctgccagagagagacacattctcaagtgaatcctggcttcttggaagcgcttgcctagacgagacacagtgcataaaaacaacttttgggggacaggtatgttttcttgcagctgcggttgtaaggtcttggcaagacaagcagtgtggccagaattttgaacttctgatgaatgtgtaatgcaaaggaccttgtacatttttttgtttcaaggtcctcaaaatgagcacatgaagaggttgctgtgaaactttaagtggccctactgcgcagaagcattcagatgtcacttgatgatctgtaagggaacttgctgatttgggaatgtgcttagggaacacacattccttttgacagggtctgtcactgggtgggtgatgaattatacagatgacatgtgcttttttttcttttttcaacctcaatggtattcctacaggaaatggataaccattttaactgtattttttgcagcccgtaccttcttgggaatacaattgtctaactttttatttttggtctggctgttgtggtgtgcaaaactccgtacattgctattttgccacactgcaacaccttacagatgtggaagatgtgaaatttgtcatcaatcctaatccccaggtaattcccaatgcaccgcaccacaagggcgacactcccccaataacacacannnnnnnnnnnn

SEQ ID NO: 10426 - DNA, 563 bp, Homo sapiens
  misc_feature 1, 2, 562, 563: n = A,T,C or G
nntactaaaggaataagcttgcggccgcttaattaatttttaggcacatgtagggtgatccaaattggtctggggtcaggatttggcccacaagtctaatcagtttgcgtcatctagttttagttttgactttaggtttcttgaaggaagggaccaagcctgcttttgtcatcattatatcctcacggcttaggtgtaagcctgtcagagagcctggtacaggaaaggcacctgtttgtaaaatagatgggtggatggaggggagggtaggcagatggatgagtgaataaattcttacagtcttcagagcacaagtatttcaaagcagcctacctgggaactgctcatggtcctgctggccacctagaccaccaatgccctgacttctatgccctctgcagagaatccgtgcctggggacaagtagtccgagaggtgatccgccgccagaaaggttatggcatcatgtagccacagcctccaaggtgcccatcatgggaatgtcgtcgggggctgtgggccccagtgctgccagcccacccttatgcttaacattttcgtann

SEQ ID NO: 10427 - DNA, 540 bp, Homo sapiens
  misc_feature 435, 461, 512, 535, 538, 539, 540: n = A,T,C or G
actaaagggaataagcttgcggccgcttaattaaagatcttttttttttcttttttaacaaaattcctatagaatataacaatattaaagagggaactttaagtgaacccccacttttggccataacttctttttgtgtcagccagcaagagccaagagaacataaccagggtggtaggatgtagctagataagcctctttaaaggcacaagaggccacttcttcaaccagatttgccaaagcccttggttcaatgaccagataggccaacacgggtagtagtggggtcatcagccctaaatgcagctttctgggctaccttctaggatgctctggagcttggaactgtccacctgaaagagggttgagggaggctggatgaatacaatatttggtccactggattttcctcataacccttaggccccacacctnccagctcagaggggagggttgccttncccattttattaaatccttgggctacagctttgatgatggattctgcagtncggatgggttaaaataggccgcngcnnn

SEQ ID NO: 10428 - DNA, 1284 bp, Homo sapiens
  misc_feature 1, 2, 12, 1282, 1283, 1284: n = A,T,C or G
nncgtccgtggnaccaggattcaaatttcctaattcaacatcaaagcctaaattcctgaaagtgcaagtctctcacaaacttcaggaattccacagcataccagaaatcttaagttttagggtggttcgaaaccttataaatccctttgagtcaaaaatttctctttttttccagatcctgttaaacgtcagtgttactatttagcctttgatatctccagtaaaggcaacttctttctggacccagaaataaagctttacattagcagcttccataacaccaataacatgaatgaccatctactgagcaattgcagtgcaccaggattatggcttatgagcactttatgtttattatctcacaactcactgagttagatactctccacaacccagtgaggtaaatactattacttccacagtatatattattatataataaaatgcttagaatatacacacagtaactaaacactacttataaaatatggctctagatatgtttgataaatatttccttcatgaaaacatggaggaattaattagcagtatctctctgcagcccttaagccctccagattcatgtagaaaagagggagctgtcttcttcttttagcagaacatctgtcagagatgggttcccctgacttagacaatttgtgtttttttcccttcagaatgattgagtctcagaattgttctttaatcctcagtatttccattaagaagagcttctatcaagtgcttcaaaagtacccaatgtgaaggagtaataatgactccctgctggtgagcgaagtgtggaggacacaggtccctcagccgtccactggatgctgcactgtttggcctgagccaacatgggcagaaatacaggcggcagcataagcagatgccaagaacctgtcttgcttctactgttttcattgggttgctatatctcctttgtagtccaacctgcaaattactttgagaaggggagatacacccctggaccaatctaggactatatttgttcccttgctaaagtaggaaaaaaaatacagaacctttaaatattgaactcaagggcaactaatttaaattcctttcctttcatgttgaaagtcttttgactgggttattctgaagccatagcaattaggttacagtttacttctctgttactttaccatctttaaatttggcaccttcaaaaggttgttctgtgcgtttaaaaaaaaaaaaaaaaaaagatctttaattaagcggccgcaagcttattccctttagtgaggttaannn

SEQ ID NO: 10429 - DNA, 757 bp, Homo sapiens
  misc_feature 1, 2, 749, 750, 751, 752, 753, 754, 755, 756, 757: n = A,T,C or G
nnaaccctactaaagggaataagcttgcggccgcttaattaaagatctttttttttttttttttatactacttatcactatttaaaattatatttaggtacttatttgttatctgcttcccctctaggctttctgctctgcaaggccagagacgttgtctctcttcttcatagctcgacccccactgcggagaacagtgctcagcacttgctaacatggcagaaacaaagctgtctccctcagttctcgtggcagccctcattctagtttgacttcctatgaaattacttttcctagttgtcttgaaggtcatgttttgcttaagatgtagctccaccaagcagacagccctatgtggggtttggaggtgagcagtgagaggtggtagccataaggaggaacatcagatctgcggggggcatggtggcagagggcatctggttcttctgaggcagttgcagggaagtttctggaatccagtgccatgtggctatacagtagtactttgcagagcagtttagtggtgtggttaggtgtgtctcctggttgctctgtgtagcagccaaacccagttttctgacttttcttgagattctttatgtttaataaaccatgcttcttaaaatagctagagcagattttccagtttacaattaagaaatttgacaaatataaaatgtgctcaacaaatttttgttaagtaaatcaatgaatgcatgagaagctcgtgccgaattcttggcctcgannnnnnnnn

SEQ ID NO: 10430 - DNA, 1224 bp, Homo sapiens
  misc_feature 1, 2, 3, 4, 5, 6, 7, 8, 457, 1221, 1222, 1223, 1224: n = A,T,C or G
nnnnnnnnctgattcagtaacatttgcctacataagttttcatttatttgtgttttatttattacagggctgctattttcataatgtacatgaacaatgtcacagaacttttttaatttttttgaataattataagtatcagtaaaggaagtgaaagacaggattgcatttaatagataaaacgtttaggcaataattgaacaaaagaatcctggcatatttctaacactaatggcaatttacttatggtatttattttcagtagtaaagacccagcttgaatgtaaattttgtatagtgtaagtatgaagaacatagtgcaactgtacaggtagtcaccagttattgtgatatgataaataattgggctattttgatgaagctttgttcatttgtttctactttctaagagaaattgccacgattcctctgcttttcaacatttcgtatgactttnttttcgggtgggaataatggagttatgtgctgtgttttttttttttggtggttcttttttttgtctttttttttttttataatgcacattctttatgtatttttatttagtgttttctcagtcacaattttctttactgtctagcatgatctgcatgacctataatctttgaaccactttcgtacctcatgtttttatccagcactcttattgtaatatgtactagtctgtgaacaatgtcaaataaaagagaacgaacaggtagtttggtggagctgagctagtgtacaatacactagttgtaaaaaaaaaaaaaaaaaaagtgagccatcttttgttcatttaaaatggtgttttgaatttcgtatgcagaaaacgttttgttacattgcagattttaatgtatttaataaatgcaacatgcagattaagtgcagtgtatactgagtatttaaattaaaatgtacatttcataaatacagtttcaaaagaaagcatcattttgtgtatactaacacattaagtgtatgtcagaaattgatgtataaatatatattttaacattttctgaaattaaactgcagttttgttgaaatatttggctctatatgtgttcaaaatttgactagatttgtattttcacagttcaaaatactccttaaagacctgttaataatgacttactgatagttcttaaattttcaaagtaaaacaatttaaagaatgcaaaaatagtgagcaatatttgtactcaatattcatannnn

SEQ ID NO: 10431 - DNA, 627 bp, Homo sapiens
  misc_feature 626, 627: n = A,T,C or G
actttttttttttttttttttttgtaacaggatcttgttttgtcatccaggctggagtgcagtggcacagtcacaactcactgcagcttcaaccacattggctcaagtgatcctcccaccatcagcctttttggtaggcgggactataagcacatgccaccatgcccagtcaagtttttaatttctttgtagagacagagatctcactatgttgcccaagctgatctcaaactcatgagctcaagtgatcctcccatcttggcccccaaagtgttgggattacaggcgtgagccactgctcctggccttgctactccttttattattcacaacctctagaaatagtataggagatccaagcactagtctcccgttgtcatggatacagaaagtggagaagagagcaggataagtggcttgtttgggactagacaaggctgtcactaaatgactcactacttcagccctttgctcctcttggcacctggaccagcaaaggcacacatattctgtaattgttttgttcctgccaaacctgttacaaggaataaacttaaagcacccagaagtttagcaacatattatcatcttggaatgtgacattattaaaccctcctaatccccann

SEQ ID NO: 10432 - DNA, 1478 bp, Homo sapiens
  misc_feature 1477, 1478: n = A,T,C or G
acatacattctatgacagactctaaaagttctcttcgtgacatgcatgatttttaacagtaaacagttctatgatcgtgaatattttaaatgtttactgctgtatgtgtcccggcaagtagcaaatgtgttgtattttgtttgaaatgtcttatttattttttgatgaggactagaacataagttagatatttttaagagagatactttttgaaatatgcacgagtgaattttttgtgaaggtgatttgtttttcctgctcagtcaccgagttaatggccacgtgaacgtaaagatgagcttgatgtagagagggttatgtgaggttttctatcaaaatgtgtttgttttctacatgtatctgctcttaagtcgaattgtttgcaaaggaggaaattgtgtttttaaaaaagaatttaattaggaaattttgatactcttcattactaggatttatccattgaaattatttattgctattacttttaacagagtctctgtgagactgtttcacagaaggatgtgtgtttacccaaggctgcgcatcaaaaagaaatagataaaataaatggaaaattagaggtctcctgttaaagatggtcttctgaaggctaactgcggaatgaaagtttctattccaactaaagccttagaattgatggacatgcaaactttcaaagcagagcctcccgagaagccatctgccttcgagcctgccattgaaatgcaaaagtctgttccaaataaagccttggaattgaagaatgaacaaacattgagagcagatgagatactcccatcagaatccaaacaaaaggactatgaagaaagttcttgggattctgagagtctctgtgagactgtttcacagaaggatgtgtgtttacccaaggctacacatcaaaaagaaatagataaaataaatggaaaattagaagagtctcctgataatgatggttttctgaaggctccctgcagaatgaaagtttctattccaactaaagccttagaattgatggacatgcaaactttcaaagcagagcctcccgagaagccatctgccttcgagcctgccattgaaatgcaaaagtctgttccaaataaagccttggaattgaagaatgaacaaacattgagagcagatcagatgttcccttcagaatcaaaacaaaagaacgttgaagaaaattcttgggattctgagagtctccgtgagactgtttcacagaaggatgtgtgtgtacccaaggctacacatcaaaaagaaatggataaaataagtggaaaattagaagattcaactagcctatcaaaaatcttggatacagttcattcttgtgaaagagcaagggaacttcaaaaagacccctgtgaacaacgtacaggaaaaatggaacaaatgaaaaagaagttttgtgtactgaaaaagaaactgtcagaagcaaaaaaataaaatcacagttagagaaccaaaaagnn

SEQ ID NO: 10433 - DNA, 5258 bp, Homo sapiens
  misc_feature 1, 4152, 5258: n = A,T,C or G
ngcgtcactcggggcgaagaggaggaaggagggcgagcgaggaggatggcggagtcggggctcctgacggaactctaatgaatcattgattgaccagcactattttaccagttggaatgaatgatcagaaatgggcatagtgcttttagatccaacatgtaacagatggatgttactccatgctgattacttcttcaagccagtacttttttgattgtgtaggatctttgtctcttcatctttgaattcaattactggaaaataaaaggagttcatgtagtttttgtccaggcttgagtcaccatgagtagtagtttaggaaaagaaaaagactctaaagaaaaagatcccaaagtaccatcagccaaggaaagagaaaaggaggcaaaagcctctggaggttttgggaaagagagcaaagaaaaagaacctaagaccaaagggaaagatgccaaagatggaaagaaggactccagtgctgcccaaccaggggtggcattttcagttgacaatacgatcaaacggccaaacccagcacctgggactagaaaaaaatccagcaatgcagaggtgattaaagagctcaacaaatgccgggaagagaattcaatgcgtttggacttatccaagagatctatacacatattgccatcatcaatcaaagagttgactcaattaacagaactttatttatacagtaacaaattgcagtccctcccagcagaggtgggatgtttagtaaatctcatgacactggctctaagtgaaaattcacttaccagtttgcctgactctcttgataacttgaagaagctgcggatgcttgatttacggcataataaactgagagaaattccttcagtggtgtataggctggattctctcaccactctttaccttcgctttaatcgtataactactgtggaaaaggacatcaaaaacttgtcaaaactcagcatgcttagcattcgagagaacaaaattaaacaactacctgctgaaattggtgaattatgtaacctcattacgctggatgtagctcacaatcaacttgaacaccttccaaaggagattggaaactgtacacagataaccaaccttgacttgcagcacaatgaactgctagacctcccagatactataggaaacctgtccagtttaagtcgtcttggtctgagatataacagactgtcagcaatacccagatcattagcaaaatgcagtgcacttgaagaattaaatttagagaacaataacatttctactttaccagagagtcttttatcaagtcttgtgaaactgaatagtttgaccttagctagaaattgcttccagttgtatccagtgggtggtccatctcagttttctaccatctattccctcaacatggaacacaatcgaatcaacaaaattccatttggaattttctccagagcaaaagtattaagtaagctgaatatgaaggacaatcagttaacatcacttcccttggattttggaacttggaccagtatggtagaattgaatttagccactaatcagctcacaaagatccctgaggatgtgtctggtctcgtttctcttgaggttcttatcttatcaaacaatcttctaaagaagcttccccatggtcttggaaaccttaggaagttaagagagttggatctagaagagaacaaattggaatccttgccaaatgaaattgcatatcttaaggatttacagaaattagtcttgacaaacaaccagttgaccactcttcccagaggcattggtcaccttactaatctcacacatctgggccttggagagaacctacttactcaccttcctgaagaaattggtacactggagaacctagaagaactgtatttgaatgacaaccccaacctgcatagccttccctttgagctggcactctgcagcaagctttcaatcatgagtattgagaactgtccactcagtcaccttccacctcagattgttgctggggggccttctttcatcattcagttcttaaagatgcagggtccatatcgtgccatggtctgatataaatctgctggtcccacacactgttcaaaaatagactgccattaatgtttcttatctatatctgtatctatttatgtagatattggtatatggcagatttataaaaattgcattatgtgtttctgctaatagaggaatcatagccatttagaattttttttaaattctgtacaaaaggcttatataagttttctttgctgaatttgatggatgtttttctgttgtgtaatctgatatgccagtttgcttaaaacatttgccaacacattatgaagttattaaatttaagggacagaggtagtatagttagatatactttctcttaggaaaaataatgggcaaaaatttttgttgcaacttttcatatatattttccccttaccaattgttttatccttatagtattgtaggccctgaaagtagaatttttctttaacttattttgagatttgagatttaaattttatgtattgtttacagtcagagtaaatcactggatttcttttgtttgttttgatttgctctgttttattcagtcaaatctagagtttgaatcctctgctaaagaatttgcatccactggtgtaaacagtgaaaggtatttgcttgttgaaaaaaaaaactggcaaagtgaaaagatacagtcaaaaatctagaatttctttaattttgcttctctgacgagttgtgaagcaaaatacctgaagtgagtctttgggtaggggaagggtattgagaccttttctagtatgaatattttttaagtttgggggaagagaaacttgcagtgaaaaggagttttttcattcctgaaagttgcagatccacaaaactaacaggataattgggcaaataaattacatataaacacacacaatctatatatgtatatacaatgctatatagatatgtatttattatatcataaactacagtaggtaactttaaggatttcttcctatccttgtacaatgacatgaatgtctttctttgaaaactgcaatgtatgtatgtttcaaggttatttaacagtgtactatggttttatatcttgacttgccttgtacatctttcaattctggaatatctgtgtctaagcacaatatcttcacactgtgctgtattgctgctgaactaaatgcacttttccccacatatggggcactggcttcaaacaattcagttcagtatcattacttttaatctcatctttcctttcttggtagttgttaatacagttatggaaaagaggcacattgcatagaagccattggggagttcagtggaagttctgtaagatgtgcatgtactatttgatgcgttttctttgcttcactgcttttaatacttagcagtattgttggtctaagtcaatttgattattgaggagtctcagagcaaggtgcgttctagatgtcatcctaaaaaacacttcatatataattaatcactattttgtataattacatattgctgcttgtgtgtttttttttttttccatttagttgggcgttgtgttttacacaaaaccatttttgaattaaggctatgatattaagatagaaatttggactgttgttctgcttttcctggcactcaaattcatgactagttttgaggtcaaacctatgttcgtaatgagagattttataaggatcaactaagaaatggaaggcaggtgaagatataaaaccctagaatgcttaaatgtgctgtaaaactattgtagatgtcactggattttaccaagtaatatcctttcttttttttttccccccatctgctgtggcttttcagttaaaattttgtttataaaaggaatttgtttattacagctctacctaaaaaaaaaaaaaaaaaaaaacttggtgtgcggcgcgcgcgcccaggggccaccagagaaaaaggtcttctataagagaacccatccgcggttgaggcgcgcgcgggggggccccacagtaagtgcaaacgagcaaaccactgggcgccaaaacggggtggtcccaaaggagaacactccggggcgcaatagcgaacaacgggcgcgggcggtccccccaccaaataaaaaaaaagagcgccgcggggaggcancaaccaagcggcgtcggttccggagaaacaaatccccgagaaggcgggcgcacgaagggggaacaaaacgggggactacaatcaccaacgagagacgtcccaagggaggagccaggaatataaaaatataacgcccggcagcagagggggagcacaaccatcacagcaacaacaagcagaacgcaagagcagaggacgcggcgaaggcgagacaggagcagagaggggagagagcaaaaagcggacaagaaacgaagggcagaagaaggagggaagcgagccagagaggaaggcagaggcgagacaccgacgaggacaacccagacgagagacgagagaaaggagacagagcacaagcgaacaaccgcggcaaagagaagcgagagagagcagagaaggacgagcagaggaggagagcagaagcagagagggggagcgagaagcgcaagcagaagccaaaaaagcaagacgcaaccacaatagcagaacaacagcacaagaaccgacagacaacaagaagacacaaaaagaaagagacgaaacccagccagacgaaccacacacaaggagcaagacagacaagaagacagtcagcccgacgatacgcgagagagagcaaagacacagaaacgacaaagcaagaacagagaacagcagagcaaaacaaagaagagacacaaaacaacagaaagaagaaccaccgacacaaaccaagagagacgaccagcaagacaaacctaaaagcgcgagacacacgagcgaagaccacacgaagcagaaagcggaccagaccacgagaccacagaagcagcagacaccgaggcagcggcagacgagcgacgggagaagagcagacagagacaaagacaaggaagaagcaagacgaacagaagaagcaaacgcagagaaagaacagcaacaaaagaaggaagacgagaggacacgcgacagcaaactaggcaaagcaagacagcgaaggaagcagacagcagaaaagcaaccagagaaagacgaacagacacagagaagaagcgagaagcagacgaggaaccagagaagcacagagaagagcgaaacaagaaacacacagagaaaacaaccgacan

SEQ ID NO: 10434 - DNA, 1530 bp, Homo sapiens
  misc_feature 897, 1528, 1529, 1530: n = A,T,C or G
cgacccacgcgtccgcacgcttcccgccagtcccctaaccctgaggctgccgcgcggggtcactgcgccggggtagtgggccccagtgttgcgctctctggccgttccttacactttgcttcaggctccagtgcaggggcgtagtgggatatggccaactcgggctgcaaggacgtcacgggtccagatgaggagagttttctgtactttgcctacggcagcaacctgctgacagagaggatccacctccgaaacccctcggcggcgttcttctgtgtggcccgcctgcaggcaagaaggggttaaaagtggaatgtatgttgtaatagaagttaaagttgcaactcaagaaggaaaagaaataacctgtcgaagttatctgatgacaaattacgaaagtgctcccccatccccacagtataaaaagattatttgcatgggtgcaaaagaaaatggtttgccgctggagtatcaagagaagttaaaagcaatagaaccaaatgactatacaggaaaggtctcagaagaaattgaagacatcatcaaaaagggggaaacacaaactctttagaacataacagaatatatctaagggtattctatgtgctaatataaaatatttttaacacttgagaacagggatctgggggatctccacgtttgatccattttcagcagtgctctgaaggagtatcttacttgggtgattccttgtttttagactataaaaagaaactgggataggagttagacaatttaaaaggggtgtatgagggcctgaaatatgtgacaaatgaatgtgagtaccccttcggaccaaggcttcagatagcatgtctcagaagattgactgatgggtgtgctgaatcattcgtcactgtgtaactcatgacgcgnagacatgacaaaagaacacgcagcgacgagctctacacaacactcccgaaggaaatacgcacaccaacgagccgcacggcacagaaggagcagcaagaggacgagggcaggacagagcaaccacacagcgggcgcaggagaggggagggaggaagggagagggaaagcgcgcgcggcaggaggagaggagagaggcgcaggagggaagaggagacagcgcaggaagaggcgggcagcggagggagaaacagagggggggacaggggcggagggggggcaagcagagccgaggcaggagcaaaagacaggagacgagaggaagacagaaggaaaagagaggaagccaagacaagccagagaggaaggacggcaagcaacaggagaagagacacgaggggcagacagagagaggcagacgcaagaagagagagagaagccaagcaggcagggagcaggacaacgaggagagcgagcacagaggcagcagagagagcacgtgagcgagagaagaggagcgaggagagaagaacaaggaccggcaaggaggaagagaaggaaacaccaagggaaagaagagggagaagcgagagagcacgaagagggcaggcaagagagcgaagcggcagagcannn

SEQ ID NO: 10435 - DNA, 429 bp, Homo sapiens
  misc_feature 1, 2, 13: n = A,T,C or G
nnactcactgtanggcgaattagcactccacgcggtggcggccgaggtacacttaagcacctgcaaatctgtttattaattagaccatagaatctgtgtttcattggtggtcagctggccaatctgatggtcttgtcatacacaggtaagaagagacaaagagccaagagtttgtttggaggccggagtgagcttgacagaactagatgaaattggccactgggcactgggacccagaaaggcctcattgccacagagttgcaacagagtgtggggtcccattatcagaatcctttctatggtgcatccaattggctatgactctcctaagaacagcgctgcaggaaaatgcaagttcacaggataatgaatgcactgttgcttctctgctgctgacttttcccacgaataaaacttgtatttatttgt

SEQ ID NO: 10436 - DNA, 509 bp, Homo sapiens
  misc_feature 1, 2, 3, 4, 5, 6, 7, 8, 9, 10, 11, 12, 13, 14, 15, 16, 358,375, 509: n = A,T,C or G
nnnnnnnnnnnnnnnncccgggtacgcggggaaacacttcttacctcagagctgagctgggcatgagtagatgctcagtaagtggtgcacagggttggtccctatggtggaggccccctaacaccgcccaacccccctccatgttctcacagctccacgcactgagcacgggcatgaaggccatgatgtcagaattctgcacccagggagctgagatgtgccgcagggcctgtggcggacatggctactcaaagctgagtggcctgccatcactggtcaccaaattgtcggcctcctgtacctgcccgcgccacgggccaggtaccgccgggtgtgtctctttcacagcttgaaaagncctgagaacagctgtcnttgtgaagggaactgagatgcaggaaatttcttcacgcccctcccctttgtgaacttcaagaaagcctctggcattctctttctgcaaaaggcaacctgaaatgttgtctgcgtcccctgtttagcataaatgn

SEQ ID NO: 10437 - DNA, 628 bp, Homo sapiens
  misc_feature 1, 2, 3, 4, 5, 627, 628: n = A,T,C or G
nnnnnaagaatggaaaatttcaaacagactcaaaatgaaagaatagtacaaccaccccccgggtatccataacctaacaataacaattgttaagcattcggccactcatgtttcttcagctcccccacctcctccctatcctcccaggttcccactgaattatatatcatttcattcataaataattctgtatatttagttacagctcaatgaatttccacaaagtgaacatgctcatgcaaaccacacctgcactgggaaatagaaattacaaacacccggagccccctctgcaatactctctcagtcctttcctcactccttcccaaaagagtagctactatcacctattgtgaaccttgcatatatggattcatagaacatgtgtattttttggtttggctacatttgtctaacattgttggtaagatttatccatgttgttgcatatagccatagtttatttattttcattgctctatagtattttattgtaagaatacactacaatttagtcatccattctaccattgatgcacaactgggttgcttccagctcttgactatgacaaataatgctgctatgaacattcttttggtacgagcgcccgccgctgcggtggagann

SEQ ID NO: 10438 - DNA, 415 bp, Homo sapiens
  misc_feature 414, 415: n = A,T,C or G
actggggccttacttccctaaagacccagggaggggagagaaagtgctctgcttgtatcctaagcacaaatgcaatacagcaacatcagtaatggtaactgagtgcttactgcatgccagacccgtgctaagctctctccatgcactatcttaatgttcacaacctcacacagtaagcattattaacaacagcactttacaaatagaaatttgttgaggctcagagttgccatagctggtgagcatccacagcctacattcaaacccaagtttcattccaaagctttgctttcctgctgctgtatgtcttttgcgtcatcttcgcatatttaacctccttggctcaactgggaactctttgaaggctagggccatcaattacatttttgtttcttccagaaaattggcacgtann

SEQ ID NO: 10439 - DNA, 273 bp, Homo sapiens
  misc_feature 270, 271, 272, 273: n = A,T,C or G
aggtaccgttcctccagtgcccagagatgctctccgcaccaagccacagatgtggaggaggcaggtctggacttcaggcagacaaggaacttcagaaaatcctggggagagacagcacagggtaagagatggcctgtgaaaactgaaggcaatttggaaggcatttttaaattccgtggagccactggagaaatgtttacaggaatgatgccttaaaattcctcagtggtaagatctgagtacctcggccgccaccgcggggagctcaannnn

SEQ ID NO: 10440 - DNA, 10102 bp, Homo sapiens
  misc_feature 1, 2, 10060, 10061, 10062, 10063, 10064, 10065, 10066, 10067,10068, 10069, 10070, 10071, 10072, 10073, 10074, 10075,10076, 10077, 10078, 10079, 10080, 10081, 10082, 10083,10084, 10085, 10086, 10087, 10088, 10089, 10090, 10091,10092: n = A,T,C or G
  misc_feature 10093, 10094, 10095, 10096, 10097, 10098, 10099, 10100, 10101,10102: n = A,T,C or G
nncctccgcgaaggctcctttgatattaatagtgttggtgtcttgaaactgacgtaatgcgcggagactgaggtcctgacaagcgataacatttctgataaagacccgatcttactgcaatctctagcgtcctcttttttggtgctgctggtttctccagacctcgcgtcctctcgattgctctctcgccttcctatttcttttttttttttttaaacaaaaaacaacaccccctcccctctcccacccggcaccgggcacatccttgctctatttcctttctctttctctctctctctctctcttttttaataagggtgggggagggaaaggggggggaggcaggaaagacctttttctctcccccccgcaataatccaagatcaactctgcaaacaacagaagacggttcatggctttggccgccgcgccaccatctttcgggctgccgagggtgttcttgacgattaatcaacagatgtacagatcagctctcaaaatgtcttctgtgtcttctgagcgtcttctaagacaattgcattagcctcctgctagttgactaatagaattaataattgtaaaaagcactctaaagccacatgccttatgaagtcaatgctgggtatgattttacaaatatggtccggaaaaagaacccccctctgagaaacgttgcaagtgaaggcgagggccagatcctggagcctataggtacagaaagcaaggtatctggaaagaacaaagaattctctgcagatcagatgtcagaaaatacggatcagagtgatgctgcagaactaaatcataaggaggaacatagcttgcatgttcaagatccatcttctagcagtaagaaggacttgaaaagcgcagttctgagtgagaaggctggcttcaattatgaaagccccagtaagggaggaaactttccctcctttccgcatgatgaggtgacagacagaaatatgttggctttctcatttccagctgctgggggagtctgtgagcccttgaagtctccgcaaagagcagaggcagatgaccctcaagatatggcctgcaccccctcaggggactcactggagacaaaggaagatcagaagatgtcaccaaaggctacagaggaaacagggcaagcacagagtggtcaagccaattgtcaaggtttgagcccagtttcagtggcctcaaaaaacccacaagtgccttcagatgggggtgtaagactgaataaatccaaaactgacttactggtgaatgacaacccagacccggcacctctgtctccagagcttcaggactttaaatgcaatatctgtggatatggttactacggcaacgaccccacagatctgattaagcacttccgaaagtatcacttaggactgcataaccgcaccaggcaagatgctgagctggacagcaaaatcttggcccttcataacatggtgcagttcagccattccaaagacttccagaaggtcaaccgttctgtgttttctggtgtgctgcaggacatcaattcttcaaggcctgttttactaaatgggacctatgatgtgcaggtgacttcaggtggaacattcattggcattggacggaaaacaccagattgccaagggaacaccaagtatttccgctgtaaattctgcaatttcacttatatgggcaactcatccaccgaattagaacaacattttcttcagactcacccaaacaaaataaaagcttctctcccctcctctgaggttgcaaaaccttcagagaaaaactctaacaagtccatccctgcacttcaatccagtgattctggagacttgggaaaatggcaggacaagataacagtcaaagcaggagatgacactcctgttgggtactcagtgcccataaagcccctcgattcctctagacaaaatggtacagaggccaccagttactactggtgtaaattttgtagtttcagctgtgagtcatctagctcacttaaactgctagaacattatggcaagcagcacggagcagtgcagtcaggcggccttaatccagagttaaatgataagctttccaggggctctgtcattaatcagaatgatctagccaaaagttcagaaggagagacaatgaccaagacagacaagagctcgagtggggctaaaaagaaggacttctccagcaagggagccgaggataatatggtaacgagctataattgtcagttctgtgacttccgatattccaaaagccatggccctgatgtaattgtagtggggccacttctccgtcattatcaacagctccataacattcacaagtgtaccattaaacactgtccattctgtcccagaggactttgcagcccagaaaagcaccttggagaaattacttatccgtttgcttgtagaaaaagtaattgttcccactgtgcactcttgcttctgcacttgtctcctggggcggctggaagctcgcgagtcaaacatcagtgccatcagtgttcattcaccacccctgacgtagatgtactcctctttcactatgaaagtgtgcatgagtcccaagcatcggatgtcaaacaagaagcaaatcacctgcaaggatcggatgggcagcagtctgtcaaggaaagcaaagaacactcatgtaccaaatgtgattttattacccaagtggaagaagagatttcccgacactacaggagagcacacagctgctacaaatgccgtcagtgcagttttacagctgccgatactcagtcactactggagcacttcaacactgttcactgccaggaacaggacatcactacagccaacggcgaagaggacggtcatgccatatccaccatcaaagaggagcccaaaattgacttcagggtctacaatctgctaactccagactctaaaatgggagagccagtttctgagagtgtggtgaagagagagaagctggaagagaaggacgggctcaaagagaaagtttggaccgagagttccagtgatgaccttcgcaatgtgacttggagaggggcagacatcctgcgggggagtccgtcatacacccaagcaagcctggggctgctgacgcctgtgtctggcacccaagagcagacaaagactctaagggatagtcccaatgtggaggccgcccatctggcgcgacctatttatggcttggctgtggaaaccaagggattcctgcagggggcgccagctggcggagagaagtctggggccctcccccagcagtatcctgcatcgggagaaaacaagtccaaggatgaatcccagtccctgttacggaggcgtagaggctccggtgttttttgtgccaattgcctgaccacaaagacctctctctggcgaaagaatgcaaatggcggatatgtatgcaacgcgtgtggcctctaccagaagcttcactcgactcccaggcctttaaacatcattaaacaaaacaacggtgagcagattattaggaggagaacaagaaagcgccttaacccagaggcacttcaggctgagcagctcaacaaacagcagaggggcagcaatgaggagcaagtcaatggaagcccgttagagaggaggtcagaagatcatctaactgaaagtcaccagagagaaattccactccccagcctaagtaaatacgaagcccagggttcattgactaaaagccattctgctcagcagccagtcctggtcagccaaactctggatattcacaaaaggatgcaacctttgcacattcagataaaaagtcctcaggaaagtactggagatccaggaaatagttcatccgtatctgaagggaaaggaagttctgagagaggcagtcctatagaaaagtacatgagacctgcgaaacacccaaattattcaccaccaggcagccctattgaaaagtaccagtacccactttttggacttccctttgtacataatgacttccagagtgaagctgattggctgcggttctggagtaaatataagctctccgttcctgggaatccgcactacttgagtcacgtgcctggcctaccaaatccttgccaaaactatgtgccttatcccaccttcaatctgcctcctcatttttcagctgttggatcagacaatgacattcctctagatttggcgatcaagcattccagacctgggccaactgcaaacggtgcctccaaggagaaaacgaaggcaccaccaaatgtaaaaaatgaaggtcccttgaatgtagtaaaaacagagaaagttgatagaagtactcaagatgaactttcaacaaaatgtgtgcactgtggcattgtctttctggatgaagtgatgtatgctttgcatatgagttgccatggtgacagtggacctttccagtgcagcatatgccagcatctttgcacggacaaatatgacttcacaacacatatccagaggggcctgcataggaacaatgcacaagtggaaaaaaatggaaaacctaaagagtaaaaccttagcacttagcacaattaaatagaaataggttttcttgatgggaattcaatagcttgtaatgtcttatgaagacctattaaaaaaatacttcatagagcctgccttatccaacatgaaattcccttcttttgttattctttcttttgatgagtaggttaccaagattaaaaagtgagataaatggtcaatgagaaagaatggaagatggtaaacaatcactttttaaaacctgttaagtcaaaaccatcttggctaatatgtactggggaaataatccataagagatatcaccagactagaattaatatatttataaagaaagagaccaaaactgtctagaatttgaaagggtttacatattattatactaaagcagtactggactggccattggaccatttgttccaaaacccataaattgttgcctaaatttataatgatcatgaaaccctaggcagaggaggagaaattgaaggtccagggcaatgaaagaaaaatggcgccctctcaatttagtcttctctcattggccatgtttcagattttgacctagaaatgcgagctgtggttaggcttggttagagtgcagcaagcaacatgacagatggtggcacgctgtttttacccagccctgcctgtacatacacatgcacaccctctctgatatttttgtcctttagatgttcaaatactcagtagtccttttgtttgcggtttagattcattttgtccacacatgtacccattttaaaaaacaatgtcctcgatgcttctgtagtgatttcattttagccaggtatttctttcttgtgtgtgatgaaccagtatggatttgcttttctaagcctcctgttggttactaatctcacttggcacattataactaaaggaatcccctcaattcaaaagcatagatggatacaaatgtcagaccgtgggtttaatttgtttagaacacatggcatttcttcacaaggtaacctgctgtatttatttattttcttttggttaaatataatttccaaactttgtggtcaggcagcgtctaaggttacgttaccacagactgacagttggtatatgtaccagccaatcccttcattaaatgtatacagatttagttaagtagcattaaataggattcttagaagtatgtcctcatagaacttttaatacttaaggctttgtaaaaactatccatgaagggaaagctcctcagcataactgctcagggaaatagggctaaataactgaacattaaataattggttaaaggtgctgttagtcgagcctcaatgcttgctacaaggatgtatgtacaaggactgactttaataatttgcattatattgtcccaaccagtagtttattttttgccacggagatgtagaagatattacaagctactggatgcactgtcagattaacttatttcattaaagaagttgggagaacaaataggaaaaaaaaaacttatttttctagtaaatattaatgtattacatttcaaataatggtgcctgacatattgaataattattttctacagtgtacgtatgcaacaaagatattccatcatgcattagagtcagttctggctctgcctagctgtttacatttgcaaatgtagcaaacaaggtaatgaagcaactatttctattgcagtagatatccttttgtgtgtgtgtgtgtgcattaaagttgtaaacggtaacatgaaacaaatgaaagttcttgctataatggtatggaaaacaagaaggaaatgaaaatatttttatgcctacttaggaaaaaaagggtagcacttattcattccaagtacttttttttttttaatttttaagctcttaactcacattgttatgcttaagatgataaacatatatcctctttttattgctttgtctatgtttcatatgaaacatttcagaaattattttgataagtgttgctggaatctgcaacgctgatgttttttttgcattctgtagtcgcatttgcactccatttttacattaattcgcagttgctttgtatcattgttttgtttgggttttgtttctttttcacagtgccgggtcttcgtttcttaaagttggatggcaggtagagttcaaccagttcgtgactgttgtagcgaatgaagttaaaaaaatgtctttctgatgttgtgttgtcattttcatttttgcatttttttgtttgcatattaaaaaaagagaaaagagaaagcaagagacagaaatcaggactaagtcctctgcttcagtttcattgttaacgggccttattctgatctcacctgtcgcgtagctctaatattcacataaactgaaataaagaagtggaatgaggagctttgacattcaaattatgtgatgtaatttatcttccttaggaattttgatggatgcatctcaaaatgtatagccagacttgagaggtgacaattaaagatctaaaaaagagaggagattcccccaaacaacaatatttaattttcttagtaaaaagaataacagaatgcatcgtggcaatccttaagcaacattatctatgtggactgcttaaatcagcaaaacaccagaagtttggttaacttgggcaatatgacaagtattactttttgggcaaaactactcattaagcaatttctctagtgtgtcggacacaaataggttctttatttttggcatgtatgcctttttattttcattcaattttttttttttctcagacagacatagtagtaacgactagcattggaaaatacatatcactattcttggaatatttatggtcagtctactttttagtagaatatttttggatagcgttgacacgatagatcttattccatacttctttattattgataattttattttcattttttgctttcattattatacatattttggtggagaagaggttgggcttttttgaaagagacaaaaatttattataacactaaacactccttttttgacatattaaagcctttattccatctctcaagatatattataaaatttatttttttaatttaagatttctgaattattttatcttaaattgtgattttaaacgagctattatggtacggaactttttttaatgaggaatttcatgatgatttaggaattttctctcttggaaaaggcttcccctgtgatgaaaatgatgtgccagctaaaattgtgtgccatttaaaaactgaaaatattttaaaattatttgtctatattctaaattgagctttggatcaaactttaggccaggaccagctcatgcgttctcattcttccttttctcactctttctctcatcactcacctctgtattcattctgttgtttgggatagaaaaatcataaagagccaacccatctcagaacgttgtggattgagagagacactacatgactccaagtatatgagaaaaggacagagctctaattgataactctgtagttcaaaaggaaaagagtatgcccaattctctctacatgacatattgagattttttttaatcaacttttaagatagtgatgttctgttctaaactgttctgttttagtgaaggtagatttttataaaacaagcatggggattcttttctaaggtaatattaatgagaagggaaaaaagtatctttaacagctctttgttgaagcctgtggtagcacattatgtttataattgcacatgtgcacataatctattatgatccaatgcaaatacagctccaaaaatattaaatgtatatatattttaaaatgcctgaggaaatacatttttcttaataaactgaagagtctcagtatggctattaaaataattattagcctcctgttgtgtggctgcaaaacatcacaaagtgaccggtcttgagacctgtgaactgctgccctgtttagtaaataaaattaatgcatttctagagggggaatatctgccatccagtggtggaaatgtggagtaaagaagctggtggtctgcttctgtgctgtatgccagccttttgccttaagttgagaggaggtcaactttagctactgtctttggtttgagagccatggcaaaaaaaaaaaaagaaaaaaaagatcaagtcgtctttggtgagccagtaaggtgaaagcttgctgactgtccaaggcacaagagaaaattgaggaattgaaatgcaacctgagtatcaaactaaatattctaatcaaaggtaggtactgttaggtggaattctatcagcaggcaactgcaaatgagaagaagatagaaggacgcccgtcgggactttggagggcattgttattttcccaaagaaagacggccaagggcagaggcatggattctttgcagagcacttccttttggtttttcagtactgtttcatagacagtgggctcacatgttcctgatagtgctgcagttgcttagaaagcatcccagttaattgcagtaattagaacttctggaatatgctagggcagaagtatgtcaagtatgtcacatgaagaaaatgtgaaattcaagagtaatccacacgtgagaaactagacaatgtacattcatgtgttctcttgaaaggaaagggagagctgtaagcttcactctgtcctacaccggagaaaagcaggaataactttaccgtggaaataatgtttagcttttatcagagaaaattgtccttctagagcatagagtcccaaaactcaattctggttttcccctgttttttttttttttttttttcccaacatatgaactgcagcatatcactttttctttttgtgcctcaggttcctcagctgtaaaattgaaaaatatatgtattaataatattattaataataataatggtaatgtagtacttgtttgtaaagcactttgagatccttggttgaaaggcaccataggagtgccaagtattattatgtggccaagggggttatttaaactgtcagttcccaaaggccaggaaaggttggggtcatttttcttaaagacgagctgtaaatatcaactaggcagccaatagtgttgactatgaagatgcaaaactattactaggctgataaaatcatagtttcttaatggctaccaataaggcaaatatcacaataataaacgccaaattccttagggcggactatttgacaaccacatggaaaactttgggggaggcatgaggggggaacatctcaaaatgccaatgtaaaatttaacttacagcaatattcaccagcagaaaatgtctttcatatggaatgatttcatgttgctaagaaaaagaattcaatttgtagtcctgatttgaatactagaatgttggctataatagttctgttcttacaacacatgaaattttttcgttttattttattttgttttcatagtgcatgttcatttctactcacaaacatgttcttggtgtatttcttatgcaaacaatcttcaggcagcaaagatgtctgttacatctaaacttgaataataaagttttaccaccagttacacaaacaaagataactggatactcaaactcctgagctcaagcggtcctannnnnnnnnnnnnnnnnnnnnnnnnnnnnnnnnnnnnnnnnnn

SEQ ID NO: 10441 - DNA, 1091 bp, Homo sapiens
  misc_feature 1, 2, 3: n = A,T,C or G
nnncggggcatataaaatgcagttctgatcctgtcatgcggggctgcttaaaactcttcagaggttcaccatcgcttccagaaaaagatcaatactcctgacgtggcaacctgtcgagactcaggaccgctaggaaatcagctcttgtttacccctctatccattacactacgatccagctgggtttaggcatcacttcctctgagcaatcctccctgatgtcatgaggcagtgctgagtgccttctctggaccctctgtttacttgcctgttaaatcctgaacatctggaagggagtcgtgttcagcaacatatctacgccttgcagcacggtgcctggcctgcagctggtgttccgcaaacagctgctgactgacgggatgcatcggtattcacagggttactaagaagtgcttgtcctcggtcaggccaggaaagagagatgacagacttggtcccatcggcaaactctttacagacaaaaaatccacctcactcatctctacagctccagggctcagcacaggggctggcacatgaaggctccctttccttaccttttcctggcacatgcaaatatatgttttttgagtatataaatcaatgaatgatgagaatatcttgcaactccttcaaaccgacaggtccacagagatgatcttgctcctgaccttgacaacagaaatacattcttagagactctgtagtcctaaatagaactttggggaatccttttaaaaatcaaacgcatacttggtaggggaactgacaatggcaaccagttgctcagagttatttgctcaaaggcctacctgcctcctaagcctcactgttcttcatcaactgtcaggggttaaactttcaagagctactcccaaaagagctgcaggaaaattctgtctaaacagccatgcaaaagtgtctggggatcactacggacagaggatgatgacagagggcccatgacattgggccttgtcatggctgaacactgaccttccactgtcatggctgaacactgaccttccagtgcctacagcttttaaaaagagtaaaaactatgttcatgggtacacaaatacaaacatgca

SEQ ID NO: 10442 - DNA, 958 bp, Homo sapiens
  misc_feature 1, 2, 3, 4, 958: n = A,T,C or G
nnnnatagaacgtccgtccgggcaggttcctggtaatttacagaacgttcgttatcagatttgataattatatattaaggttgtaaagaatgtgtatgccagaattataggtagtagatcctagattcttaggaaaaatagtttctttataatcttttgagtagtgaaatggttacttttacaatggttatgaactgggtcaaggcaaaagggccactatatgtcttcagtcatctttctatgcctgaaatccaggaaacagtgaaaatggatgttccctggaacagccattgcgatgccatatgttggtcattggtgtccttaaagtgtatctcagataattgtgtgtctcccttacttgtgaactgaggggtcacaatattgatgtgcctgatgtgtgcccctctgcatttcgtgggtagtgtctcaaatttggctatcatattgatgagagttactaatttggttttagctgccagaggtttaggtggttttcacttccagtgacttacctgattgcacatagttacaacgtcactggttgcactccttcattgctagcatcttttttctagtatattcgatatacattcttttggtttatcctttaaaatatttgctgagatagcatttaaatgttaatgctgtatttatatttgttggatgcttaattcaatgtgtcttctttccctttccatgaatgaaaagaaattggaagaagagaatcaactatttcgtgcaagtattttgttcagtttagaagatgttatggtattgtgaaaacaatattctggagttagacatggaatcacaatggccttccaagtcagaacagtctgggttgaaattgactccttactggtccaaagccacataactgattcatcatgcagcctttttttaaaaaaaagttttttttttaaagctactcaaatatgtcagttttattttctctgtn

SEQ ID NO: 10443 - DNA, 815 bp, Homo sapiens
  misc_feature 1: n = A,T,C or G
naatcccgcctggttgtgcccatgtatgcaatgtggcgtgtcttccatttaagtttgcctttcccaaaagccaaacatcttgctcttccttgaagttttggaatcatctcaaggtgtgcgtcaaaatggcaaaatggggcaaagagtcgttcctttgcaacggggttggtattgttttcctgggaaacccgtaagggtaatgccgcatcaagattgaaatcaagtgtggaccgtgggtattcaatgtgtctaaagtcttctcttggaaagagtatgcacgtgttcaatgtttttgaaagtctgttaaaatgttgtcaggcgttgcatggtttgcatcttcccactccagcaggccacggtggtcctcgttgtgttctgaagagcaatggacacaagtgatataacagctttgttgccaccccaggcttttctgtgatgatgccatgggccacattctgatcaaactgcacacccagaaggtgaagtgttggctccaagcgagaaaaattattaagtttggcacttgaaaccctgctgtccaaaaattctgaaaaatcatcctgaagttcaaacttgtgtagaacttctccaagtagatagccactggaaaatgcctttgcaaatgacttgggactcacggtccgggacaccttcaactccttgttgagccactggcacaggatctccgacatggttcagccggtgcctcagaccgcaggcgggggcttagaaactcgccaggaaccaagcctgccagcccgcgtcctcctgtagccaagggcaaccctttgctatggaagcgtatccccccgcgt

SEQ ID NO: 10444 - DNA, 1403 bp, Homo sapiens
acttttcttttttttaactggttttaattcgcaataccagctttcaccctgtcctctgcactgcttagccttggctctgctgagttgtgcaacacattctgagagatgccatacaatgctccaggcaaacttatagaaaaacaggaatgagtgattttatacgggatgtgtttcagctgtccaattcaaaataaatcacgtccaggtgcattctttcctaatttgtgacccaaactgcttgcactttatacattaatgaattattttttaaaaagaaattagctctatcatgaagacagtgctatctaaccctttgtggtctttctcccttaaaaagcaattgttaccattttataggtgttaggtttaatctacatatttgaatgaagctgaaatgaactaacgtatgtcaaccagtaaaagcaggacacttaataataatgcttccatgaaaatatacattgtgcatatgtaggctctttttggcattaccaaatttgccaagaactttcttctataaattaaattcattatcaaaactacttagtgagccagcctttaaaattcccattaaattttttgaacaactttaattaaaatcttctgaattcctagtgtgtttctctttcaatttatgaagaaaatactttagtctaaacccataggattacaagcctataacaccatttataatcacagggcttgagatagctgtcaccgttttaaagtcatctcatctttaatgcaatgttttaagctgacgaaaatggaaatggttccaatcaggaaaataatatttcatagaaacgatgacttattcttccctccaatagtgttaatcagatttcatttatttttatagcatgccaggcattagcattaccctctagacacagtcccctttctatttgtccttggataagttatctgctgtattaggataactttcttcctcaagataaatgtttcctgataaaacaatattattaacctgcagcaattgcaatgtgaaataaatgcagttgtcaagtcagctttgaagtgggggaagaacagtgacagatttaaaaaccgcggtactgttcgctgcttttcttgagttcatttgtctttccaatgatcgtatatgattgaatagtagagaaggcacctgcaagtagaagccaatggcaaaagattgataagcatctttcctggactctggtgcttcgggggtgccaataactgcactctgagtaatcctggtcacttcatcaattgagagagtttaagtcaggggacttatgatttctttctcaacaagaccaggtgaacgtgtttttgcagttctaagtattatttgcaaattaaatagccatatatctctaaagcttcctgagcaacaaccagaggtacctgcccgg

SEQ ID NO: 10445 - DNA, 822 bp, Homo sapiens
acagttacaactgacttgcataacactaaagaaaacattgtaattcctacgccagtagtgggggtaaactgagaaccaacctaattttcaccacagggccctctggaaatagaggaactaaaatgatgactgtttgaaagtgaagaggcagattcctagaacatcactcctactgcattccttacctccactccataccctttccttcttcactcaggtaggactgtctctggaatgcatgacagcatgcacagttcagagcttggatgtgatcctggaaatgggcttagatgaccttatgaacactgaatgctgattgcagacactctcaaccttcttcctctagttgacttctatggctgtgccagccagtcctagacccttctagaagaacactagatgatacatttctgaggtattttattacttcaaaagaaaaaagctacacctaataacatcatgtttctttttttaaaaaaagctcatgtatatcactgtccaggaaaactccaaatcaatcaacctcttcatctgctaagaaaaaaaaatgttcaaaacaaatgaagattaatattcagatacacaggatattatatgactgaagcaagaagaaacgttatgtgaaaagaaatagaaaactaaaaaaacctggaaattaaatacatattagcagtcttaaaactacatagaagtctagacaacaacatcgaaaagaaaaaaagaaaaaattttcagacttagaagaacaaggcaaagatagggggaataaaaatttaaaaaaaaaagtagaacagttcaatatccaaaattatacagttcctg

SEQ ID NO: 10446 - DNA, 1084 bp, Homo sapiens
acctggaaagatgaacaggattgcagcagatagagacaggtagaaggagagagattccaagtggaaggataaaggagagggaagagaagcaaagagtgcaacttccaagaagattttctggtttctggcactggtcatagatagcttgggaggaaacaggcagagagggttttggagaaacagagctgcaaagccaagttagatgttaggtgagttgaaaaaataacttagggcaaaagcagagggagggaggtatttactctgaacagagatgacagggtggggaggacagattgttttgagtaggcaaaggccaggagcatgaagcaagctaggaattgggaggctggcctagaagcatgggccacctgggaaagggacaaaagttaaagtatgacaaaccctttgtgttcaccaaatttcttttctggagtccttaaccatttgatcttactggaatagaagttatactagaactcactgcaaagtggagtaaggcttacagagggaaaacagcagagggcctaatgcaagattaaccttctcagggacccctgcagggactgggagtgctaagaatcagggaggcttggagcagctcactttacagtataatgagaacaggactcacctggctcaggcctggcatccaatcatcagcccactctggtttccatcctctgcgctagctgaaaggccacatgtactgcagccattgttgctccctttgcccttcagggtgtctttccccagcatctgtccctgcagcacccccaccccctcactctaattctgagcactcaaattgcccatcagtccaagccttctcctaatcacagccctcctacctctgagccccttcatggagccctgttcatggtgcttggcattttatgacaactaaaccaaaaagcagtgaggtttgaaaaaaaagagccaaaagtcaatcctggcaggggaggatttgctctttgtcttaaaaaaccaagagtaccagcttttgatggaaaaatttcaaacctcaaacagtgagtacattttgccccatcaattacatctctcagaattcatcctaagcggacgc

SEQ ID NO: 10447 - DNA, 379 bp, Homo sapiens
  misc_feature 250, 251, 262, 377, 378, 379: n = A,T,C or G
ccgggcaggtactattaaatttaatgagaggtaacccatgcaccggcaggaagttcaaggggacagaaggggcttgctccactctggagccctatctcctctcacctccttccttctagtttgacatgcgatcttgtctctctcttttataaagtgcttccaggcccttttgattaggatgctgtcctaaatccttcctcccgcgtacctcggccgctctagaactagatggatcccccgggcctgcagnngaattcgatantcaaggcttgatcgatacccgttcgaccctcgagggggggggcccggttaccccaggcttgtatgttcccttataagtgaggggtttaaattggcgccgccttgggcgtaatcannn

SEQ ID NO: 10448 - DNA, 488 bp, Homo sapiens
  misc_feature 488: n = A,T,C or G
acacactagttttgtcatacgtgaggcagtgtattaaagaggaaatgttctgtctttgggaccagacagacttgtttccataaccctgattgtctagcactttatagctctgagtccatggaccaccacttagccatccctaccatcagttttttgtaaagagctatgtcaggaatgtggaaggattcaagagagggcttttaaagtgtccatcacgacctttaacccaagggaattaatgcaggaacagaaaaccaaataccacatgttctcacttatctgtaggagctaaacattgagcacacatggacacgaagggagcaatagacctactattgtaggggcctacttgaggatggagagtggagggagggtgaagattgaaaaactacttattgagtgttatgctgcttacctgggtgacaaaattatctgtatgccaaacccctgcaacatgcaatttacccatgtaacaaacctgcacatgn

SEQ ID NO: 10449 - DNA, 1094 bp, Homo sapiens
  misc_feature 1: n = A,T,C or G
naccctgctgaaagattatttctaacaggcttgtagagaaacgtcggttcatgtaaattagaaattatggggccactttgccattcttcacacctgcaatgaacaggtgtttatctgcagttctgacttatctcttgaactccatttgcatgttatagtgggatgcagctgatgccctgtccagatcttcttcaggccactacatctatatatgcattcatattccagtggctgtgagtgttggctgttggttgacagaggagctgcatcctcctggaggaaactgaactcagctgatgaaagccacctggtcctggaggtgaagcatcttccaaatgacagcctgcagtcaatgactgatgaatatgacttcattgcctcatgacaggacctactctggggtatagatcatgcttctaagctcctcctggggtcctgctgaggctcaatgccagctgaaaccatacccttgctcacatactttcccttctctttccttcttcccttgcttccttagagattcctcctgcaatggcttcctcaaaaaagcattttcataagcaacctcatgtcagcctctgcttccacagaagccaatctgagttaagcagctgtttaacttagcatgtccaacataaaattcttgttttcttctcatcccctgcccctgaacgttctcctttgcctgtctttcttatctcattgaaagtaacaacacaagtatcaagtgaaaataaaagaatcttctctgatttctttctttctaatgtattattaaattctactgatattaccaatatctattcaaataccaacctagtctaagatactatcatctgtcttctagacttcaactgggttcctaacactgatggtattacacaatttttgcaatgaagtcttacccacctataatccattttccataaagcagcattatcattttctaagtcacacactgtagttttaatacaatcccaaactaacaagcttgaagaaataaaattattgttaaaattgtaaaaattacggagtcttatatttaactaatcatggtacctcggccgccaccgcggtgagctccaattcgccct

SEQ ID NO: 10450 - DNA, 610 bp, Homo sapiens
  misc_feature 610: n = A,T,C or G
acaaaatatttatagatatgaggcttcactttgttgaattcatcatacacacacacttctttttagcagaaattaatagaaagccaattctaaattaatgtaggtaatacataatctactcaactggatgaataccttggttgcaagtcttgtcctgagcgagctaagtgacaacactctcaatctactgagcttccagcatctaggcagagctcccaggacaagcagaagtcacagggaacaggaagcaggaaagagcaggaaaagatcctttagttcccatgtgtagaaacaaatgctcagctgcctctgtattgaaccatactgatgcctgccactatattgttcattgtagatagaaatcattataagttgcagtcgattagaaattgcaaccacctctttcaaaaaagtgattaccaaaattttgaaaaggaagagaaatacagattgtaattttttgctataccagcaaagaaaattaaatattaaaaatattataaagatgcttctgacaagctatgtgaccttcagagtttcgtcgtcaaaacacagtattaatctagatcagcgtttctccaaatttttgttctcagcacccctttatacn

SEQ ID NO: 10451 - DNA, 395 bp, Homo sapiens
  misc_feature 1, 2, 3: n = A,T,C or G
nnngcaaagagctgaaaaccaagtctccagtcctgggaaaagcagtggtatggaaaagcaatggaaagagcattttgaaaatgccattccactgttttctggcctttatgatttctgctgagaaatccactgttagtctgatggggtctccttcataggagctgttatcactgcagaaccaaggttacctgtggaagctccttgctgaagccagttttctatcagatcatccatcaggcctagcagggggcaggcattgtgctgactgtggaagatcacagagagtgtgtcagagtgaaattgactttggaactgtctttggtgagtccacaccttatttatccacttctgctttctccagagctgcctagcctggtacctgcccgggcggccgc

SEQ ID NO: 10452 - DNA, 956 bp, Homo sapiens
  misc_feature 956: n = A,T,C or G
acgcgggacattgatgggagagatgtggaggaagagggaagaggtcattttccgtgaatacagcttttctttttaccctttaaacatttttgctccctttgttcttttcccagattacttctgtttgcttgggttcatctggctctccatgaatgtcctgcttttctggaaaaccttcttgctgtataaccaagggccagagtatcactacctccaccagatgttggggctaggattgtgtctaagcagagcctcagcatctgttcttaacctcaactgcagccttatccttttacccatgtgccgaacactcttggcttacctccgaggatcacagaaggttccaagcaggagaaccaggagattgttggataaaagcagaacattccatattacctgtggtgttactatctgtattttctcaggcgtgcatgtggctgcccatctggtgaatgccctcaacttctcagtgaattacagtgaagactttgttgaactgaatgcagcaagataccgagatgaggatcctagaaaacttctcttcacaactgttcctggcctgacaggggtctgcatggtggtggtgctattcctcatgatcacagcctctacatatgcaataagagtttctaactatgatatcttctggtatactcataacctcttctttgtcttctacatgctgctgacgttgcatgtttcaggagggctgctgaagtatcaaactaatttagatacccaccctcccggctgcatcagtcttaaccgaaccagctctcagaatatttccttaccagagtatttctcagaacattttcatgaacctttccctgaaggattttcaaaaccggcagagtttacccagcacaaatttgtgaagatttgtatggaagagcccagattccaagctaattttccacagacttggctttggatttctggacctttgtgcctgn

SEQ ID NO: 10453 - DNA, 539 bp, Homo sapiens
  misc_feature 1, 2, 3, 4, 5, 6, 7, 536, 537, 538, 539: n = A,T,C or G
nnnnnnncaggtacgtaggggccctttgctgcaagcttaggccagtgtcagctcctgagccactcctgactcagttggaggagactcagtgtcctctgccccctgcctggtggagcttggcagcaagtcccaagttttacagtgttgagaccaagtgggcagccatcaccattgaggggtgcccttttgctccccctcgagtccaagttatagtattgcttacttcctacctgaaatagtttatgggtcatgggtctggcttacatcaagccccatagccagtctggttgccccacctaaggtcttggtgctctttgataatagccacagctaaatgtattagtcctgtcctaggaaatgcatgatcttctccccaaaaatatatacacttactatgtatacatataaactaaaaataaagcattggaaaattaagaaaaataaatgtatgatctttttatatctcaatcctttccatagacctgtgtgatagagcctgttaatatgcccatcatgcagatgaaagcactgagacnnnn

SEQ ID NO: 10454 - DNA, 737 bp, Homo sapiens
  misc_feature 709, 710, 711, 712, 713, 714, 715, 716, 717, 718, 719, 720,721, 722, 723, 724, 725, 726, 727, 728, 729, 730, 731, 732,733, 734, 735, 736, 737: n = A,T,C or G
acagcaatggcacactctatcctaataatgacatcctgtataatttagtatgctctgtatctcactttaaatgtagcattaaggatgaagcagtagaaaatgaacgccgggccttttaataatgaggctcaggtttgctatcttaatttcaggaattaggaatgggagggatgctaaggagactgtttaaatttttaaaaagttctctctatgcctgatacagatgcaaattgcttgctcattacattctttcagcctttttaaacaagtttgctaaaacaatcattctctggcattaagacagcttacctgccaagcttgacatttctataaccaaatcaatatttcaatagtctccaactataaatctgatgttgatttgaattctagggagtaatgaatgatccaattagaaaacaaacaaaaaagtaaaaaaaaatataattagagtgtttattcttccttgatgataaggagcccttgacaagacagaatgctgttgccagcaagcctccttctttacgtgtaatcgatcttggaagttaaaggtttgtttgcatttttaacattgagagttaaatatattcctttgattgagctgttaagtggcagctcaactaccccggagtttattattcctttgtgtctgaaatgtgcaggaattttttgctacctgagatacacttacagatgaacatagacatggtannnnnnnnnnnnnnnnnnnnnnnnnnnnn

SEQ ID NO: 10455 - DNA, 488 bp, Homo sapiens
  misc_feature 463, 464, 465, 466, 467, 468, 469, 470, 471, 472, 473, 474,475, 476, 477, 478, 479, 480, 481, 482, 483, 484, 485, 486,487, 488: n = A,T,C or G
acagtgattttaagagaataaatgtccagattcccaactcctatatgcactttttactaaaatgattctgcttgagaatgtgcctgcagtgtgagggaatgccgtctcttttctcttttcccattttccattcaccctttaaaaaggcaaagcacacctcttcctcatcctgagtctattctggcatatcaccttgtggtgtaaaaacctccaggcaccaaacaaagggacactttgaaaatattagtgtcataaacttgtgatagggctccaaatctttccttgctgttatatatgtatttctgttaaggaagaagtgggatagaaatacaaagttgaggagaaaaaggaaggatgtaagctttctgattgtcttagcactttgggaggcagaggcagggggattgcttaagcccaggatttcgggaccatcctgggcaacgtggggagacaccatctctannnnnnnnnnnnnnnnnnnnnnnnnn

SEQ ID NO: 10456 - DNA, 843 bp, Homo sapiens
  misc_feature 1, 2, 3, 4, 5, 6, 7, 8, 9, 10, 11, 12, 13, 14, 842, 843: n = A,T,C or G
nnnnnnnnnnnnnnccgaggttcacagatgaagaggcaagaaaattatgccaaattaccctgtttccctttgtcacactgcctcctcgctgacaccttcattctcctgcaaccttacactttgatgatgacttgctctgcttccatggaactacttcacttggcctatggcacaaggcacttccttccggcaacattcgcaccttgggagggggctatttttgcatgcacctagtccattgcaatccatttgttcttgaagggcaagatagaaactttgttttattatctacactcacgaaaaacaaattttgtgcaccattcccaacactattcttttttctttttttattttagtaaaggtggagaaagcttttagtgaaagtcatccacatctcaactctcgtaacattaacattatggcctggctactttccagcatcaccatgatagaaaaaaagcaccctccaatttaataactaaattaatttttcctccctccacagagtgtgcaattattaaactcagaaagatcttggcagcctcttgccctggtaaataaaacgttgcattctcatcatatgattaattaatgttcctgattcaaggagatatgaaatcgctttacattccttgtgttattgaataacccaacgtgcattattgctcaggcactttttatatttatgcagttaaatcgcaaggaataaactgcaaagccctaacattattctgcagcactctgtgagttacagaaaataaaacgaggagatgcctgaaagggaaagaagaagaaaagcaacaggagagttgggatgaaaaatagtaatagtgattggaggnn

SEQ ID NO: 10457 - DNA, 1294 bp, Homo sapiens
  misc_feature 1261, 1262, 1263, 1264, 1265, 1266, 1267, 1268, 1269, 1270,1271, 1272, 1273, 1274, 1275, 1276, 1277, 1278, 1279, 1280,1281, 1282, 1283, 1284, 1285, 1286, 1287, 1288, 1289, 1290,1291, 1292, 1293, 1294: n = A,T,C or G
cgtccgtagctcagaaacctttccttgcctactgagaaactgcagcaggcagtgtgcggggggggctacaaagaaacttcaggtatatggcgccattttcaacataaaagataaaaaccctttcaacatggaggtgctggtagatgcctggccagattaccagatcgtcattacccggcctcagaaacaggagatgaaagatgaccaggatcattaggggggcacttaccacatcttcaccaaagctcctgacaaattagaggaagtcctgtcatactccaatgtaatcagctgggagcaaactttgcagatccaaggttgccaagagggcttggatgaagcaataagaaaggttgcaacttcaaaatcagtgcaggtagattacatgaaaaccatcctctttataccggaattaccaaagaaacacaagacctcaagtaatgacaagatggagttatttgaagtggatgatgataacaaggaaggaaacttttcaaacatgttcttagatgcttcacatgcaggtcttgtgaatgaacactgggcctttgggaaaaatgagaggagcttgaaatatattgaacgctgcctccaggattgggtaggatttggtgtgctgggtccagagggccagcttgtctcttggattgtgatggaacagtcctgtgagttgagaatgggttatactgtccccaaatacagacaccaaggcaacatgttgcaaattggttatcatcttgaaaagtatctttctcagaaagaaatcccattttatttccatgtggcagataataatgagaaaagcctacaggcactgaacaatttggggtttaagatttgtccttgtggctggcatcagtggaaatgcacccccaagaaatattgttgattgattccactgtccatttcaaatctttcttatcagtaaaaaaacattaattcaaacacaagcattgtgatctacattagcacaaaatgcaactgattatctaggatctgtgtattacttaagctcacccttaacagttttaccttccttctcctctgtattcttacagaaaattagaagctcaattttatggtctcataatttcctttatgacagacatctcagaattaaaatcacccaaagccaatcattagtgccaagataaccctttaacggcaacactttcttaaatgaagactatttctttcatgaaaaaattcacttttatgactttcttgttaaaataaaaagtctgcttttaaaaaaaaaaannnnnnnnnnnnnnnnnnnnnnnnnnnnnnnnnn

SEQ ID NO: 10458 - DNA, 728 bp, Homo sapiens
  misc_feature 700, 701, 702, 703, 704, 705, 706, 707, 708, 709, 710, 711,712, 713, 714, 715, 716, 717, 718, 719, 720, 721, 722, 723,724, 725, 726, 727, 728: n = A,T,C or G
acagcatggataatttagatgtgactctggacagagggatggatcagatgacttcttaagttatcttccagtttaggagttcgtaaactatactttctcctttccagactatcctagtaagaaaattctcttttaagacagagtagaactctggaattcatcagttttgatgtttcttaaagtgtaatctaagatagtgctcctgtattaagttctgatgtctgaccattgttcaaataaagagtaaaatgcaaatgacaggaaattggctgtgttctgaatcctatttttatttgggataacaataagcctgtatggtcactgtgacctttgatttgctgtttctgcaacctcacacttgcctcaggattcttcttccacttctgcactttatattgggtttcttccaggcatcatattaaactttaagccaggtatgtgtatatgcatgggctgtgggcctgaaaaaaattagcccgagagagaaaaaaatttaagtagtgggctagaagtaagcatgctactagaaacagaatttgggaacacagctctgggcctagaaaagcgacctgtcaacttgttacagttaacatcaataactataggatgggtttggtggaaaattatgctgaccaacagggtgggagagaatagggtcagaatatatatcgctgtaaggttgagaaaaaaagaagtaaannnnnnnnnnnnnnnnnnnnnnnnnnnnn

SEQ ID NO: 10459 - DNA, 929 bp, Homo sapiens
  misc_feature 1, 2, 3, 4, 5, 6, 7, 8, 9, 10, 11, 12, 13, 14, 15, 16, 17,18, 19, 20, 926, 927, 928, 929: n = A,T,C or G
nnnnnnnnnnnnnnnnnnnngataggctcagcagcatttattttctagttttaagaaaatttgattattcttgtatgaggtctaaagtgtgtatctatcagtccaatcaagcttttaaattttcggaaatactaaatttctaaatcataaagcgtcatttaaaaataattaattgtttcagtccaaaaatagcgtgggtcaaactggaattttcaaagtgacgtatctgtggatgatatgcttatggtaccaaaaagactctcaaaaaccaatactcccacgggcaagggaatagccaagtttgttgcggtttccaatgaatgacatcagccctgtgtaggtctcaatcaaaatgggttcagttaacaccatcagtttctttcctcttccagatccagttgaattcttgtgggcattctggatagctggaacaagcttagacatgaacccagacaacttgcaaatttcaaggaatttctcactggtgtatttcataggatgctcagtgaaagtagcataaggaacttcagtggaccatgggttccagcgggacagaagagactgctcctccggactcccccagtagatcctaaggccttctccttgtctcttgtccagggacatcccagggaaggtgaacttgcccaggcagatgcgatagacagcgctcagaggaatccgctgcagctgcacacaactcagcatgatgaagtcgtatttgcagatcaagagagtcttgtctgtgaccagtagaattctctccttctcattgttccagtggtctatctttgtcaagagccagaagccttgaatggtctctccagaagtctcagctacgtgacctttcaagtcttccatggcagtctcaatggcccccggccgtgtagcaaaggagcaattttttctttccgcacgaaccttctcannnn

SEQ ID NO: 10460 - DNA, 882 bp, Homo sapiens
  misc_feature 854, 855, 856, 857, 858, 859, 860, 861, 862, 863, 864, 865,866, 867, 868, 869, 870, 871, 872, 873, 874, 875, 876, 877,878, 879, 880, 881, 882: n = A,T,C or G
acgcgggacagttctctttcctccactagactgagctcttcagaggaagactcacttggctgaaaccatgattttactttaaacacattgaaaacctctactggagtgcattgtgtctggtgggcttcaaccttaattcttaagtatgtgaaaacacatcacctatctggaggtttacactttctgctaatgactttatttttaagcccaccaccctaacacaacaaatacttaaaacttgtcttcatttcctttaggtctggccctcatgcatgcatataatttatagagtcactgttttgctcggttgtcctcatgcctctatattattggaggtttagattgtttccatatactcaggttgtattcatgtcctttttttctttttaaatttccttagcatccatttccaccattggaaattcagggtcaaaacaggggtttgggattggagcatgtctatcacagataaccaatcatgtgttatgacttaagaatttatgaaagggccctctacctgaagatatcttgctactgatgctgtctcacagtgtctgaaactcccatcatatgtggaattgttttggaaggctttgcctcctgggacacattcagccataatcaagaaatagtattgagcattagactgtcagtatgtccattagcaagactgtggaggaatggaatcaccaatattatattttataggggatacagaatacaagagaagttctgaagagaaaattcttatgtagaataggaaggcttagatacagcatgaaagctgcaggctttgaggagccagaggtcaaatgaaagcattgagtatttgtttagatgaaagaacagaaaannnnnnnnnnnnnnnnnnnnnnnnnnnnn

SEQ ID NO: 10461 - DNA, 893 bp, Homo sapiens
  misc_feature 1, 2, 3, 4, 5, 6, 7, 8, 9, 10, 11, 12, 13, 14, 15, 16, 17,18, 19, 20, 21, 22, 23, 24, 25, 26: n = A,T,C or G
nnnnnnnnnnnnnnnnnnnnnnnnnngagatggagtcccattccgtcacccaggctggagtgcagtggtgtgattttggcctactgcaacctccgtctcctgagttcaagcaattctcctgcctcaggctcccaaatagctgggattacaggtgggcacaactacacccagctaatttttgtatccttagtagagacgaggttataccatgttggtcaggctggtctcaaactcctgatctcaggtgatccacccgcctcggcctcccaaaatgctgggattacaggtgtgagccaccatggccagccggttgtttacttttgataaaggatagccaatgtaggattaaagaggattccaatcgcagtccccaggttgggagtttatccatcaataaagcaaattacgataactcatagtgataaatattaaacccaagcaacaggaaaatattttattttccagtgtttcattgggcttctgaatcattctggacacatgtatatttccctgtctatattagtagtatgttattttctcactttaaaattatcccgttaatttttggatttatttgttattttggaatatttctaaaaattatactgcaacatttgttattaaaataaataaagactagttgacaattactactttatctcaaatttcttcttaatgtgttataaggaaacataaccagaatagtcagtccaagagtcctgcacatcaattgatttctatgtgccaatttcctcactgcacaatgaaaaccttgcctcaaacacgcctctgaatctatggtaagaaaaaacctttcacaaattcgtgtaaatctctggcatcataaaatgataaataacacatctcccgcgtacctcggccgccaccgcggt

SEQ ID NO: 10462 - DNA, 542 bp, Homo sapiens
  misc_feature 542: n = A,T,C or G
tagcttgcaggggtgctatgtgaagatggcggaattcccaacgtgcttctgcaaaattttatgtattcatccccctctgctctcagtagggtgttaccacctgcggatcctttgctttccccgctggatactaacagcctttttcataattgctagcacctatggaattgagtgttgaactgaacaaacaatagtctttctctgtaatgtcagagttattcataagacgaggcagtgttagacataagaaagagcactgggcaaagaatcagacaaccaggatttggttccattcttttattatcaaagaataaaaaaaaaacaatattattttaagatgcagtcccaagtcttataaggaatttgaaggcttctgggatctaatctaggtcatgcccattctgccttcccttgctgtgtgcccctgacacaagcatggaaacatgtattcacttacctttgcccttgggaacactttggtggggaaaaatgttgatataggttagcatttttataaactgtcaagttgtacctcggccgcn

SEQ ID NO: 10463 - DNA, 924 bp, Homo sapiens
  misc_feature 1, 2, 3, 4, 5, 6, 7, 8, 9, 922, 923, 924: n = A,T,C or G
nnnnnnnnnccccagggggcaatttaccccccctaaaagggaaaaaaaaggggggccgggccccccccccgggggggggggtttaaaaaagtttaaattaaattcccccggcccggggggtcccctagttttaaaagggcccgggggcttttttttttttttgttttgttttgcctttgttgactaagatctcagaagtatctgagaacttgggctgcgcagggaatgctggtgtgggagaagcaagccaactgagctgagctgcggccctgtttgtccttagctctccaaaacttgctgtctatgtcacttggaaggaatctgattcttttctgcaaggcactgacaataccttacaacagagctgggagataaaatgcagagcttgtgaaagtcatcagaaagttgaacacagatggtccccggcttaaaacggttcaacttgatgatttttcgacttgatgatggtgtgaacacgatacacattcagtagaaactgtatcgataagggctgctttattcaccagaagtgaaaaacacgatggttgtgtgagtatctgaagtacacaaccattctctttttcactttcagtacagtattccgtaagtcacatgagatattcaacacattataaaacagactttgtgtgagatgattctgcccaactgtgggctaatgtgagtgttctcagcacatctgaggtaggctgggctaagccagcatattcagtaggttaggtgtattaaatgtattttccactttcaatatttccaactgatgaggggtttatctggacacaagacacaacaccatccgaagcagaggagcatctgtacctggttcttgtatagaacacatggcacactcaactgtgtcttccacgtgacttcacatccatgatctgtcacctgctattagtcnnn

SEQ ID NO: 10464 - DNA, 607 bp, Homo sapiens
actgcactgtggttttgattttccctggtcattagtgatgtcgagcattttttcatatgtttgttggccatttgtgtatcttcttttgagaattgtctattcatatccttagctcacttttgatgaaattgtttttttctttctagtttgtttgagttcattgtagattttggatattagtcctgtcagatgcataggttgtgaagatttatatcaaaagtgtagagcctgagtttggtcatgaggaaatattagagagaccctggttagtgttagcctaaaaagtgaaatgcctaaatacttaggattgttaaggaaataataaaccaaaaaacattgaaaaacagagagcagctgcactagtgctgagaattgaatgaatatatcagagttcttttagtgccgtgagatgctaaccttttgacctaggcagagtagagatattccacagagctcattggacattcagtttagacctcagaaagggcatactgtaggagtaaggaccacattctaatgtaagaacttaaccctttgacagtggacaaaattgaaacagacctaatagagcaaatgataaaatcaaccgggtgaaagaaaattcagt

SEQ ID NO: 10465 - DNA, 1865 bp, Homo sapiens
actcactgcgtatttagaagttcttggggcactgtgtaagtgtaggagaagatagatggagtatctaattaatctaaagataaaaatgaatgaggtagaatccattcagtagactaataaatagttcttaagatctagtaggatttctcttttggagtgtggagacatagtgtggagacatttgctaatgtagccataaagatagacctattgtccattgcaatgaaagcaacaaatactataacataaaatatttccaaattggtttgggtgaaaataagcttgtttcccaataaatgtcagatggcacttgttgtaagaggtaactttgaagaaatttaaattaatatattatttccagccaaaaacgtcatgcatttttagaagttcacaaaagtctgtaaaatatgcacacaaatgtccatcaattgtaatttatttcaataaagaaaggtagcttataccacttgtggccatcagatttcctatagactatgcctcaagaaattatctaaatctaaggtgttagcaaaatagtgcttacatgtattttatagtatgaaattcaccttcaatatacatattcatataagttgtttagctggggcactgctttactgaaaaaaaaaatcttccacattctctatttagaaaaagtaaatatctaaagggaatgtctcagctgttaaatttctacagaggttaaaaagaaagaaagaaaaaaaaaagcagcctgtgatcacctggcaagaaactgcatggaaaactcactttgatgaaagtttatgaacccgaaacgctgcctttcttgcctgttttttcttaaacacatctcagggcataagaaaagagatgaggtttgttgtagttgatccaaggctctgatacgttatgaaacactatctttaatctgaacacattcaaatttgcatgtatagtgtaaaacagaggagaccatattgtagattaagagcgttcttacatttacatagaccatgatgtgatttccagaaagtgcactccaaaacttacatacggaatgcactacagaaatggcaaattcagcttctatcgcttctataagtccatcccttatgttgtcacataattgtatattctaagattggctcaaaataaatcaacctgttttgttaagggaagtgctgtagtataaagttggtttacaggggcctgtatcgatggagcaagactcaatcaggtaaatgaaagagtcccagactgaagaaggaccacttcacaaagagaaaggacctcttggggaaaagttctgaagtgaaaaagttgaagtcagcacagctatacaactattaggataaaaacatgacccgccaactgctactgtcaattagtattttgctttctcagagatctcaacctcattctatccggtggattttgctcagtgatgtgactaagcttgggcaaaccttcttgttactcttaaagcttttgaaccaaactgtgtgtgcaagatgcagtggctttacctttgaaataggacatacatttactgcatccagcatggtgcctgacttacagcaagggctcagtcttcaacagtcaataatactgatggtaatatttcaatattgtctttttttaacagtatgaatggtggaaaagagaggcacagagagagcttctagtgaatgtcaaacttctggaaatgcttttttgtcttatattccacttcggcaaaattttttaaaaagtttaccttgtcctattcttttaaattaactttttcctataatgcaatagttgatgttcacagttctacaacttcttaattttacaaattagtacctgcccgggcggccgctcggccaccgcggtggagctcc

SEQ ID NO: 10466 - DNA, 1228 bp, Homo sapiens
  misc_feature 1224, 1225, 1226, 1227, 1228: n = A,T,C or G
acgcgggaagcagtggtaacaacgcagagttcgcgggaagcagtggtaacaacgcagagttcgcgggaagcagtggtaacaacgcagagttcgcgggaagcagtggtaacaacgcagagttcgcgggaagcagtggtaacaacgcagagttcgcgggaagcagtggtacaacgcagagtactggggagatggtcaagtccattcaatttaagacacctatttatgatctccattgcaataaacggatccttgtcgtagtcttgcaggagaaaattgccgcctttgatagctgtacttagactcccggcgtatgactccgacagatgtatccatgtcaggcaaacatgaatcttattgctcttgggaggagctggcttggcttatgcagaaaacaagttgattcgatgtcatcagtcccgtggtggatgcctgtggcagacaacattcagtcttatactgccacagtcattagtgctgctaaaacattgaaaagtggcctgacaatggtaggggagtggtgactcagctgacaggcacactgccttcaggtgtgacagaagatgatgttgccatccacagtaattcacggcggagtcctttggtcccaggcatcatcacaagttattgacaccgaaaccgtatggagagggacaggtgcttgtgagtgaggattctgacagatgatggcattgtggccaattccctgccatgagaagccagatgtgctgcaatggcttttaatacaaggtggcactgcttctagctcacaacagacacccttggccatgactttcatgtcattccaaacttctgactcatccttggtcctcatcacaatgtgctgtccaccatctgtatactcttcaacagggcagacacctgaagccaagtacaggacatctgcattcagccatgcatgtcgctgggttgtggtacagtaactcctccgggggtactatcccaaggtattcccacaatgaacccctttatgggtggcacaagccctaggtgcttcagcacaccatatgttcagccacagcaggtagtgcaatcgcgcattgaggccgattccagcatacaggtgtggatggcaagcacgacttgcccagacatgcacgtcccaaccaagggagcatcgctgctacacagtgtaccggggttaacaaagcacaccccatctggatcagcctgtcctgggacatggtcagcggactcattaaaaannnnn

SEQ ID NO: 10467 - DNA, 1160 bp, Homo sapiens
  misc_feature 1158, 1159, 1160: n = A,T,C or G
accatgtagaagatgctgactcctggaccacatttaggttcatcttatttgcaagaatcaatattcttatagaaggaagaaatctgggcttgggcagtctcgggtgagtggcagccaagttgtgaatcacctgaagtcctaactccagacattcccttggcctttcactgcttatctccttgttccattgcacaaggattatataggagaaggaaatgaaagccttcgtcagttaacccaaatatctaaaaatgagtgactgatcactgaatattgttttgattttgtctgagtgtgaaggatagatgatatatatttaacagtgaatttgataaaaacagaatatgagcattacctccagttttagcccaaatctttaaagagcttagcatttccaattcccatccttacaataagaaatagttaaagaaacttaaaattgatggcttgtcttggacccgtcagagaactgatattacagggcaaactgtcaccttaaaatctagaaatacaagcaaattcagagttgcagagaactgcttacctggagtagaagcctctggggccataaactagtaggaaaacttaagaggtaattttgaaaacttctggatcctgaatgtgggaaatccttagagttggaaagtcctggggttcctgtcttagggaatgttacctcagagaacctcaccttgttcccatgatgaaaaaaaaaaaaaggattcctcctgtctctggcaagaacagaggaatagcaatcattgtaaaatatgtccagtgcattatctgtaacaaaggtctatcctccgggagaaagactttgccagagccttgtctaaacttggaaatgacattcttttcatgctagcaccttctagcagtcttgtcttacataaatggcacagaggagggaaagatatatcatgagtaaaagacttgtgtaggtctcagctcagagacacaggcccactagaagaatgagatttcatgtgagatgataatgcgcgtttccgaccccatacctgaccattattaggtcagggcttcagttaatacctgaaggggattacatctgaaattattcccacatgcagaatctgtctgaagaagacttagggaatcccagagtcaggtgaataaacaccaataagagtaccnnn

SEQ ID NO: 10468 - DNA, 308 bp, Homo sapiens
ccgggcaggtacgcgggaggcatgagccactgtgctcggccaagattctcttaaattcatcttttgctttttatttccgcttaccctgcttcagactaacttctcaccgtcaatcacagaattggttggatagtttgctttcttgctaattttgccttctttcacttgttctctataaattgtccagactatcagataaaatccaaatgtttcatcctttgcaactgctcatatactgtctaacttagtgaaacaaactgctttcattgttatttgttcttcagaatactacctcctaagtaaatggt

SEQ ID NO: 10469 - DNA, 218 bp, Homo sapiens
  misc_feature 1, 2, 19: n = A,T,C or G
nnataggggccgaattggnagctccaccgcggtggcggccgaggtaccgttcctccagtgcccagagatgctctccgcaccaagccacagatgtggaggaggcagatggcctgtgaaaactgaaggcaatttggaaggcatttttaaattccgtggagccactggagaaatgtttacaggaatgatgccttaaaattcctcagtggtaagatctgagt

SEQ ID NO: 10470 - DNA, 590 bp, Homo sapiens
  misc_feature 486, 585, 586, 587, 588, 589, 590: n = A,T,C or G
acgcgggagatatttgctgaactcataagtttatttgggtaacaagagtcaaaatgatattggttagcaaataaaaattcaggatacatattccaaaaatgctgtttatgtaattaatttggtgaagtctgtcaaaaaaaccagctagttgctggggccgcgttgactgctgtggtaaattaagtgatgccctagcaaactaaagacagtgtcatgccttccaaaaggcccagagagagcttcaggagagaataggtccatcctcatgtagccgggagaattgcagaatgaaattgctcccagtattactagtaaaccttcaaatttcatttactggggcagagatagttccggttttaaggaaataatagaaaatcatggtctgaaaattctcaaacctgaaaggtgatattccatttcaggcagaagaagaatttgctcctcaaaatagaaatgttgaaagagaaggaaagtgacgtttaaaanaagtagttgtgaaatagcagctgtttcttttagctctgatattcaataaaaataaaatttattttgcctttaattgtattttatttgcccatcatacannnnnn

SEQ ID NO: 10471 - DNA, 622 bp, Homo sapiens
  misc_feature 1, 2, 3, 4, 5, 613, 614, 615, 616, 617, 618, 619, 620, 621,622: n = A,T,C or G
nnnnncagcggcgggcgctcgtaccaaaagaatgttcatagcagcattatttgtcatagtcaagagctggaagcaacccagttgtgcatcaatggtagaatggatgactaaattgtagtgtattcttacaataaaatactatagagcaatgaaaataaataaactatggctatatgcaacaacatggataaatcttaccaacaatgttagacaaatgtagccaaaccaaaaaatacacatgttctatgaatccatatatgcaaggttcacaataggtgatagtagctactcttttgggaaggagtgaggaaaggactgagagagtattgcagagggggctccgggtgtttgtaatttctatttcccagtgcaggtgtggtttgcatgagcatgttcactttgtggaaattcattgagctgtaactaaatatacagaattatttatgaatgaaatgatatataattcagtgggaacctgggaggatagggaggaggtgggggagctgaagaaacatgtgtggccgaatgcttaacaattgttattgttaggttatggatacccggggggtggttgtactattctttcattttgagtctgtttgaaattttccannnnnnnnnn

SEQ ID NO: 10472 - DNA, 678 bp, Homo sapiens
  misc_feature 1: n = A,T,C or G
nactataggggcgaattgggagctccaccgcggtggccgagcggccgcccgggcaggtacctctcccctgacctcctttggctaaagtgcctttcagattttattactattgttaacatttccaacagccattttaacattatttttacaaatttgatgtgaatattccatattagaaatatgatttcagaagacaagaatttgttgtgaaaatgctaagactgaagctgacagaataacattcctgcttacaatgaacttttgcacgtatagtagaaaaccaggagcgtcctcaatgtgctccttcaccctattggctgcatctccatgagcccctgagaagggaaattaacactacctgcagaggagacaagaggcactgaggacccaggaggacccacaataagttgctaaaatgaaacatctgttacatttgtgtttaattagtaatatgtctttacacaccaatgggttttgctatattgcaacacaagttgtaaatgatcccagcattgtggtatacagacaaaatattatcaagtatttatgggacatggatggtctatgtcttgtcctatcataatttaaagacaaaaacacaaagcacaaattttctttttcggtctattgaagtaaaatcaaagagaatttttgaagggcaagatctcattgctgtgt

SEQ ID NO: 10473 - DNA, 726 bp, Homo sapiens
  misc_feature 1, 2, 3, 4: n = A,T,C or G
nnnncgcccgcgcacgcgggcaggtaccgttcctccagtgcccagagatgctctccgcaccaagccacagatgtggaggaggcaggtagggggtcaaagaggggtggtatcggttattcaggactttttttttttcttaaatatcctgtgcttctttcaatcatttgaaggtaaaaccaggtcctgtgagtggtaaactgatttttggttcttatgaaggtattattttctgtgtagatatttgttaacttggtgtccttgcagggtagacgatcagcgaagctttctgttccaccatcttgctcctctcattttagacctaatatattgactataagtgtttccctctggaagtattgactatatctgcatcaatactaagaaaataaaatataatcatagagactgaaacatattaatatatatataatgggtgttaaactaatggtaattgaaataaatgataagtcttaatgttagagggttagactgaccctaatttataatctgctatttggttcttgctgttgggtcattatttcatattaccatgtaggactaaaggtagaatagtatggttatgcaatgtcactatttcaagaagcttgaggcagttttagaataatataagcttcatcattataccttttacctgaaattggatagaaataatcttattttctttttgtagaaatgaggaaatgaaaacagaaattttctgtgagt

SEQ ID NO: 10474 - DNA, 1700 bp, Homo sapiens
  misc_feature 1679: n = A,T,C or G
acacactctggataattaacggcagaaagataaactgtatttctgcacatcttcactgcactgcgagccccaaccacagcacacacctgcaccctccctgccttctcacataaagcccagagggaacaccgggcaccttggtgtcttctcagatgcccctggagcgtttcacaccaatgcaataacagaagttttgattttccagataaacaaatggattgtttacagctacagaagcccccttcagagactgccaaatttctgtcctcatccaccaacctgcctagaagagagaagctagtgccctctgcaaaacctcccacactagggggctggtataagggatgaaaactagggggagtctctttaaggtgatctttctgccaaaatgactttacttttccctgaaccataatctactctagaaaagggccctggaggagcaggaaaagtcttggaggcagcaggaaaaagcttgagggatgctaaagaacctaacacatcatgaaagtcaagctctagaggaattgggagagagggagctatcctcaagccagaccttgagggggtaaaagcaccacctgctccccgaccagggtggaaagagtgaaatagctattattcctctcactcccttacccttgcagcttgccatgaagcatcagcagctcaaaaggaaaatgcaggtgaagacccagggttagccagacaggcaccaaagccaaggaagcagagatccagccttctgggtaagcctctttcccaatgcctggtatagaattctgatgcatgaaacaacaagatatctgggggccagtctgccctcacaggcacaagcacagggacacagctacacccatattcctagggagggcttggggtgcacacctgcttctacatacagggtttctgggccataggttttgcagctaatactggcctaccaaccttcccatgacagagaagttggttccttcagcaaaaccacttcaccttaggggtgcccatggtgcctaggaagcgggggagctctcctacaaaggaagtagtttttctgcttctatgacctcttcttttctgaatccaccctagaaaaaggcctagacggagcaaaaaaagctgtggggggactcggaaaactaggaaaagatgcagtcgaagatctagaaagcgtgggtaaaggtgagagccgtctatatgtccccactcctccctcaggaccagcctcagtctccaccccttgcatgagatctgaaactgccacagcccccccattgaagacccctcactttgtgctttcaaatgtctccaattcctcatccagatttaaattgccattcttgtctgatattgatacttcctggggtctaacttgctttttttttattgctcttgccccctgcccctgccaaggtggggaagagaggttggtctttggggctcctgtgaatctaacctccatccctctgacttctgtgtaagcacctccaggcctcccttccccttccccttcccctacctctccttccccaattccctggctctctttcccttccttttttcttcctacccctttaccccatttttttctgtggctgtcctcaggagccgtccatgacgttaaagacgtccttgactcagtacctgcccgggcggccgctcccaccgcggtggagctnccaattcgccctaatagtgag

SEQ ID NO: 10475 - DNA, 408 bp, Homo sapiens
attcggcgaactgcgcttcggtctcttgcgaaatggcatcgtagcgcacgcactggaaatacgtgccgtcggccggcagcaggctgaagcggctgcccgccaggccgtcgcggaacaggtcgcgcttgcgctggtaaaacgcgggccaagtccaggtagggctgcggcttggccatgtagccggcaatgccgtgctgcatcggcgtgttgacggtaaacacgttgtactggtgcaccttgcgaaattccgccgtcagggctgcgggcgccgctacatagccaaccttccagcccgtctttgcgcaatggtgagtagttgacccatggacgtatgctagaagccgcatggatgcaggctttcagatgtttgatcaatgtccatggaaagttcccgatttgacgctcttg

SEQ ID NO: 10476 - DNA, 683 bp, Homo sapiens
accacattttcttgattcctacaatctattcttcctacaacagcaacagtaattggtttgaaattatacataagacttcatcactattttgttcaaaattcttaggattcttcccaatacttttaggatagggctcaattgctttatcattgactgcaaggccctgtgtcctctgaacctgcatacctatccaagtttatctccaacactatcccactgtattaccctactctgtctacaaagtcttttctgttctttgaacaaacaaaatttattcttacctgagggtcttgcatccacactcagaccttacttggttttagttttcagaaaggccaccaaggaccatcctatttaaaacagtccccatggttagatcccacctccgtcaccttttcctagtgagttttcaccacagaacttatgattacctgactgcagaatagattcacgtgtttgcttgttaatggcctgcaacgtccactcacatgttattcccatgagtgcaacaggcttactttcctgtcccatttatggaacccaaaatagtgcctggtatctaatagtcactcaataagtatgttttgaataaatgagtagatgaatacataaataatgaaaaggaaccatgattggttgtagaaggataggtaggattttgccaagtgagaactaattattgt

SEQ ID NO: 10477 - DNA, 430 bp, Homo sapiens
ggccgcccgggcaggtacatgccaggcacaaactggagtcacagatgccacactgactatcacattgtcatcatactcagagagagaaaggtgtatacacccagtattttcttatgttttctctatacttccatatccccacccccattatcccccgagacattcccagttggaagtcagttgcttatgggaaactggctgcagggggatcagcccacctgtaacacacggaaaggcagagaaacaatgagtcatggatttgagtgcaaacaagcccagtcctgctacagagagttacggaaaaaatctcactgttgaagagagacatctataagagaggtgaggaaaatgactgatagatccttttacaatattctagggtagtctgtctgtgggagggggcaggagtctatgggaactctctgtacct

SEQ ID NO: 10478 - DNA, 757 bp, Homo sapiens
acgcgggggatttttagtaaagttttgccatgttggccaggctgatcttgaactcctgccctcaagtgatctgcccaccttgacctcccaaagtgctgggattacaggtgtgagctactgtgctcagctcagccatggaacaatcttgatgtataatttatctgcaggtatctccatctctatttgccactcttagtaaatgttttagtttgacagtaaacgagttgagacattaatgattgagagagcacctaagcagctcgaagtgctgggagtctctcctaaagaattagatgcacacagcatttttcccttacagacacttcactgagcagtcatgttggacttgggtggcgtctgctattagacacactattcaccaataaaaccctgaaaattgcattgcacaggactgataaaaataagatgacttaagaaacgtatttatggtatatatacacacgaaaaagaatgaaagtttgagggggtactgcctctgggaggaagagttatgagtagtttgtatttccttttttgttaatctgtatttcattttttaggcaatgcaaatatattatttagacaacaaaatacttattagaaagaaaacacatggtgggttttttcccctttattctttgcttttctaagaggaaactttgactgcaattgcttgtgagtgatacctgtgttctggtagcttaggaagacacaatgtggttagggaaggataagaacagatggctttaataaatgt

SEQ ID NO: 10479 - DNA, 1079 bp, Homo sapiens
  misc_feature 1, 2, 3, 4, 5, 6, 7, 8, 9, 10, 11, 12, 13, 14, 15, 16, 17: n = A,T,C or G
nnnnnnnnnnnnnnnnnaagatacagggtcttgctctcttgcccagcctggactgcagtgacaggtcactgtagcctcaaactcccgggttcaagtgatcctcttacttcagtttcccaagtagctgatattacaggtatgcaccaccatgcccagttaatttttaaatttttctattgctgtctgtattttcatatcaagataaagcacaagtttagatttaccttttttttttaaaaaataatcttttactgggaggtggcaagagacccatttcttcagaattcctgtatggctcatattctgtgtcagggattgtgggaaagacaattccagggatagatgagccccgcactcatctcttcaacttacactctccatgccacatcttcaaacaggaagtagaaaccagaaataatcccaaccagaagtgtgcacagctcaggatcacagttgcttgcaagaaacagaagtgacacgtttgagtattctctctttcaaaaatggtgcaatgcaatttcatcaaggcattcatttcactacaccaaagcaacaagtacctcgattaaatttaatgagaggtaacccatgcaccggcaggaagttcaaggggacagaaggggcttgctccactctggagccctatctcctctcacctccttccttctagtttgacatgcgatcttgtctctctcttttataaagtgcttccaggcccttttgattaggatgctgtcctaaatccttcctaaagagaggttttggagccaccaacactgcttcactgtggaataaactttccttattaagattcttcattcactcataatcatctcctttttcctcactgctcattcatttatggagatagcacccatatcatagctacttggtcaaatcatggtgatactccccacttaggagaggaagatgactaggttatagctcttgcctttaggaaattaaaaaccctgtggtgtaatctacattacacagtggaatatggcatatatcatgaaaaaatcctatgcagtttctgagaggacttcttaaagatgaaaaagtgaggaatcccgcgt

SEQ ID NO: 10480 - DNA, 1704 bp, Homo sapiens
  misc_feature 1, 2, 3, 4, 1703, 1704: n = A,T,C or G
nnnnagtcgaccacgcgtccggggaatgctgtggaaataattatgtgcaacattaggccttgcccagttcatggagcatggagcgcttggcagccttggggaacatgcagcgaaagttgtgggaaaggtactcagacaagagcaagactttgtaataacccaccaccagcgtttggtgggtcctactgtgatggagcagaaacacagatgcaagtttgcaatgaaagaaattgtccaattcatggcaagtgggcgacttgggccagttggagtgcctgttctgtgtcatgtggaggaggtaccagacagagaacaaggggctgctccgaccctgtgccccagtatggaggaaggaaatgcgaagggagtgatgtccagagtgatttttgcaacagtgacccttgcccaacccatggtaactggagtccttggagtggctggggaacatgcagccggacgtgtaacggagggcagatgcggcggtaccgcacatgtgataaccctcctccctccaatgggggaagagcttgtgggggaccagactcccagatccagaggtgcaacactgacatgtgtcctgtggatggaagttggggaagctggcatagttggagccagtgctctgcctcctgtggaggaggtgcctgtcccggagacactactcaggtgaccaggtgcaatgtacaagcatgtcccaggtgggccccagcgagccagaggaaagtgttatgggaaatattaatgatgttgaatttggaattgctttccttaatgccacaataactgatagccctaactctgatactagagtaatacgtgccaaaattaccaatgtacctcgtagtcttggttcagcaatgagaaagatagtttctattctaaatcccatttattggacaacagcaaaggaaataggagaagcagtcaatggctttaccctcaccaatgcagtcttcaaaagagaaactcaagtggaatttgcaactggagaaatcttgcagatgagtcatattgcccggggcttggattccgatggttctttgctgctagatatcgttgtgagtggctatgtcctacagcttcagtcacctgctgaagtcactgtaaaggattacacagaggactacattcaaacaggtcccgggcagctgtacgcctactcaacccggctgttcaccattgatggcatcagcatcccatacacatggaaccacaccgttttctatgatcaggcacagggaagaatgcctttcttggttgaaacacttcatgcatcctctgtggaatctgactataaccagatagaagagacactgggttttaaaattcatgcttcaatatccaaaggagatcgcagtaatcagtgcccctccgggtttaccttagactcagttggacctttttgtgctgatgaggatgaatgtgcagcagggaatccctgctcccatagctgccacaatgccatggggacttactactgctcctgccctaaaggcctcaccatagctgcagatggaagaacttgtcaagatattgatgagtgtgctttgggtaggcatacctgccacgctggtcaggactgtgacaatacgattggatcttatcgctgtgtggtccgttgtggaagtggctttcgaagaacctctgatgggctgagttgtcaagatattaatgaatgtcaagaatccagcccctgtcaccann

SEQ ID NO: 10481 - DNA, 829 bp, Homo sapiens
ggcatctctaaacacttacttaccatttttgaaattaagcttagaatttcttcattacataataataaacataccttaatcattttaaacccaatataatgcattaaagtatttctgataattgaatacatttttgagggttaattcatataaccaaaaaatgttatgactctgtgagacattcctccagttattcaaaggcttaaaagttttaagaagtatacaatggctgaatcatgagaaataaccctgagaaactattgaagaaatgctaatgaaacacgagaggggagatcaaatagatgctgaaaccacaatgaacatctaggcctataaggactgagagaggacactgataaaagagaaactggaaatgaatgggagtgaaactgcgtagaggtgatcaagtaaaagtaccaggttcaaatagtcagcagctcatcataatcaatgagcgaggacataaagtaggaaaaatgcatcaccatggtgagcaaggaaagcaagttattggaggcacatgttaacacataaaatataaaattaatatgatcacactggaaaggcttgcctgagcccacagtttgaatgcctacaataagatgagatgcacaacaaaaagcaagagaacctgatcaagtgggtgacctggccatggtgctctcatcagtggggacccaaatgcttatgtggactcaccaggtatcgaattagacatgaataggagtgtttgttgtgatggcaagaaactatataatcaaatgaatacaatgaaactttaaaaataattgtaagatctttacaccagccaatgtcatgttgcgtacct

SEQ ID NO: 10482 - DNA, 412 bp, Homo sapiens
  misc_feature 408, 409, 410, 411, 412: n = A,T,C or G
actgtttctttaaaaagatttgtatcttgctaggtaattaaacaatgtttacaattaatatatttatatttaaatagagacagggtcttgctgtatagcccaggcattcttgaactcctggcctcaagcaatcttcttgccttggccttctcaaagtgcctaggattacaggtgtgagccagtgtgcccggcccaattaataccatctaagtcattgtctaaggaacttttcgtttctgtttgttgtggggccagactttgggaagaaagtatgtttgataagaatttatcagataacccttttttttttttgtaatatctctttgggatagcattgtcttcctctgctttgggaagtcttttggttactcattactcaaaatttgccaaatttaaggtgggggtgannnnn

SEQ ID NO: 10483 - DNA, 244 bp, Homo sapiens
aggtacttcatactactttaagttacctcctattgggggcattataaatgggtaagcagagaacatcatggaaagacatggagcttagtatatgcaaatgttgagttactcagtgtaatgtgtgaaaaaggagtttcataagtttcggtcagggaagaaggcagggtcaaaatttctgcttgagagtttgggagcttggggagactttaaacagggagcaacacagcgcctctgtacctgcccg

SEQ ID NO: 10484 - DNA, 424 bp, Homo sapiens
  misc_feature 424: n = A,T,C or G
acagttttgagcacctgccttgtgcctcaatgaatacttgttgggtgatgaatgatataaaattcatcttgacattcagcttaggtttggaagacagtgtatgatttctttaccatggccttgactcatcttctgaatggtcaggctaagtgctgcctccttctctgtgtagcctattcaggcacctgctcacctaccacaacctgccaggcccctccagctctggaagcatgctatgtgagaaataatcctaatatccaagtcacagacagtgggtgggcttggaagtgcagggcctgtgatccctttgtggagtagctgaatttagaagtgacagcaattgtgttctataatgagaatggtcctgatcatcatgagaataatagctgccttttattgagaaactgtcaggtacctgcccggn

SEQ ID NO: 10485 - DNA, 882 bp, Homo sapiens
  misc_feature 1, 2, 3, 7, 10, 878, 879, 880, 881, 882: n = A,T,C or G
nnncgtncgnccacgcgtacgcgcgcgacccgtctgggccctgcgccgccgacgcgccaccctacctcgcgctgtcagccccgccgggctcagccgacgccgcagcatcttctgcccctgcgcccgcgccagcctcgaggaagtccccgccgaggacctgggcccccaggagcgcagggggaaagaccagagactcccctaaaccacccagatgcgcaggattgaagcggtctagccaaagctttctgtggattaaaaaaatacacgattttttttttttttggcagaagaaaaggagaggaagaccagcggcgctttgcaaggaaacggggggatgtaactcgtggatacatttttccacccatcaaacatcttgttatactttgtaaacattttctttttttaaaccccagttccagccggacgcccccagacctctgaggttcgaggaggtggtggttttcatttggggctttgcatatttggttgttaggttttgcgagagccttcttattttgccagacgtctcatgcggggtgaagtccactcggccccctcccctgagtcttcgtgtgcgcggaattcgaggagatccggttactaaggatatagaggaaaaaaataaatcgcttgcttttttttttttaattgcctgcttctccccacccccaaattaagttgcttagcaagggggaaagaggctttttccttcttccaacagcccaggcgaacgcctttcgttgtttgcccgcggaccttgcatgtaggaagccgtggctggcgagcccgacattcgggagccactgcgggggggcctatttttagcgaggctcctacgggggcagactcggccgtccccagtgacgcggcgggcgggnnnnn

SEQ ID NO: 10486 - DNA, 329 bp, Homo sapiens
  misc_feature 324, 325, 326, 327, 328, 329: n = A,T,C or G
acgcgggatcaacatcttgttatactttgtaaacattttctttttttaaaccccagttccagccggacgcccccagacctctgaggttcgaggaggtggtggttttcatttggggctttgcatatttggttgttaggttttgcgagagcccttctttaatttgccagacttctcatgcggggtgaagtccactcggccccctcccctgagtcttcgtgtgcgcggaattcgaggagatccggttactaaggatatagaggaaaaaaaaaataataatatttaaaaattaaaggtacctgcccgggcggccgctcgactgcccgnnnnnn

SEQ ID NO: 10487 - DNA, 1822 bp, Homo sapiens
  misc_feature 1, 2, 3, 4, 1820, 1821, 1822: n = A,T,C or G
nnnnactctagctaggctaaaatttgctaaatgccttggtttcttttaaaagttcatgtaatatttctgatttttcagaatatttgcaataagagtctggattttaaaaaacacatgcatacacacaattaagagctcatgtcttagcaagatctgggaaaccaacattgcgagagtagctattttgaaagaataattctccagaagttaacatctaatatctagtatcaccaaacagtatcgctgttctcttttattcatttgaaatgaatataattatataactaacaattgtccaaatagatgagagagcaaatcatgtgagaaaattcagaataccatctgtttcatagccgcacagattttggactttcacaaacattgggaactaaatttagaattggcaaaagtctagaagatgggtatcaaaacagaagacattccaggagctagcaattttaagaggtgtccctccaaagtgacctgatggaagtcctgaacttggaaattaggttctactcacttggacatccctgcatcatggactgttgctgctccctgttccatatgctcgcaatctcagctatttggaagctaccaggaatgctttctaattatcatttgcaactagaactgtaatcagaaagaaattttgtatttttgtataacttgattgtgtgccattttatataacaggtcctgttttacaaataaattttgttttactaacattgtgtttagaaattataatctatgtgtaaccatgtcatttgagttgcaaattaattgccaggctgttttccttaagtaaattcatgtgccgtgtagaaatatgcagatatgcattacacaggcacacacagagagatatttaatatgtggaatatcactctttcatgagctttattccttgattaatttgataaagcctcacagaggattttaagcaatatttaaatgtgttgaggttatgtttggatattcctgctgcctcttttcattcatttcaagtcattcttcagctagctatgggctgccttattgctattcgctcactgcttccatcttctgcccaagtgagaagaatagatgaagaacagaaatttctctgtgaaatgtggatacccgaataatttcataaatcattgattctatgtggtggtttttgtcttcttctgtggtgaatcttcaaaactgtattcaggactcatatttctagagttttaattggggtcctctattgtcaattgtagtagtgaccagagtatcgtggtttttgccatcagataattaaggctctggtgcataatttagactttctaagctcctgcctgaagaataaggtcttccataatatggaagagaaaagttatatttcagtgtaaatccaagagacccatcttctatgagaggcttaccagtgcattagtaataaaacattagcaatttagctagagcactgagattgtataatccttgcatggatgagcagagctcaaagccagttgttcctttaaagcatttaatgcaatggctaatgtttaggattacagtttttattttatccttatcagataacttaagttcctaaggtcactaacaactttaagtagcttaactgtcttgttggtaccccaacttttttatacatgggtacgggcgagggactactgagttattaaaagtatgctgaaatgttgctttggaagagcctcccccgcccccttcccccatcaccccagggaaacggcggagagcatttacaacggtgggtgacaagggcaatccgggaaagtgcccagggttaaccctcccagtannn

SEQ ID NO: 10488 - DNA, 646 bp, Homo sapiens
acagtagaatccagtcgttggtttggaggcgagggctctctgcggtcctctcctactgtcaggagcttcccgtgctcatttttcatttactgatgcactaaaggagagtttgactttgagtcagctcagcattctaaatcaaacgcaaacagcagaatcatatggcatagacacttagcaaatccaatgccttccaggcatctgtttcctgttgatgaaatcctccctatggagagcaaactggttcatatcttcagatagtgtcattcaaccccttggcagctttctgggctactaaatatcacaccgtctggtgggacatttcacccaagtaggcaaatgcatgacagaactcactggatcaatatctcaaaatgctgggaagaaaaaaacggtaaccagaaattctacacagagtgaaactacaaaacaaaaatcaaagcaaagcaacaatttctggatatgcataaaagatgaaattatatgttgctagaagatccatagcacaagaaatgctgatatccctcaggctgagggctattaaacaagatggaaatccagaattatagaaaggaacaaaaagaacaaaaatgagaagcatacaggtcaatacaaagactgtatattctccttctctttcccgcgt

SEQ ID NO: 10489 - DNA, 539 bp, Homo sapiens
acagtggcgccatctctgcttactgcaagctcctttctcccaggttcatgccattctcctgcctcagcctcccaagtaactgggactacagccgccagccaccatgcctggctaattttttgtatctttggtagggacggggtttctccatgttagccaggatggtctagagctcccaacttcaggtgagccaccatgcctggcaggactttttttgatgtaagcagagccccttttgccagcttccttgggcttattcccccatagatggcagctgggatcccagcctcttgccggttgatattgtcattcttggagggggcccaggttgggctaatgctcgtgtgactagagcttgctggtgttgagggtggttcatctgaagttcatgaccactaggcttgatctaaaaaaagggacggagcttagcccctccaccggggagttattgattcttaaccagggacccaatatacccttcaggctagtcaactgcctgctctgccgctaaagttctccttctgtccagatactaaagt

SEQ ID NO: 10490 - DNA, 1440 bp, Homo sapiens
  misc_feature 1440: n = A,T,C or G
gctttgctccaggcctcaggagtgtaagtttaagggcgcgaacctgggtgggacggggcagtttttccagcgggccatacgggaaaatttttggttcgaggaagacaaccaccctttttaaggagaaaactgcatcttgccctgcgttattcctacgcggtgcccaggtggggtgtgtgtggaccagtcaatgaccgcccaagctctccgagtagaaaacccaaacatggttttgtggggtgtgtgcctttgaccccggacttaagcaaaaagcgtggtcttgggcgtagctacgaggtggttggtgggctccagggcctgcgtgcccctcgacgtgagcgatgattggcggtgcaggataacagatcgccctcttggccactcagtggcaggggacttgctacttccgggtcggcggcgtctggcgtggagagtttggggatctacagcagccaaaggcttgtccctgactttatatggctgcgcctggcgagcgactgagtcgtccgtgaggaaactgggaagaggttgaaccttcgcctcaaacgatgttgcgcagacgcagtgggccattctagtgccttctagaaaagggtgcaggttcgcagccctgtcaaccagctccgagccggcagcgaaacctgaagtggaccctgtggaaaatgaagctgtcgccccagaattcaccaaccggaacccccggaacctggagcttttatctgtagccaggaaagagcggggctggcggacggtgtttccctcccgtgagttctggcacaggttgcgagttataaggactcagcatcatgtagaagcacttgtggagcatcagaatggcaaggttgtggtttcggcctccactcgtgagtgggctattaaaaagcacctttatagtaccagaaatgtggtggcttgtgagagtataggacgagtgctggcacagagatgcttagaggcgggaatcaacttcatggtctaccaaccaaaccccgtgggaggcagcctcagactcgatgaaacgactacaaagtgccatgacagaaggtggtgtggttctacgggaacctcagagaatctatgaataaatggaagcattaattgttttgaacatgtaaatataaatctgtcagccactacagccatcagaagagagcatctggaagcaacaggcagcctcggcaagttttacacgcaataatgttgccaggggaatattattgtaagtcaaggtcatcctcctcccctttctgtttttcaatcacgaattacgtactgccctctctgggattcagaggctccagaaaggcggcatcattctattaacttcaccggcagcccaacgtgctctccactcacccaatacaggcttttgacctaagaaaaaaagggccgctcaagttcccaggccatacgccccccatgttacggcccaacctatan

SEQ ID NO: 10491 - DNA, 289 bp, Homo sapiens
  misc_feature 1, 2, 3, 289: n = A,T,C or G
nnntacagctggacagggatataaatcagtgaactctgagaacacttttaatccaagcaccaaataaggcagcatttcctgtgactgctggacgccacggtttaagtgagatgccaaacattcctcatttgggaaaatgcgcaatagtccacagagagaacaaaatcaaaatgtgaaaagttgaataaaaaacactcctttggaaataaaatattactcagcataagttagctgacctcatctttgggactagaaaaataacagtaaatagtaataatagctcccgcgn

SEQ ID NO: 10492 - DNA, 298 bp, Homo sapiens
  misc_feature 298: n = A,T,C or G
acttacaggggaccgccggggcctcgagaatcggtatcctgagtcctcttgaagagcagtagaggttgtttcattaagtgcaaacacattgttcttaatttgaaaactgtgggcagaaacagaagcccgagactaatttttccattgctaactctagattctcggccactggagtctgaagatactttttttgagaatgcatattattttggttccaaggttaaaccatttaagattaaaagttgaccagtgaagtaaaattaaaaggtttcttttttgaatcatcagctagagatgn

SEQ ID NO: 10493 - DNA, 328 bp, Homo sapiens
aggtacataatatggttctcattctatttgccttttttccccgggtactctgcgttgttaccactgcttcccgggactctgcgttgttaccactgcttcccgggactctgcgttgttaccactgcttcccgggactctgcgttgttaccactgcttcccgggactctgcgttgttaccactgcttcccgggactctgcgttgttaccactgcttcccgggactctgcgttgttaccactgcttcccgggactctgcgttgttaccactgcttcccgggactctgcgttgttaccactgcttcccgggactctgcgttgtacctgcccg

SEQ ID NO: 10494 - DNA, 219 bp, Homo sapiens
aggtactcaccactgttccccagcctgccagataaaaataaactgtccactccaggaggggagaggcacaagctgctctgatagaaaccgttcctgagcattatcttgactgtttgcagaggagacatgtgttcccagccagcacagagctgcaggattgccttttgcgatttgtgagaattatgtcatagtgaaatatagttgagaatgctgggcagt

SEQ ID NO: 10495 - DNA, 758 bp, Homo sapiens
  misc_feature 745, 752, 753, 754, 755, 756, 757, 758: n = A,T,C or G
acagttatggctgagtgtttcaattaaaaaatacattgcatgacaattttctgtttcacaaagagaaacagcatttttgaaaaattgaattctcctgtgtaacctggtagagttttctattcctgaatatacatcctttcatagatattactagcaggctaaacatctggcatttaaatgtcattactataaataaaccacaaaattggctgcctgatttgaagggtcaatcttatggagtaactgaagaagaatcatttttaaaggagatgagcagttttggatttatgataccaataatttctctctttaaggaactccaactcacttaatttaatgttaagaataaaatcagactaattagttctcaggacaggtcaatggcacaccattttccttttcactttggcagaaacctaggagtcacttttgaccctcttcatgtcccatcaatcaccaagttttgtgtcttcttcagaatgactcaattcagttctaccagcctacttcaggccatactcatctcatgcttcaattactgtaataattttaatgtgaattagagacaaattcatgataaaattagagacaaatgtcctgatatatcttgaaaattattgcaaagaccatgaaactttgtaaatttaatctatttttaaaccaatcttttcttttttcctctttcagttaatcttctgaagtgtctataatgactttgtattgtgcatgaattaagattaaactncttaaannnnnnn

SEQ ID NO: 10496 - DNA, 667 bp, Homo sapiens
  misc_feature 609, 620, 666, 667: n = A,T,C or G
acgcgggtgagattctgctgggtgaagcctaagggcatagatgaaaagttaggatttggaagggagccagaagccaaaagcagttcccagaggccaggcaaaaacagaagctgagtgtgggactgaagccaaaaagcggaagatgatgaattccacagcgaaccgtgggagccgtcctggaacaatgcctgagatgcgcgctggctttctgggagcagttagggcccctttaggtatgtgaacccgcctcactaaatggccatgagcagaactgaactgcctacctgtttctccacctgtgcaagacacagtttctcagagcacagacgaagctccttgaatatacgtgcattgctggcccttgcctaagcctacagttaggacttggcctggtaaattgaagttcatgaaataatgagaccttttataaaaggcagtggcataaattcaaaatataccccgaaccatggcccgtggaagaaatgtttcccagagtagcatattggtgtaattacacataagactgattcagcattataattacaaaactgttttcataggattcagtgttaattcaggctctcaatatgttgccaaagtctgcaattnttgtttgtgtnttgtggagttcctcggccgctctggttcttgtgggtcccccgggcnn

SEQ ID NO: 10497 - DNA, 646 bp, Homo sapiens
acaaggatgaaatgagtgattctgtccttaacaaactcctagtctcgtggggtggacagctgggaactcatttagagagattacaaggatgaatacccttgggctcgatagaggtagaagcaaagtgcttagtgttagagagcgtttcttgaggagggaaaatcagaatcagtctgggttttaggaagataattctggaggttgagtgaaagatgaatggagaggtgatagactagcttgggcattatggagatggaaggagaacggaaggggcagataggacaactaattggaggcggagtgagaggaaggggccatagatgacttcatgatttctgtcctggttgcaataaaggatcatgatcgtaaagatcattcccatttgacaaagggaagaggaaaattgcagtaggataatgagtgatgctttttattttggtcctgttccctgggatgttggcagcctaaccatataaggatttccagttggcagttagaaattattgtctggagcctcagagacaggtcatcacgatcttacctgctgatacttaagcctctaggagtatgagattgattaggctgaggttgaacactggtgggtttggctgaattcatctttcacgtgtttttcctttgacatgta

SEQ ID NO: 10498 - DNA, 278 bp, Homo sapiens
gggcggtatcgagagtgtgcagcgtcagacgggacatggggtaccttgctaagttggtaagtcacccggccattatatcggccatatcgcgcacgcaacagacgtcagcgtcgtccttttgtgctcgttcgtctgtgattgtgcgatccttgattccggcaggctcttagctggccagctggcgcaatttctggtcgcgccggtaggcccctggttgctcgcccgtgacccgcttgaaggcgcgtgtaaaggcggcgtgcgagcggtaacccaccagt

SEQ ID NO: 10499 - DNA, 1182 bp, Homo sapiens
  misc_feature 1, 2, 3, 4, 1182: n = A,T,C or G
nnnngagctcactgcaacagtaccagattttcaccgctatgcctcctttcactctgggagtctcccagaggtcttgcactcgggagagcatgctcaggtttccccagctctacaaaatcacccagaatgccaaagacttcaacacaagggtaaataaggttgatctcagaattgtcacctcaaaaaggccctgccttccactgttcagttctggtcatctgcctatgagatatctgaagcttgaaagagaacacttgaaaatcactgagaccgtgactcccatcccagcacacacagcaagccaagtaggttacagagatttcttcttgggtgatgagttcacgccacatggggtatgttctccagttccagtgtgttgactccttcctgcttccccccatcagcccctgaggtcaatgtgggcagcagcccccatggtccaagttcaagatccgctgtggaagacttttttaggcaatcacacagccctgcatggagtcctgatgagagcttgcctaattgttgctaggtttgtcattttaaatacagtgtttctttagctagtgagtaaaattggctatataggaactcagggatcacgagtcactttttttttttttaatgaaacagagaatcagcaaagagaccacaaaagatataggtaattctcagaaacccatgcagatgctgagttgggtgttaaagttgtcacacagtttcaaactgcagaggggtctgtcacatagatgcctttcacagctggaagtggcagagcagttgggtgaccctacccaaaggaaagatagatgtgttcctggccagtgcaggggtgagatgtgagcacagctgcatggccatgctgctgtcttgggtctttgtcggaggggattcagaagtttagacagaggtcattgcccagatcagttccagtgctacatgatgctggtggtcatgacttgcaagggtggttcctgggccatcagtgagaataacacagggagttccctctctaggtctcagtgagagaacagtctctgaggccctggcttctgagccggatattcctgatgggtacccttcacagctgctttcttctgggaaggctccctagttatattcaaggctgggaacaaagagaagagattcttactgtttctgttgtctcccatatctaaagatacn

SEQ ID NO: 10500 - DNA, 676 bp, Homo sapiens
ctccccgcggtggcgagcggccgcccgggcaggtacgagtaaactacttgaaggcaattcctgtgcttaaaatggccacgtgaaaggtgtccctgacatggaaaggacaaaccatgaaatgacccttgaagctcttaaggtgtctgtcaaaaaaacaaagccaactgtcaaactgaaaagccaaaatcatcacaaaaacacctattcttcagaggcctcaaatctcaaactatctcccaccatcctttgtaagtatgtataaggaggccaggaaactagcatttgctgagactttattctcagctttgtatgctttgcataaatgatgtcatagaacacattgacagtgagaaaactaacgtattaacattttaattaccttgccctatcacaagattagaaagattcagatatgagacatccaaagtctgtgatctgaacaccagagtcagaggctggcaacctatggcccacgggctgaatctggcccactgcctgttcctataaataaagttttattggaacacatccgtccatttatatattatctgtggctgctttcctgctgtaacaggagagttgagaagttgcaacagagaccataaagcccacaaagctaaaaatattgactatccagccctttagagaaaaaggccatgcccaggctcctgtgggt

SEQ ID NO: 10501 - DNA, 511 bp, Homo sapiens
  misc_feature 1, 2, 3, 4, 5, 6, 7, 8, 9, 10, 11, 12, 13, 14, 488, 489,490, 491, 492, 493, 494, 495, 496, 497, 498, 499, 500, 501,502, 503, 504, 505, 506, 507, 508, 509, 510, 511: n = A,T,C or G
nnnnnnnnnnnnnncctattactaggattgcaggcatgagccaccatgcccagactaattcctgttttcaattttaggtagtcatttgattattgagttgtagaaatcttacttttggattaatatattaaaaactatcaccagttagccatgtgttaactgcttagtttttcaaccaaacttcaatcatcagccagccctcactttcagcccagatcgacggactcaacgcttggtgatcggttaactccttgttttttagctaatgctttaattagcaattaccatctttgtcttcagctaaacatcatacttctcaatgctttggttatcagctaatgtcttctttttcagctaacaccttagtggacattaatacccttgttaacgtatgttacttcaaccagattagacctggctgcattgggaaaggaaagtggggggcttgacaaggaacgtgaagacattaaaggcaaaacctctgagcnnnnnnnnnnnnnnnnnnnnnnnn

SEQ ID NO: 10502 - DNA, 438 bp, Homo sapiens
agagcggccgaggtacttacagtttgactttgagtcagctcagcattctaaatcaaacgcaaacagcagaatcatatggcatagacacttagcaaatagtttgactttgagtcagctcagcattctaaatcaaacgcaaacagcagaatcatatggcatagacacttagcaaataggcaagcgtctctgcatcccagagcaaatcctctgagatcctcagtctctcctgctgaaactccatcttccactcctgcctttgggtcatttccaaacggcagggcaccagacacgctctaccttatgtggagccatactgttcatttattagttttctggcttcgtggagaattatctgccttctctgagtattgatttcattgtgcccgcatggtgaagatatcgcctgttctacaagggagtaagattgagtccccgcgt

SEQ ID NO: 10503 - DNA, 344 bp, Homo sapiens
ggagctccccgcggtggcggccgaggtacagtcttgaacaaatccaccttctgtggaccaagcaccaccctgggcatttctagcatgagcaaaatccaaggtcctggctggactccagagatgctatttacctcagaagcatgacaataggaggcagaaggagcaggcaaatccaagtcctttcttgtagtttccttgtttggggaggaaaagttgagttttactattatggaaaagaaacaggaaatagagacagacaaagagatatgacaatacagtcctgccacccagatactcatttccacctaccattccatgcatttgttttgaatatataagtatgt

SEQ ID NO: 10504 - DNA, 177 bp, Homo sapiens
accgttcctccagtgcccagagatgctctccgcaccaagccacagatgtggaggaggcaggtctggacttcaggcagacaaggaacttcagaaaatcctggggagagacagcacagggtaagaggtaggtcagagaaatctgaggctcctttttcaacttagcacgtacctgcccgg

SEQ ID NO: 10505 - DNA, 553 bp, Homo sapiens
acgcgggtattctgaaaaaatctatctctagaatgaagtcatgacagttcaccctactctactagttttgtccaagctaattttcatgtatgattttgtaatctgattgaacaatacttgaaaaaaaaaaagttagatatataaatgaatttgttgtggataaaacataattagcctatccctataaaatctactctttcctgacttccaggagtggtcctttatttgagaggcaaaacatatacatttcacattaccatttttgagacttgatgaagcccagtcctaaactgtggctgaggctaaggctgaatggttgggatttactgtgagaatggacattctcccgggtcctcacctgaggtcattaaattgatttagtctaggtccactggttgtattttaatgcagcttagctgtaaaaatacaaggccccattgtataatacaggcagtcattgttatttttttaggcctgtcaatgtaaaaaatgtgtctgtttgccttcccctatgccctaaaaaaaaaaaaaaaaaaaaaaaaaaaaaaaaagt

SEQ ID NO: 10506 - DNA, 631 bp, Homo sapiens
acagcaccttgtgtcctgccaccagccggctgtcgggcaggtacgcgggggttagatggaaggaagaacttgtgtgcttagacctgacgctgggaggagatgctgccacctaggttacttgtaggaccctatacggcaacctcctttgccaggaactatttataaacatcctgcaggaaaatgcagtgaagtagaagagacagggatatcccagaaggttatgcaaaacatcaagagaagatgagaggtcagagatgggaagaaacaagaactttgacatgcttggtgttcttgcccaagctttgaagaagtttacaaagtctatatgtcagaatacacatttcccaccttgcccaacagtagaaaaacataagaagagaaaaacattaaaaaatgacaaggaagttaatggaagtcagcaatgtgatggtgtttggaggtggagccttcagaaggtaattaatgcccttgtaagaagaggccagagagcttgcgcaccttcttcctgccatgtgaggagccaagaagccggctgtctgcaacctgcaagaggaccctcactagaagctagccatactggcatcctcatcttggctttccaacttccagaactgtgagaagtatatgtttg

SEQ ID NO: 10507 - DNA, 708 bp, Homo sapiens
  misc_feature 1, 2, 3, 4: n = A,T,C or G
nnnncgaattggagctcatctcgcggtggcggccgaggtaccaaaggtcttcaagggtaagatgctgctccatttaaataaaagatgaaggatgtcgaaacacaagcagcctttaaccagtaggcccataaataagacagtagctagtgctatgcaattctaacactggcacttgtgctgggattggcctcttctaggctaggaattcttaacctggaggtcaaggacttggggggagggtcctatggaccccttgcaatgtaggcaaattttgcataaacatttttctgcacacgtttcaaaggaacttggaatatccgtaagttgagacctccaaattactagagctaattgccccattttattcctttgtatcatctcaaatgccaatataatatctagtgtataataaatgtttgctggctgcttaggagagaactagatgtgttaatgacgccatctcacagtgaaaaggggcagatttctcaaagcaagtctccgtgatataatcagaattttacttgcctaagaaagtccaggtctggttcttcagccttgctccttcgcgaaatgatcctgtgtgggttagttctcctctctgggttgctgtttcctcatctcccagttgggtgtatctccctgcggcttaggtgagcgccgaggctttggctcctccccagctgctgcgagcttcccactgccccgcgt

SEQ ID NO: 10508 - DNA, 1158 bp, Homo sapiens
  misc_feature 1064, 1137, 1155, 1156, 1157, 1158: n = A,T,C or G
tcacacagtaatttacaacagaagaagaaaaacttagttttaacacagtatccagtagactggtaaaagtgtagtgatgccctactcatgatgtgaatacactgtgagcaagaagcatacccacacaggtgtaacaacgctttaaaaatgtatgtaagtcttggagattagctaactgttaagaagatgacagtgtcttcaaaacagtatcagataattccacataaattcttgatttagtgggtacaattttaagtttcagattttttagttacctgtaatcatattggcagtgagttccagaaattttcctttttatgctaattagataaatgtctttgggtgaagtactgaatcaagtatttaaaatgagatgggaaaatgctaccttttaaagacaagaagtaaattctttagccaactacctcttaagcaaagttgtgtcattttgaacacctgaatgtgttagagttgaatgaatttgacttagaactgcagataaagtgccagaaatgaaattaaaacatctgaacctaacgttaaaacaaaataaatgtggctgctttgagacattgaatggatagctgataaatatccatggataaatggtaaagtttttaatatttaaaaatatgtaccattgactacttcatactgctacaaaatgcatttgaaattttttttctggccaaggaacctattcatccactctctccaaattaaatacttactagagaaatgttggcacttattaaccttgtaatatgaattagaaacaaacttgaccttcatatattcttttacacttatgaatctatttaactgcatgatttatctgcatgattcagaattttcttgataccatgtaactgaagtaagatttagaaatatattttcttgataccctgtaactgaagtaagatttagaaagctgaggtgacagttgtcacccataatgctgataaatataggaatgagtcgattataaatttaaaccttttgtggcattatgctaccaaaatatctcttttttaaaaaaaatttgtgggtgctgcatagagctntattaaaattacggctcagctgttcaaatacttgatgagaagacagaaaccagcagaggacatgcagggagtntgagcaagagctgctgannnn

SEQ ID NO: 10509 - DNA, 182 bp, Homo sapiens
ccgggcaggtacttatttctttgcaagatagttttgtaaagcgtccataagcagagactgtgtcaaggcgtcctacgcaaattacaggaccttgcacagacagttgcatagagctgcataggggaaaggcgggcaaaaggtctgacctaagtcttcaaacacaggccttcatacaccgtgcc

SEQ ID NO: 10510 - DNA, 3977 bp, Homo sapiens
  misc_feature 1, 3964, 3974, 3975, 3976, 3977: n = A,T,C or G
nccgctccgggtacctgagggacgcgcggccgcccgcggcaggcggtgcagcccccccccaccccttggagccaggcgccggggtctgaggatagcatttctcaagacctgacttatggagcacttgtaacctgagatatttcagttgaaggaagaaatagctcttctcctaagatggaatctgtggtttgggaatgtggttgatcaacttgatatgttggccaaatgtgccccatgtaataaaatgaaaagaagagacaagatgatgtcattttcccatattgtgaaaccaaaaacaaacgccttttgtgagaccaagctaacaaacctctgacggtgcgaagagtatttaactgtttgaagaatttaacagtaagatacagaagaagtaccttcgagctgagacctgcaggtgtataaatatctaaaatacatattgaataggcctgatcatctgaatctccttcagacccaggaaggatggctatgacttggattgtcttctctctttggcccttgactgtgttcatggggcatataggtgggcacagtttgttttcttgtgaacctattaccttgaggatgtgccaagatttgccttataatactaccttcatgcctaatcttctgaatcattatgaccaacagacagcagctttggcaatggagccattccaccctatggtgaatctggattgttctcgggatttccggccttttctttgtgcactctacgctcctatttgtatggaatatggacgtgtcacacttccctgtcgtaggctgtgtcagcgggcttacagtgagtgttcgaagctcatggagatgtttggtgttccttggcctgaagatatggaatgcagtaggttcccagattgtgatgagccatatcctcgacttgtggatctgaatttggctggagaaccaactgaaggagccccagtggcagtgcagagagactatggtttttggtgtccccgagagttaaaaattgatcctgatctgggttattcttttctgcatgtgcgtgattgttcacctccttgtccaaatatgtacttcagaagagaagaactgtcatttgctcgctatttcataggattgatttcaatcatttgcctctcggccacattgtttacttttttaacttttttgattgatgtcacaagattccgttatcctgaaaggcctattatattttatgcagtctgctacatgatggtatccttaattttcttcattggatttttgcttgaagatcgagtagcctgcaatgcatccatccctgcacaatataaggcttccacagtgacacaaggatctcataataaagcctgtaccatgctttttatgatactctatttttttactatggctggcagtgtatggtgggtaattcttaccatcacatggtttttagcagctgtgccaaagtggggtagtgaagctattgagaagaaagcattgctgtttcacgccagtgcatggggcatccccggaactctaaccatcatccttttagcgatgaataaaattgaaggtgacaatattagtggcgtgtgttttgttggcctctacgatgttgatgcattgagatattttgttcttgctcccctctgcctgtatgtggtagttggggtttctctcctcttagctggcattatatccctaaacagagttcgaattgagattccattagaaaaggagaaccaagataaattagtgaagtttatgatccggatcggtgttttcagcattctttatctcgtaccactcttggttgtaattggatgctacttttatgagcaagcttaccggggcatctgggaaacaacgtggatacaagaacgctgcagagaatatcacattccatgtccatatcaggttactcaaatgagtcgtccagacttgattctctttctgatgaaatacctgatggctctcatagttggcattccctctgtattttgggttggaagcaaaaagacatgctttgaatgggccagtttttttcatggtcgtaggaaaaaagagatagtgaatgagagccgacaggtactccaggaacctgattttgctcagtctctcctgagggatccaaatactcctatcataagaaagtcaaggggaacttccactcaaggaacatccacccatgcttcttcaactcagctggctatggtggatgatcaaagaagcaaagcaggaagcatccacagcaaagtgagcagctaccacggcagcctccacagatcacgtgatggcaggtacacgccctgcagttacagaggaatggaggagagactacctcatggcagcatgtcacgactaacagatcactccaggcatagtagttctcatcggctcaatgaacagtcacgacatagcagcatcagagatctcagtaataatcccatgactcatatcacacatggcaccagcatgaatcgggttattgaagaagatggaaccagtgcttaatttgtcttgtctaaggtggaaatcttgtgctgtttaaaaagcagattttattctttgccttttgcatgactgatagctgtactcacagttaacatgctttcagtcaagtacagattgtgtccactggaaaggtaaatgattgcttttttatattgcatcaaacttggaacatcaaggcatccaaaacactaagaattctatcatcacaaaaataattcgtctttctaggttatgaagagataattatttgtctggtaagcatttttataaacccactcattttatatttagaaaaatcctaaatgtgtggtgactgctttgtagtgaactttcatatactataaactagttgtgagataacattctggtagctcagttaataaaacaatttcagaattaaagaaattttctatgcaaggtttacttctcagatgaacagtaggactttgtagttttatttccactaagtgaaaaaagaactgtgtttttaaactgtaggagaatttaataaatcagcaagggtattttagctaatagaataaaagtgcaacagaagaatttgattagtctatgaaaggttctcttaaaattctatcgaaataatcttcatgcagagatattcagggtttggattagcagtggaataaagagatgggcattgtttcccctataattgtgctgtttttataacttttgtaaatattactttttctggctgtgtttttataacttatccatatgcatgatggaaaaattttaatttgtagccatcttttcccatgtaatagtattgattcatagagaacttaatgttcaaaatttgctttgtggaggcatgtaataagataaacatcatacattataaggtaaccacaattacaaaatggcaaaacattttctctgtattcattgttgtatttttctacagtgagatgtgatcttgccaaagccaccagaccttggcttccaggccctcctgtagtgagttgattgtctgcacttgccttgcccaatagccagtaggctacagcttttgccccacacccttattttcagattctggatcattcttgtttacaactgaaatatatataacctcagtccaaagtggtgattgatttgagtatttgaaaattgttgtagctaaatgaagcatgattagtcttagtatgaatatcatttaatctttaaaaaatcaagtaaaaatgtttatctgataatgtttaaataatttacaatataaactgtaaaacttattaggcatgaaatcaatcagaagagaaagaaaaatgctggaacatgcttgatgtattatgtaaaaagcatatttaaacaagggtcctcaaccctgactgcagataagaatcacttgggttacttcagatgcctaacaccttcctctcatacaaataagaattggtagctttcttaaaaaaaaaaaaagtacctgcccgggcggccgatctagaactaggggatcccncgggctgcannnn

SEQ ID NO: 10511 - DNA, 820 bp, Homo sapiens
actgtgtctcatagacatgcgccacctccacgtgagaacaagggtgaaggtgagggaagcccctcaccttgggtcttttgctgtgcctcctatgtatgtctggtttgcctcttttcttcctggccaagccctctgaattcatctgttaatatcaaattgtatttttgccacatttctgtattggtgaaaagcgaatctgcagaataactgccaacgtttttcattcttgttttacaaacctggcttgaaattcctgctgttagaataactctggtagttagttagaccatcaaggaggcagcactgtttccagaaacccactgttaaattgtcaacaactgagttgtgggaagtgggacaggagcagggttggtgggagaatgcagtggtgaggatgggaggagacccctttttctttcttccattgacataaatgggcattccagatgacctggtctccacagcttggaagggctgctgcagatgtcaaggataacagcctcctagggttgctgtgagaaataaatgacaatccacagaaagcgcctgcaacggcgcctggctggcaaacagcggacttgttaattacagcctttcaattaagggcgcctgaaactcgcaaacattttgctcgggtgtggattcgctcccgttagttacaaacttgggatcccgggacccggaaagcaagggggaaaaataaatcgcgatggggccaagggacagctgctgcggcaacttttacccagcggagcccacctacagcctcagcctcccggtctcaggtctccgccgtttcttctcaaggagtcccccgcgt

SEQ ID NO: 10512 - DNA, 365 bp, Homo sapiens
  misc_feature 363, 364, 365: n = A,T,C or G
acatttcgacatacgccagcatgtgatggccgaaggtgatcggctgggccacctgcatgtgggtaaagcccggcatgatggtgtcggcatgctgttcggccaggtccgtcagcgcgctgcggaacgtcgccagcagggcggtgatgtcgtcgatggcggaacgcacgtacaggcggatgtcggtggccacctggtcgttgcgcgaacggccggtgtgcaatcgcttgcccgcatcgcctaccagttcggtcaggcgtttttcgatattcaggtggacatcttccagatccagcagccattcgaactggccggcggcgatttcctgcgagatttgcgccatgccgcgcacgatttccgcgtagnnn

SEQ ID NO: 10513 - DNA, 297 bp, Homo sapiens
ccgggcaggtactcacagatctgtttccagaaaccactacaagtgtcatgaaccttgggttgctctctgattgaattctgggatccaagctgggtaaggagagagatgagtccaggctgctacagaagattattttccataatttcaatatgagcagttttaaaacacagaggatttatagtcatgttagctaggccagccttaacacttcctctacctcatttcttagaaaccaacaagggcctttccagagagggccaaggacggtggcatccagaagggatgaaaacactgagt

SEQ ID NO: 10514 - DNA, 173 bp, Homo sapiens
ggcgaatgagctccccgcggtggcggccgaatcactgggtgtcccagtgcccgctgtgagctacgctacccgcctaggagagtctgagaggccagtctctcttggcagtgaggccgtctgtccggaaatagaggcgcacattgggagggaaatgctctctgtgtacctgcccg

SEQ ID NO: 10515 - DNA, 486 bp, Homo sapiens
  misc_feature 1: n = A,T,C or G
nccaatattaaaacatactatgaagcctctgatacttaaacagcatggcgctggtacctgcccgggcggccgaggtacttccgtgagatataaggctgatgataaggattggggtaaagagttgattcggtcacacttgactgccttgaaatctgtcttggcatcgggtcctcttcctccatcgataggtggtcagtctcagagggttggtcatctccctcttgcttcagagacacagcctggaatccttcaaaactcccaattgttgacatttcttcagcctgactaggctggtcctcaaggctcttctttctctttctgcacaaagggggctagaccacagatagtggccaggagaggtgtgactggctcagataaagccaggcaagacagtgccctgtgctgtgaccccactcagtctgaatctcacttcaccaagtaggctgagagttacactgccaccctcaaatagtcaaaaaaaaaagt

SEQ ID NO: 10516 - DNA, 1276 bp, Homo sapiens
tttttttttttttttggaagtgaggtattccagtcctcaactattattgttgaattgtctatctttcccttcaattttgtcagttgttgctttacatattttgggattttgttattaggtacatacatacttgttattcttgttacatcttccttattgaataaattgtcatcacttaaaatgtccctcttcatctctaataagtttttgtcttacagactattttatctagtattagtatagctgccccaactctgtatgattgctgttttcatggtatatctttttctatccttttacttttcttttaaaataattttaaaaattaatttacatacactaaaatgcagagattttaagtgctcagttcaatgactgttgacaattatacacagctatatatccacccccaaacaagatataaaccatatataatatttcatacagttttctcatgcccctttccagtcaatccccatctccttcctgtaacaggcaagtgctttctgatcataatgatctttttaaaatcatagtatattcatttgtctgttctaggttttatggtaatgaaaccaaacaggaggtattcttttgtgtctggctgctttctttccatattatgtttttaagattcatttatattgttgcatttactttttattgctgagtaatagcaaatgaatataacctagtgcagtccaaggtcagccctcttcagaaggactctgcaaaggttcactccactttccagatgataaaattgagaaaccttcaggagcattaattcttttgttactgcctctgaattaacatgtgagagaagctctcagagcttggaggaggatgactacatgatgagtttggagccaaaccctctgctccttacctcacgtatcttcctagtcatatacctaatatctggtttagtgtaaaaaatgaagaattaagaggcagaaaatacactaccctgttctacttccatcactagttcaacatatgtcatccactttctggatttttttctcctttgagtaatgaagagcttgatttggtcatccctaggatgcctttcatctctgatatactatttagttgttggtcaatgacatctaagtatgaattcgtttatgaaacacaaaagcaattttaactatgcttctctgcaatggtaaccattctcccaagagaaaggcaacaaaaagtgaagtgattcaggaatcctaattttgcccaccccacagttacacacagcacttggcctcacttattaagg

SEQ ID NO: 10517 - DNA, 451 bp, Homo sapiens
  misc_feature 447, 448, 449, 450, 451: n = A,T,C or G
gcaagatggaatttcatcattccatcggttttgcccagactggtggcaaactcctgggctcaggatatccgccagcctcagcctcccaaagtgctgggaatacaggtatgagccactgcactcgaccatttatgcatttcttcatattcttttaactgacaaccgtaaattaacctctgtgtttctgtcaatcactggattttaagtcactaagtagcagaactatatctaatttattaacattcatcatccccctttgccagcattgaacatgatgttttgcatatagtaggcattaaatttgctaaatggaactaaataatgtttgataaataacatcatggcacatgaccatattaggcctaactaattatttattcttccatttagtgagtgcaaaactttagtcaaaaacattaaacatactattttctaattaccttattnnnnn

SEQ ID NO: 10518 - DNA, 424 bp, Homo sapiens
  misc_feature 1, 2, 3, 4, 423, 424: n = A,T,C or G
nnnntccaccgcggtggcggccgacgtacgcggggggacaggccatctcgctataggaaaggaaagtggaacagcattcatcctcaacatttttacgaagacaaaatgaagactggagtagaagactgatcagtgcaggtgtagcataaaagtgtaatcctggaagatgtggtgtgagaaggtagcacaagtgaagcagagatacaggagatagggaagggaagctggaagcagaggtcactggagggagagggagatggacacattcagggctacaaagcaagttctatgtgatttgctcacctctcaattgtgggacccctcaaaatgtgtacctgactctcccagtgacatgcttcttgaccacaatggatgaactgtgcccagcatgcccactttccaatgctccactgatccccatgnn

SEQ ID NO: 10519 - DNA, 419 bp, Homo sapiens
  misc_feature 1, 2, 3: n = A,T,C or G
nnncgaataggaacctccaccgcggtggcggccgctttcttgcagggttttatcggcgcgcaggtgaaggcggaccgcaaccgcctggcgctggccatgatcttgtgctggctgctggccgacgactggttcatcggccagcgcttgccgcagcaggatctgctgcaggtgctgggcgaggcggcgcgcgaactggccgccagtacgccggcccaccagttcacgcaagacccggagcggcgcgaggaactggcgcgcatcgtgctggcgcgcctgggctttcggcccagcgacgaaagcgtagcgcaggccacggacagattgtctgccatcagcggcacggagcgccgccgcctgctcgaagcgagccgcctggccgaacagcgcgcgcgggaaatccgcgaggcgctggcgaaaaa

SEQ ID NO: 10520 - DNA, 455 bp, Homo sapiens
acagtagaatccagtcgttggtttggaggcgagggctctctgcggtcctctcctactgtcaggagcttcccgtgctcatttttcatttactgatgcactaaaggagagtttgactttgagtcagctcagcattctaaatcaaacgcaaacagcagaatcatatggcatagacacttagcaaatccaatgccttccaggcatctgtttcctgttgatgaaatcctccctatggagagcaaactggttcatatcttcagatagtgtcattcaaccccttggcagctttctgggctactaaatatcacaccgtctggtgggacatttcacccaagttgttcatttattagttttctggcttcgtggagaattatctgccttctctgagtattgatttcattgtgcgcatggtgaagatatcgcctgttctacaagggagtaagattgagtccccgcgt

SEQ ID NO: 10521 - DNA, 470 bp, Homo sapiens
  misc_feature 1, 2, 470: n = A,T,C or G
nnacatgtagatccaaacacatgtaaacatttagtggaatttccaatcagtatataatgattcattaatttaaaaaaaaatggttcctggacaagtgattgataacatggagaatgaaaaaggttagatttatactttacaaaccatacacataaataaatttcagaaaggttgaaaatctaaatatttagaatgaaatgatcaaagaactagaagataatttagatgaatattactgtaatcttaggtttagagcttttaaaacatgataaggaagaaaccataaaggaaaatagagatttgaatatatgaaaattttacacttctataaatgaaaaataagccatgaaaaaacataagaagttacaataactattgccacataaatcactctcttaagattgattttcatatataaaaagcagtaaaagcaaaatcccaataggaaatagcctaagtgcataattacn

SEQ ID NO: 10522 - DNA, 703 bp, Homo sapiens
  misc_feature 701, 702, 703: n = A,T,C or G
acaataggaataatgtaaatatttttatatttaattttttttaattacagaggttattgagtttgtgtttttcagctgcagagagagaaatttgtggggataaagtcacaagaataccagttggcagaaattgaattaccttcctttgtataagtaatatccagtctagtcttaaatgctataggatgagataagagaaggatagctcacattccaaaataaaagcaaaaatataaaatattgagaattgaatttgacaacatgcgaacaaaactgaaaatagaaaaatataaacctttattagaggacataaaagaagcctggaataagtggagagacaggtcagttttctagaaagacatgatattgttaagctgctgattatgttcaaattcatacatttaatttcagtcaaaattctatttttcctttgtttgaatctgaaaggctgatactgtaggccatttaaaagaataatatatgggctgggcactatggctcacacctgtaatcccagcactttgggaggccagggagggcagatcatggggtcaagagattgagaccatcctggccaacatagtgaaaccccgtctctactaagaatacaaaaattagctgggtgcagtggcaggtgcctaaggtcccagctgctcaagaggctgaggcaggagaatagcttgaacctgggaggcggaggnnn

SEQ ID NO: 10523 - DNA, 2015 bp, Homo sapiens
  misc_feature 1, 2, 3, 4, 5, 6, 7, 8, 2015: n = A,T,C or G
nnnnnnnnctcctggagaaatacaaaaaatcagctgggactacaggcgcccgccaccaagcacagctaagttttttatttatagtagagacggggtttcactgtgttagtcaggatggtctcgatctcctgacctcgtgatctgcctgcctcggcctcccaaagtgccgggattacaggcgtgagccaccgcgccgggcctgatttcagtttcttccagcccttcctattgttaacatgggggttgtgttgaagaatataaagttacaaagtcaaggaagtaggaaacatttttacaagtattatgtagccatcttggtggggctgtggtgaggtaggctgcaaatgattctcctatttctttccctgagttcagaacataggaattagattgatagacatcaacatacccgctttattgctgactcatgacaactaatgggaagacatggctcagatgtgcagccacagtgagcttctgaacatttcttctcagactaagctcttacacacagttgcagttgaaagaaagaattgcttgacatggccacaggagcaggcagcttcctgcagacatgacagtcaacgcaaactcatgtcactgtgggcagacacatgtttgcaaagagactcagagccaaacaagcacactcaatgtgctttgcccaaatttacccattaggtaaatcttccctcctcccaagaagaaagtggagagagcatgagtcctcacatggaaacttgaagtcagggaaatgaaggctcaccaattatttgtgcatgggtttaagttttccttgaaattaagttcaggtttgtctttgtgtgtaccaattaatgacaagaggttagatagaagtatgctagatggcaaagagaaatatgttttgtgtcttcaattttgctaaaaataacccagaacatggataattcatttattaattgattttggtaagccaagtcctatttggagaaaattaatagtttttctaaaaaagaattttctcaatatcacctggcttgataacatttttctccttcgagttcctttttctggagtttaacaaacttgttctttacaaatagattatattgactacctctcactgatgttatgatattagtttctattgcttactttgtatttctaattttaggattcacaatttagctggagaactattttttaacctgttgcacctaaacatgattgagctagaagacagttttaccatatgcatgcattttctctgagttatattttaaaatctatacatttctcctaaatatggaggaaatcactggcatcaaatgccagtctcagacggaagacctaaagcccatttctggcctggagctacttggctttgtgacctatggtgaggcataagtgctctgagtttgtgttgcctcttttgtaaaatgagggtttgacttaatcagtgattttcatagcttaaaatttttttgaagaacagaactttttttaaaaacagttagatgcaaccatattatataaaacagaacagatacaagtagagctaacttgctaaagaaaggatggaggctctgaagctgtgacttcattatcccttaatactgctatgtcctctgtagtaccttagatttctatgggacatcgtttaaaaactattgtttatgcgagagccttgctaatttcctaaaaattgtggatacattttttctcccatgtataattttctcaccttctatttaaaaaaaaaaaaaaaaaaggtttgcggccacatattttaccctataaggagctaacataacttttgatttagtgttattcataaaattaggttagcagtttattaaccttttgtatttgctctggcaatgtttaatatctcataagctatacacacctcgaagccatcaatgacaaccttttcttgctgaatagaacagtgattgatgtcatgaagacaattttatctccttttgccttccataatttgtacctgcccggggcggccgctctagaactan

SEQ ID NO: 10524 - DNA, 493 bp, Homo sapiens
  misc_feature 465, 466, 467, 468, 469, 470, 471, 472, 473, 474, 475, 476,477, 478, 479, 480, 481, 482, 483, 484, 485, 486, 487, 488,489, 490, 491, 492, 493: n = A,T,C or G
acattcgatttattatatgttaactacttctcaataaatctgttaaaaaattaaacacattaaaccacccctcaagagaatccctaaaataaaaatttaaagagggggaaaaaaggaagggaagctactgaaagttgtaagaagagacaaaaagttaccaataatgaagccagtgtttcaaggagtgtgcagttaaaataacatgacacacagatatcaaaactggcaactgagagaagtccaaggtccttggcaaagagaaagccactgaccatccgtggaagtgtagtagggtgacagccagaatgtcagaggctgaagggaagctatgtgaaacagagaggatggcagtgagcttagaccacttgtttaagaagctcagaaatgaaaatgagagaagtaagacagtagctagaggggacagacaagtaaactaaagctttttggtgaagtttgaaagcatannnnnnnnnnnnnnnnnnnnnnnnnnnnn

SEQ ID NO: 10525 - DNA, 202 bp, Homo sapiens
  misc_feature 202: n = A,T,C or G
acgcggggagacctgacgcggggggagatgctgccacctaggttacttgtaggaccctatacggcaacctcctttgccaggaactatttataaacatcctgcaggaaaatgcagtgaagttgaagagacagggatattcccagaaggtttatgcaaaaccatcaagagaaagatgagaaggagtcctatattgtcagaatan

SEQ ID NO: 10526 - DNA, 1098 bp, Homo sapiens
  misc_feature 1097, 1098: n = A,T,C or G
acgtataacaacatgaattcatctcaaagacattatgttgaagccagatttgacataactcattctttgtcattccatttatgtgaactttgggaatagtcaaaacttagctatggtgacagcagtcagggcagtaattatctatcgagtgtggagattgactgaaaagggcacaggagaactttctgaaataataaaaatgtcctatatcttgttttgcatcgtagttacacaggtgtagacagttgctaaaacgctaaaaactaaatgtgtaagatttatgcattttagtgtatttaaattataacccccagaaagcattgcctcattttttctggagggtaaatatgctcgttaggagcataaggggatgattttgagaaacccttgctctgtcattctgtcagtaaaccgccactaacttttctggtttcaaaaaagcaaggtccattgatgaaactcctttgtgccttagtgacaaataacattgataaggcctactgtcaacaagagtgtgtttgttatatcttttgtttttagtgactaaatttgtaggaatgatattttcatgggattactcaatctcacccaccattagttgcaggtgacaagaaagctaagttggcagatgtttgtgctagaagctgtgggtttacgtctcctttgtgcatgtgttccagacataccagtggcttggtatttaaacatcatgctcaggtgtgcagggtagtttttgagttataataggtatgcaggcgctgtgggattacttggttgtttatgtaaaaattattttgcactcacttctgaaatgagtgttagtagaatcatctttagaggaggttccaaggcattgaactgagatacctgcactgtttgctgtaaatttaagcttaaaattgaaaccaggttatcagcatttcatgccaggagagagtgggcatgaatgatttcaggaaatgaagagctagatttcagccttgaatttgcttccacccttctgtggcaaattagtgtgggctcactgagcactttatctgcccgtggtaatttattttaccagacagggtgtcactttgtcatccaggctggagtann

SEQ ID NO: 10527 - DNA, 818 bp, Homo sapiens
  misc_feature 1, 2, 25, 809, 810, 811, 812, 813, 814, 815, 816, 817, 818: n = A,T,C or G
nnactcactattagggcgaattggnagctccaccgcggtggccggccgcccgggcaggtacctcctccctatgcatctgctgtgggaagtgtgggtaactcacagatgatgccacagggcatgtattcaggcaccacaggcagcagtgaatgaatgaagtgaaatggtatttatccatttcctggaaaggtccagggtttggctctgcagggccaagagaacagctttagctgtgccttaacccagtcctggagaagccagcaggccgtaatcacggggaggaaacccatcttttaagggctcctcgctcaggtggtgacaaggtgaggtggtcatctatgctgtctttatcagtatctgtcctaaatactgtgctctgacattgatgctaatattccatattatcagggcttctgtggtgtttaggcctctaatttttctcttcagtaaggggaataactttgctgtgtcagcgcagtgcctcaggagggttgcaatctagaaacagtgattgttaaaattgcctataaacacacaatataaacaatatgccacagacacagaggcccccagcatagtttctggaaggtgaagtctcacctctgccagagtagagtcacagtgggaattgaggcttggcatctgggtgcctctgaagctcttcctgtggctcctgttagacaattgaccccgaaacacagaagatagagattgcacattgcgttcagtaattgttgtttatttatgttatttctgaaaataaaagacagcacaggctgcttatctttaaaccacacaaaaaaaaaaannnnnnnnnn

SEQ ID NO: 10528 - DNA, 822 bp, Homo sapiens
  misc_feature 822: n = A,T,C or G
actgggattacaggaatgagccactgtgcctggcctgattgcggattttattggaataacctataaatattgaacaatgcacctgcgaaagagtatgtcttaatcttctcttggaatactgtcaacaaagatctctgagtttgaagggtagaagtaactcactacttggctgctgactgtgaaatttagtcatgtttttattgtgggagtggactgattaaacagacaagtgttataaggttcaaattacaacatttctcctaatatgcagtgcttttaactatgataaacactgcaccccccttcacaaaaaaaaagaacccacccaccaatttttaactttcttctacaaacacctcttatctcttctctatcaaagcatgactggcctttttgaaatattcaggacaaaaagttaggaagagggcaggctcgctagttcaatgtcactacatataggggaaatggaacacttcccatagaaagctctgatttctctcagcgtgagtctctgtctgaggcatccccctctctctctgctaaccagacaccatacacagcatgttctttccaatctgagtcctcaaagggcatcctgaaagtgtccaggttattaatgacatacccaaaagcctcataaaaactgcacagttatctgcttaaggctttactggcaatcaaaaattcatctttttttgttttaactagagttttatgaactcactgaattccaaaataaacaaacatgtaaattattacctaataaatctgaagtttctctggtagataaaaaccattttaacaagaagtcaattcccgcgn

SEQ ID NO: 10529 - DNA, 850 bp, Homo sapiens
  misc_feature 1: n = A,T,C or G
naagctccaccgcggtggctcgcccgggcaggtacgcggggtggggggaaaatgtgtatgtgagaatgataaaatacattgtatgcatatatgcactgggtcactgaaatatgtatttcctactgtggatcatggccaacagagtttgaaaacctccattctttgaggtagaaaagctgactggagtatctacctggtggttggagctgccaagggcacccaacctggtcaacaaattagtgtgctcagccagaggcagtcctggatgaattcaggctgcaaagtgccctgtgacctggcccttgggaagccacgctctgatgaggtttgcagatctccccgcaatccagggccaagcatgaatgaaggtgttaggcatttcaaggatgcgactaggacgtgctgctgtctcaggttcacattatactgaaataaggtcctggccagacagcaccatatagttaattgaggtgtttgggagatactcaaatgggtgttaatatttcccaggcaatattttcaaggctcagagcctctattcaaaagataactgaaaggctagcaaagggtattgcaaaggtatattctgatttctgacaggaagatcgatggatggacagtgagagtataaagaccttagggtttggggttctgatttggccttggtctgttgaatgattgattcattcattcaacaaatatttatacaacacccacagggggcaggcattgtgctgactgtggaagatcacagagagtgtgtcagagtgaaattgactttggaactgtctttggtgagtccacaccttatttatccacttctgctttctccagagctgcctagcctggt

SEQ ID NO: 10530 - DNA, 856 bp, Homo sapiens
acagctaactgtgctaggcagggcagccctgtgagttctactgctgtcttggttttacagagggggaagtgaggcacagagaagttaattaacctctgaagtgttgcagtctaaggcacagaggcacagttccaggcaaggttcatctgaatcttaagtcctcactctttgccaccatcctccactgctgagaccatccctgtgagtcctgccgctctcctcccctggtccatattcactgctactcaatgaggccaaggaagccaatggtcgtgtccccaagaggatatctctcccctcctgagaatctttctcatacatctcaattctgagatacagattgagaagcacctcagcaaatccactgcatggaaggcaaaacaaccttgatccacagcaatgaccacaagcaagggaagcctggctatgagcacagtcataatgtcgttcaagtttggagattcaaagcatagcatgtctacctgaacatcctcagatcctgctgacatcaccagtggaggtcctctgctgattgatataaatcattttcaaatccagcaatgcattgatgactgttaattccatgctcctcaaacttgcccagaaatgcctctaataggtaagggaaagagaagatacctcagtatgtatcctatggcaatgcatctcaaaaatgatacttatttaaagactctgtttttaggtaaaaagaaattattcaaatgtattctgaaaatgttattggttttaatataaaatgatatgttctccaaatctttaagtgggattgaagatccaggaagatgtatcttgatattcttgatcatttggtttaatgcagctacgcacaggcagt

SEQ ID NO: 10531 - DNA, 329 bp, Homo sapiens
acacaattgtgctgatttttctctcatttaaaacggttccacaagtagttagtccagggctggtgtcatggctccatggtcactggggcattgtgttcctccacgatttctgcttcaccaggcttagcctttgcttccatcctctagtttgcctcatggctcaagatggctgctagagctccagctgtctcttatgcattcctggctgtagaatggaggaaggaggaaagggtaacgggacgctttactggctattcttgtttaaaggagcatccttgatcatacttaatgagaatctggagtaattttcaggagatctcagagagggt

SEQ ID NO: 10532 - DNA, 545 bp, Homo sapiens
  misc_feature 532, 533, 534, 535, 536, 537, 538, 539, 540, 541, 542, 543,544, 545: n = A,T,C or G
acgcgggtgtccttcttcaactggacacctctagataagaaggcaagaaattcttaaaacttttgctaacctaattgtgtatgtaattagaataaccaagttcagttaattgaaacaatgagtattggagtaagagtttgggatttgattccttagggataaactactaaatccaggacagtcatttaactgctgcagatttgagttcccaggggaaccaaacagaagtcacacaatttctaggatgaaaacatctcaaaaaaaaatcagtcctcccagcacttcgggaggctgaggcagggagagcacttgaagtcaggagttgaagaccagaccagccaacatggtgaaatccctgtctctataaaaaatacgaaatttagttgggcgtggtgacgcgtgactgtggtcctagctgctcgggaggctgaggctggagcctgggaggcagaggttgcagtgggtcaaggtgacatcactgcactccagcctgggctatggagcaaggctctgtcacaaaaaaaaaaaaaannnnnnnnnnnnnn

SEQ ID NO: 10533 - DNA, 257 bp, Homo sapiens
  misc_feature 1, 2, 3: n = A,T,C or G
nnnatggagtcagctgcgatagcggcctgacgtccgccgtggtcgatatcgcgcgcgcgcaggagcaatttacggttgccctgaatggccgcttcaagggcggccatatcacgcgccattacggcctgccggacaagcgcgtgcatgcgatccagctggagatgtgccagtgcgtgtacatggatgaagcggcgccgttcggctaccggcctgacctggccgcgcaagtgcagccgctgctgcgccagatgatggac

SEQ ID NO: 10534 - DNA, 890 bp, Homo sapiens
  misc_feature 1, 2, 3, 4, 5, 6, 889, 890: n = A,T,C or G
nnnnnnacttcgatgtacttttttttttaagttttcttcttattattatttttggcaactttctggtattacttgtaaacactggttccttcaactttctgatattacttgtaaacactggttccttctcaaccaccgtattctgattgggtctataagtagcacccagtccacaccacagcacgcttctggaggaggaatgccaatggggaccctgtctgcaatgcctgtgggctctactacaagcttcacaatattaacagacccctgactatgaagaaggaaggcatccagaccagaaaccgaaaaatgtctagcaaatccaaaaagtgcaaaaaagtgcatgactcactggaggacttccccaagaacagctcgtttaacccggccgccctctccagacacatgtcctccctgagccacatctcgcccttcagccacatgtcctccctgagccacatctcgcccttcagccactccagccacatgctgaccacgcccacgccgatgcacccgccatccagcctgtcctttggaccacaccacccctccagcatggtcaccgccatgggttagagccctgctcgatgctcacagggcccccagcgagagtccctgcagtccctttcgacttgcatttttgcaggagcagtatcatgaagcctaaacgcgatggatatatgtttttgaaggcagaaagcaaaattatgtttgccactttgcaaaggagctcactgtggtgtctgtgttccaaccactgaatctggaccccatctgtgaataagccattctgactcatatcccctatttaacagggtctctagtgctgtgaaaaaaaaaatgctgaacattgcatatattaagcggccgcaagcttattcccttgagnn

SEQ ID NO: 10535 - DNA, 634 bp, Homo sapiens
gtccgtgggactacgaatatctgggactcaagcgcccgccaccacgcctggctaatttttgcatttttagtagagacgggatttcgccatgttggcctggctggtctcgaactcctgacctcaggtgattctcccacctgggcttcccaaagtgctaggattacaggcgtgacccaccgcgccagaccacttgcaaatatttcacagagccaatgtgtaacttgagtggtgcaaggacatgaagtttacccaaggcttaacagttgatagataatggctaaatatggtgatcttcaaagactaaagaaatatagttagtattcctcaccttcacaaatacaacatcaaaaccgtaatcattttctgtgaccttcctccctcccatatagtcctatattctcccccttctttatgtgtgcgtatgccagcttttctgatgttctgttagtctgggttcttattgcctccccactcaccttctttgtggttacatatttgtagaatggaggttgtcacatggtctggacgtaacggaatgctaaagaataggagtctagaactgctgtaaactttcagtaaccaaaagcttaaatttagaaataaaaagctgctgaggagtgagatcttggcaagt

SEQ ID NO: 10536 - DNA, 561 bp, Homo sapiens
  misc_feature 556, 557, 558, 559, 560, 561: n = A,T,C or G
accatggttggaatgataaatgatattgtcatttttgttagcagtgaagtgagtggcatctatgtattttttaaggtatataatgaaattgtgcctaggggagttataatttactctatgtatttttatatatacttaaatcaatacattcttacagactagcttctttagtggtaacatacaggccgattttctcactccatgaatgattacggacatgtatccaggagcggaggtccctcagccaccagttcacccaggtgtcttgctcttatctttcagaagggaaaattggctaggggtttctctccaccatgtgctgttctccaggactttgggtgaatccaggtgtgggaaagaaggtagcatcagctgtaagattcaatgatgtctctggtgcagcagaatacaaactgcgaactttgaaacgctgttgaaactccttggctcctcctggaggctcgaacttgaaggaaagcgctgattaggttgagactctggacttgaacactagaataatgaagcctgcctgatatccctgttgcgaggagccccnnnnnn

SEQ ID NO: 10537 - DNA, 434 bp, Homo sapiens
acgcgggatctgtaattttgacatatataatattttagcagtgggtatttatttctagataaattaaaataataataatgatacagcgcaaaacgataaaagctgaaaggaaaatatggtgaggtataaatgtagaaaggacagagatttctcctccaaatactgtttctcttggcccataatttaatcattaaaatatcaaagataaaattgtagggcaaataaaatatcccacttggacaaaaatcagtagtatttctatacaccaaaaacgttcaagatcagcatcaaatcaagaacatgatgtcattccaaatagccacaaaaagttgaaatacctaggaatatggataaccatggaggtgtgaaagatcgctacaaagagtgctacaaaatactgctgaaagaaattcaagacaacacaaataagtgta

SEQ ID NO: 10538 - DNA, 474 bp, Homo sapiens
acgcgggggtttcctgcgtttgtagatggaaggaagaacttgtgtgcttagacctgacgctgggaggagatgctgccacctaggttacttgtaggaccctatacggcaacctcctttgccaggaactatttataaacatcctgcaggaaaatgtcagagatgggaagaaacaagaactttgacatgcttggtgttcttgcccaagctttgaagaagtttacaaagtctatatgtcagaatacacatttcccaccttgcccaacagtagaaaaacataagaagagaaaaacattaaaaaatgacaaggaagttaatggaagtcagcaatgtgatggtgtttggaggtggagccttcagaaggtaattaatgcccttgtaagaagaggccagagagcttgcgcaccttcttcctgccatgtgaggagccaagaagccggctgtctgcaacctgcaagaggaccctcactagaagct

SEQ ID NO: 10539 - DNA, 591 bp, Homo sapiens
  misc_feature 569, 570, 571, 572, 573, 574, 575, 576, 577, 578, 579, 580,581, 582, 583, 584, 585, 586, 587, 588, 589, 590, 591: n = A,T,C or G
acttttctataagttaacttgctttcagcatcttaatatttttgcagatatttaacaattaagtttaaaatcaaaagcaagagatatgatacttgcagctcagaaagcagcaggacttcggtgggttggaacgcaactcttcttgctgttgtcccaggtgatttttcatcaaccaagtcttagatcaatcaattacacaaatatgacactattacatctttcttctggagttatctttctgttggtctaatactcagatgcttctgagccacgcaaagtaaaagccccaggtagaatatccatgagatgggactgattgtgcttccatggtttacctatctcagtggcctgccctcctggccctgtgaaatcagtttggaaacttgcccttcttcttcttcctggtggtcttattaaacttttccaagttttgatggttctacaaacccagaatttcattgacattttcaccacttttcttttttttcaatgtgttttatcatgttttcttttttacaaaagcattttgtgttcattggagaaatcctaggggaaaaagcccctagcannnnnnnnnnnnnnnnnnnnnnn

SEQ ID NO: 10540 - DNA, 1102 bp, Homo sapiens
  misc_feature 1, 2, 1102: n = A,T,C or G
nnacgcgggagtttttcagaatcaggcctgctttgtccctaaatgctttcttatttccccagagcccttattggatttaagccccatatcatatctcacatacctgagacagacataccacagtgaaccctgcatgtccttgtaagttcttttcccgtgcctagaagttgcagaagaccaaggaaccttggaagtgacttactcttttgcttcataaagttgctttaaaacagcctttattttaattattaacaaggtatgtcacacatttttaaattttaaggttaatttagtcattaattctgtcaaacaagtgttctttggaagctagttgtcttcaatgtcttttacttggagttacttgaagtttgcttaaactttattcacttggagtagaacttcctagttaaatgattgaaaaggactagttctgcaaaatctatgagaacaagagcttctgcaaatgcataatataaattctcttcctttttttttttaaactgtatttttacaaacctagatctcttcctgctttgatttgtctttatcatatctttcagaacaaacctttgatggaattctaggaaaggttgagattaagaatatattaaaaatattccactttgtacattctgtttatattatagtaaactaagttatttagcaagataaaattaggaatttcacccaaggtatcaatcagatggaaccattagtccactgaagaatttactttttaaaaaagttagtggaggaaaggagaagatgctgcttaagagtaatcagaaataaagatggtaagcatcatatggtaaatatatacaagtttcgtcaattttgttaaaaaaaaatacaaagatggtgaggcatctttggaaatgttgtcagtaggaaaattcatttgataaaaataaataaatttgtttcataaagcaaggagaaatggtgtaaataatacaagtgtggctattgacatatgaaaatgtcctatttattttgaaagtgccgaccccgcctcaaggtaatatctgagtactctctggaaagggcgcgccagtcatcatggtcatacgctgttttcctgggtgaaaacgacggccan

SEQ ID NO: 10541 - DNA, 296 bp, Homo sapiens
  misc_feature 292, 293, 294, 295, 296: n = A,T,C or G
acgcggggtgaagggctctctgtatactgctgaagattctatagtttctcctgaaatccatgagggagccccctgaaggattttggccaggaaagtgtcatgaatcaaatttctattttaagaatagtatcgaggcagcaatgtcaaagtttgtttagaaaataggatggttcctgtaatcccagaacttttggagaccaaggcgggaggattgcttgagtccaggaatttgagtccagcctgggcaacatggtgagacctcatctctgccaaagaaagagcttaaaagaannnnn

SEQ ID NO: 10542 - DNA, 430 bp, Homo sapiens
  misc_feature 419, 420, 421, 422, 423, 424, 425, 426, 427, 428, 429, 430: n = A,T,C or G
acgcgggggtatttaaaggaggaaagagcgatgaatctacatggaaaattaggtgaaggagtggaaaattgcatcggccatataagtccaactacatatggatctattcctccatgaaaaactggaaatttcactttaacatggtatttgcacagtcagcagcaattcttaacaatgtctttcttgctgctgacatcatattttttcaccccaataatagaggataatttggaccctttctgcttttcatttaattctgtctatttctgattgcacttctcctacttctcttcccacatgagagatgattgtattacttgtggaatatgatgaatcacttcaacaagaaatatgtggcatctggttaagtttctttctagcatataaattaagcttgaatcacagctgggtcaaacatnnnnnnnnnnnn

SEQ ID NO: 10543 - DNA, 404 bp, Homo sapiens
ccgggcaggtacacaaaaaaatgccccattatccctttgctgtgggagcagtgctgatgctagtggctcgctctttggtcctggctctgactccaccagcagtaacaaccagcagtggtggaggctgtgggtgcaatagacttttatcatggccactcttctggaagatgtcactgccagcaactcctgactcagctttggcagcagctgccgcatcgaagactgttgtgagtggggaaaggtaatggggctgcaggaatgtgaggatgtagggactttgggacctccaaggcaggatgcagtctagacctccaaggcttggctttcaaaatggcaccttgttgtagctgcttaggactctgggggtgtgttggatccagaataagctcactctctaaagcagt

SEQ ID NO: 10544 - DNA, 173 bp, Homo sapiens
  misc_feature 1: n = A,T,C or G
nggagctccccgcggtggcggcccgagtacgcggggtccagtggacgccagggatctgaagggcaaaggcaagggctgctggagcctgcatcatgtcgagtccgcagaggaggaaggctatgccctgggcactgtcactgcttctcatgggcttccagctcctggtgacttat

SEQ ID NO: 10545 - DNA, 1101 bp, Homo sapiens
  misc_feature 1086, 1087, 1088, 1089, 1090, 1091, 1092, 1093, 1094, 1095,1096, 1097, 1098, 1099, 1100, 1101: n = A,T,C or G
acagaaaaactcatttcagttaaggggaaaaaaagagtaagtgagccaggattacagtccaactccagtcaaagttagtataagaaataagagaataaatagatcaacatcctcacagacaatgaaagcacaccggaaggacatgaccacaagacagataaaaacctaatatttgccaaaaaataaaatgcaaatatgacaggaaatttatattaattagtacagttatcaataaaagtaggaaaaggggaaaattaaccaagtaccaaacacttggagtaaaaagcaaaataaagcagaaggaaggaattaataaaagcaaaaaagaattactagtagaaaaccaaaacaatagaggcaataataaatccaagttggtgatgggtagtgcggggagttgagtcagataaactaccagctaacctatttaagaaaaaaaggaggaagcacaaatacaaaaatttaaatgacaagggggaaatagtaaaacaggaaatttgtttaaattgactattttgagcaattttacacaataaattcaaaaactattttgagaaaaatgcaaattgccaaaatttactctaggtagataaagtcacaacaaaccaattatcgtagaagaaacaaatagtcaaagtaccccttaccagaagaagcatcagcccagatggttcaggggatttctaccaaaccattaagattaataatccattctgcttaaacattgccgagatagaaagactctgaacctcaaggcaaaaaaaaagaaacaacaaccaaactaggaaaaactccctgcatatcagacataacaggaccgtacaagcatgcgtcagaagaccgacaagcatggaccaacaaagaacaaagggggacgcacaccagaaaatacacaagaggagaccaagactcagcaaaccaagatcacgtacaacagagccccaaacaaagaacataataagcccgagacagcagaatcacaacacaaaagacacagaacacaagagaacagaacaacaaacatcgagagaaacgcaccacacaacaagaacgaacaacaaaaaggtaagaagaaaccaaatatannnnnnnnnnnnnnnn

SEQ ID NO: 10546 - DNA, 784 bp, Homo sapiens
  misc_feature 782, 783, 784: n = A,T,C or G
actttcttggccagacatcatacatctgcctctatagaatccctcattcagggggtcactgatgaagtgtaaggccctagggttgagcttcagctccactgtggggtaggtttttaccttctccaaagcttcattttctcatttgtaaaatgcagataatgtgtgtcttgccaaactctaagggctgttgtaagaggtttaaatggcataacagatagaaatgattcaagctattaagtcctttataaatgtgtggaatgttgtttctctgtataaatcttagcttttctattatctcaacaaaggtgattttcttgttaagaaggtttagtagccaggcattggacaactccagaaggccagctagaaacatcttttttcaatagtagaataaccttggtaatagattcaagcccatttaatatacttcctggacttgaattgttacctggatcaccccactgtcattccagcaaaaagatccatgatacgttcttctcaccattaggttctcttagatatgggaattcttttttcttttctctctctcttttttgagactctgtctcaaaaaaaaaaaaaaagaaaatattcagcaaaggagccccaataaaaaataatacaaataaagaaactatagtataacagctatttacatagcatttacattgtattaagtattatgaagtaatctatagcgatgctttcaggtatatgggagcatgtgcttagattatattgaaatactatgccgttttatatcagggagtttagcatcctannn

SEQ ID NO: 10547 - DNA, 551 bp, Homo sapiens
  misc_feature 548, 549, 550, 551: n = A,T,C or G
acttaggactatggagaaacaatggaagacattaattctgcttgtcttgatggtaagggtggggatgaaaatacagatcgaatttgggggagcatgttaaggttaggggaatagagatagcttatatttagaacaagttagtagagactgtatgattttccaaatagagaagggtaaaaagacattccatagaggaagaaaattacatgcaaaaccacagagaccttagtttataaagagtaactgggtatggccgggtgcggtggctcacgcctgtaatcccggcactttgagaggctgaggagggttgatcatgaggtcaggagatcgagaccatcctggctaacacggtgaaacccgtctctactaaaaatacaaaaaattagctgggtgtggtggtggatgcctgcagtcccagctacttgggaggctgaggcaggagaatggcgtgaacccgggaggcggagcttgcagtgagtcgagatcatgccaccgcactccagcctcagtgacagagcgagactccatctcaaaaaaaaaaaaaaaannnn

SEQ ID NO: 10548 - DNA, 157 bp, Homo sapiens
  misc_feature 1: n = A,T,C or G
nccgaggtacccaagccagaaagtgagcccactctgactctcatgaactgggtcctgattcctttaaggttattttgcctaagtatatttccactctggcctctcctttccatgcccactgcaaccaccaaatgtgccacatcccacccagataagt

SEQ ID NO: 10549 - DNA, 1333 bp, Homo sapiens
  misc_feature 1321, 1322, 1323, 1324, 1325, 1326, 1327, 1328, 1329, 1330,1331, 1332, 1333: n = A,T,C or G
acttttttttttttttttttttttttgcagagaccgggtctcactatgttgcccaggctggtctcgatctcctgaccttgtgatccgcccacctcggcctcccaaagtgctgggattacaggcgtgagccaccgcgcctggcctcctttgtttttaattaaggaaaaggacatcaatatcttccatattgaagggagtggaaggcgggactaattatatatatattatcttttacttccatgatttttttctccttttgggagttcgcaaatagttttttgatgacggcaaatactcctcattgctaatttttggtgacagagaatattaactctttcttctttagaaaataggaggaggggaagccctctcttctactttgaattagagtacgtgcttcatttgtttgtgacgaaccgcccttggggaacttttcctttccttctttcctagattaacaatggtaccagcacgtgcagaaaagaaagagtctccgcttgtctttgtctgattctcctgtcctctccatggaagttacattttctgtaaaggatgagctgaaaattctcctggtcgttgccagttgaacttctgctgtgctctgggaaggcattctcactctgtttatgttgtctaagtgcagacatggatgtgcaggtttgctagaacctcctgaggatgtgcaatggttctgttcatgcctgaatcagttcttttgggagtggacattctttctctccctcatgcacagcctcaggcacatggcttgagctatggcggcacgcagtatggccatcacccaggtacaccccttccctaagaagaggctcttcaggttacactcgggtactgttgttatctggcttattgtccataggatcaacatagagtcctgaggtcagttcaaaccatcaaaccagggatgttacttattatttgaaaacttctttggaaagataatcttgggttgttcagtgggaccagtctttgacgggcaaatctccagaatacatggggtcagttctctcaggttcaggaagcatgtaatctctctaagattcattaattaaaaaaaaaagacacatgcatagaaaaatagaacaaaatggaaactctttattggatacctactatgggttatgtgccagggtttcctaatcatttggggacatgtgtgtataaacaaaaccaggctatgtggccaggcagtgtgtggctcacacctgtaatcccagtgcttagggaagccaagttgcaaggatcgcttgaaaccaggagttcgagactagcctgggcaacatagtgagacccggtctctgcnnnnnnnnnnnnn

SEQ ID NO: 10550 - DNA, 453 bp, Homo sapiens
  misc_feature 1: n = A,T,C or G
nccaccgcggcggcggccgaggtacagtggtttacgcctgttaataccagcacctttgggatttcaggccgaggattacaggcgtgacccaccgcgccggaccacttgcaaatatttcacagagccaatgtgtaacttgagtggtgcaaggacatgaagtttacccaaggcttaacagttgatagataatggctaaatatggtgatcttcaaagactaaagaaatatagttagtattcctcaccttcacaaatacaacatcaaaaccgtaaatcattttctgtgaccttcctccctcccatatagtcctatattctcccccttctttatgtgtgcgtatgccagcttttctgatgttctgttagtctgggttcttattgcctccccactcaccttctttgtggttacatatttgtagaatggaggttgtcacatggtctggacgtaacggaat

SEQ ID NO: 10551 - DNA, 968 bp, Homo sapiens
  misc_feature 968: n = A,T,C or G
ccgcggtggccgagcggccgcccgggcaggtactgttactatccttaagatgagggaactgaggaaccaagaggttaagcaatttgcctttggttcacatagctaatgatgtggagatttgaacttaggctgtttgtctcccaagcctatgttcttaaatttggggaaatagtaaagataatttccacaatgtgaagacagttagcagccttaaggatgaaaggatggtgcaaataccatgcccagtgagtgacagagtatcaaggctggtagagcctgatgaaagcacaagttttcagaaaagagggaaacaaacaattcctataaagttaagaaaatcacattgacaccagacttctcattggtagagaccacaaagcccttttcaaaagtgggtcaaactggcaggctgagcacatatccttccttccctttctgtcaaaagatgggacattgtcttcaactttgaatgacttacacagcaaaacattcaaatttatggaaagaaatgaagacaattttagacatgccagactcatggtttactatacaacaaccatctcagaaagagttattcagtaatagcatcaaaatgaaaaataaatcaaagaaataaggtagtaatcaaaataagagttaagtaactactgacagatataaggaaagtagtaaccattcggaactaaaaacaatggtatatgttgctggaggagcagtgtggggagggtgagtatggcagcatagtgtgatttctttttgtttctggagaaaatataaaagtaatcaagcttagttttgtgtgtattttcttttagagatggggtttcaccatgttgcccaggttggactcaaattcttgagctcaagcgatccttcaacctcagcctcttgagtaacaaggattctagtcacattccactgtgactggctgcatacaaatatgtgaagagcaagtatacaaacgcagn

SEQ ID NO: 10552 - DNA, 611 bp, Homo sapiens
  misc_feature 589, 590, 591, 592, 593, 594, 595, 596, 597, 598, 599, 600,601, 602, 603, 604, 605, 606, 607, 608, 609, 610, 611: n = A,T,C or G
actctgtggtatttcacataatattaaccagctgttagcaatgactgatatatacttcccattgaaaatgatgtaaggtctgaaaggattcattttgacaattttatatcacatatttatatttaccttaggtggttctttttaatgttttaatttgggaccacactaatttctaacttggtaactcatctcttaccaaaattaataccaagccaagaaaaatggtttcatgaatagaatctactagtcttttatatcttataatggtagatcactgatgaggtagaactccataagagcttcgctctcacagtaaaaggttttggttgtgcatggattacacctggtgaaagttggttagtattgtctaagtggcttaagacaaatttattttgatttgtattgtgatgactttgcgaagcaccagaatttttcccgcttcgtgtgtgtgtgtgtgtgtgtgttttgagtccaagtctcacaccgttgcccagcccagaggttgcagtgagccgagatcgcaccactgcactccagtctgggtgacagaacgagactctgtcttaaaaaaaaaacacacacacaacannnnnnnnnnnnnnnnnnnnnnn

SEQ ID NO: 10553 - DNA, 1225 bp, Homo sapiens
acaagctttaaatgggaataaatcttttataagcctttccatttactttcctgcttattaaaggtgaattgtaatggaaaaccctaaatgtcacagagtctggaaaattgaaataataaggggcagcattctccttagtggtataactagtaaaagtgggcctaatggaaagtccaccgtggaatcatctgtgtttctatgcaacaaaattattttccttctttctctaacaagggaagtagttctgaccaacaaggttggctgtcttaagcattgtggtggagagcaatggaaagatgagtgtgtagtgggagcaagcttagcagagttcctgaagccattgctttagtgtcccaccacatctgtaggcctaggggatgccatgcagtcctccagagatagccaaggaagctgcagagctgaggccaccctctgtgcttgtaaacaataagcacaccccccaaaatcaggaataagcccatgagaactgcccatatcccatggtcccacagcacctcatcagctgcactagtgtgttctgcagtagatccactgctggtgggcctcaagttgcaaatatatttagtaatggatcaaaatagaatctcttagcaaaaactggaccttacaagcaatttgcatcaagtcagaaacccatacatctgtgtcccacagcaggccacccttaagcaacatgaaggcttccaaaaaggttaccctgcccatatgaaaatgccaattttatccagcaacattgctgtgttttcaaatttctgtagacgccaatgctgtaatgaatgttctgaccctcagggtgtcatccacagccaggctttgtgcctgtcttttgcaaaacttacccaatttctgtccaaaaaaagtccaagactaggtcgatagtagatttatgtgtcaaaggagaacacatagactttggataactttactccaaaagaattctcttgctctctcaagcctattctgttaataacatgtttagttctattcctaagtttgatttttttatggcaacagtttgactattgaaattctttagctttgtaaaaccatggcacaaagtgttcccccatgaaaaaacgcagctttccataaggcttccccagaaataccaacattagaatgggggatgtgatttgactttttgtgagtaatcttcctagcactgcccgaagagagagaaaaagagagagatgcagtttcacgt

SEQ ID NO: 10554 - DNA, 1067 bp, Homo sapiens
gtgatggctgggtgcagtggctcacgcctgtaatcccagcacttgggaggcttaggcggctggatcacctgaggtcaggagttcaagaccagccgtggtcaacgtggtgaaacgccgtttctactaaaaatatgaaaattagttgggtgtggtggcatgcgcttgtagtctcagctactccggaggctgaggcaggagaattgcttgaacctggaaggcagaggttgcagtgagccgaaatggcgccactgtactccaacctgggcgacagagcaagactccatctcataaattaaaaggaaagtatgatagtgttatggattttagctctgagtgagctggaaaactaggtcattatctagatgatttcagacttgaccctaattgaccatatatgaccaggaaacacttctgagtttacagctccgtggagatgacctcaacactgccccttgatttgtttgatgcatgtcactttcattaattttccccctcctttttgaaagtcctgtggcagtactaatattttcattttatgtaatctctggtgctgctttccagtcactgtatgaagtgtctccccaacactagcaaatctaggtcctactaaatacaaatctctgggtggatgatcttctagtactgtatttttaaattaaggagttttagttataatgaaattgatttgtagtctgttttgccgtaaacttgtttttctttaaattgttcttacagtgatatcttactatttttaactgtctggggtttctgatatggggatttcagcccctggttaatcagtcttgtccctacaagtccctgatgcagtatgtttatttgtgatgtttaaagaacatttcttggctgggcgctgcggcttgcgcctgtaatctcagcactttgggaggctgaggtgggtggatcacctgaggttgggagttcgagaccagcctgacaaaacatagtgaaaccccgtctctactaaaaatacaaaaattagctgggcgtggtggtgggtgtctgtaatcccagctattccggaggctgatgcaggaaaatcgcttgaa

SEQ ID NO: 10555 - DNA, 272 bp, Homo sapiens
accaaccaccagggcccttgcttctgagcaggaagcagctggggaataggctctttctcttaatgacttccaacatagttctctcaaaccttactcctccagaaggccaccctcacctggctatggctacttcagaaaaaacttggcctctggtataatagagcagaatcatcacctcacattctatttcaagccaaagtcaatatctcaaaggctggttctgtgatttatttggcccttgggagctcctactgaaagtgctgaaatgtcgt

SEQ ID NO: 10556 - DNA, 943 bp, Homo sapiens
ctccaccgcggtggccggccgcccgggcaggtacttttaaactggtggtcctaggattcattttaaccatttcttgcctcactctcactctgtcactatgtggagtgctctaatccattagggaatatagctcctatatcactggctacccaaatggacctcaaaaaggcagacagagcccatccccagaatatccttggttcttgctggtcacaaggaccaataacatcattaacattgatgtttcagagtcaatacaggtataagaaccttaggtttaggactgtgaataggggagcggtgaaatgaaaatacggccttgaattagtttcactgtcaacatatctcatatttatctagctagggtattttaattctagggtatgttatgtccagaagagaggaatgattttcacccttgccaacatctcagataattttagacaacagccatcgttacacatactatcaactaaggaactctgaaaccgtagctgcattttgttttgttatcattgtttttaattaaaaggcacttctactatgtccatcatgacagcttgtccaactgttacttcaattacttccaactaaacaactagagatctcaacttcctagcaattttaagtgcaccctatctccttatatataatctgatgaattaatagttttatacatatcacttcctgacaagaacaacagagttatgtcataaaacttaaagcattcttccttaattaaagccacccaccaaaatcgaggcatttggtgcagaaatatctggctataggtagggtgaccatataatttattgtctaaatcagggctcttttgagaatgaaaaagaagcattattaattattaaacctagacaactagtgtgaactggtgtgcctcacgcaaatcaggacttttggtcgccaaagtttcagatcctcaggt

SEQ ID NO: 10557 - DNA, 488 bp, Homo sapiens
  misc_feature 1, 2, 3, 4, 5: n = A,T,C or G
nnnnncagaaaatttggcaggggaccatttctttccaaaaataagcctggttccaaattacttcctttccaaaaaagtggttcaagggtcccctggaaaagaccaacaagaggattacttgaagggaaacccaatcccccagagttggggaagagggcacataaggaagttgattaaaaaaacttaacttgtgaattgtgggaattccctaccatttggatccatgggaccaagaaaaaccaagcacttgatgggaaaaactgattaaattctgaattagttctgtaagttgggtttaaagaagaagaattattaccataatgggttaagctgctggttccttaataaaattcccctagttactgtaatgtctgaaaatgaaccccctatggtgggctactgtgactgttcactgcatttgagaataaagaataattaaggaaaaaaatactctgtcagcctaggcaatatagtgagactctatctgt

SEQ ID NO: 10558 - DNA, 480 bp, Homo sapiens
actacaggggcaggctaccgtccccggctaattattttaattttaatttttagtagagatgaggtcatgctgtgttgcccaggctggtctcgaacttcttgggctcaagagatcctcctgccttggcctctcagattgctgggattataggtgtgaccccccacacctggcctatgatcttaacttatttacaccttttgacattgccaaaaactaagttttacaagatctctcaccatatctctggggatgggaggaggaagggaaggataatggtctcatattcataatagtatttgcagtgcctattctcacagtgataaatgactataaccttttcaagaggatgagtgaaagaaagagggaggcaagaagaatgaaaaaggaggtaaggtcctggtaacacatcatcttgtttctaaagacaaagccccttgaactgttccaaagaaaacttataatccaaattaataacaatgt

SEQ ID NO: 10559 - DNA, 419 bp, Homo sapiens
  misc_feature 419: n = A,T,C or G
aggtacacacattatctaagatgatacctataaggcagatagtattatccccattttacagatgcagaaattgagtatcaaagtggttaacttgaataatgtcaagcagctagtcagtggtggcagtggaatgtgaatccaggaagtctgacacaaaaacaagtggtcttaatgctataacatgcttaatgctaagaaaaagtggacagtataatgctatactgttcctgaataaatatccagtaaataaggaaggctagaagaacacaaagtttgtaacaacatgtttttctagtagaagtcttctttgctgactttctgattctcaggtatagcatcaatcggtgagggttgctatatgtaaacattatactgacaggccaaagcgatcaactgtgaaaactaggcaagcaaagtan

SEQ ID NO: 10560 - DNA, 481 bp, Homo sapiens
acattgctttattttttcatgagacataatcatgtcttattataaatttgcctaagcaggggataatatctgacatacatgctacctgttattgtgtaaattgaaaatattctatcttaccagttgttacaattaaatatattatactgataatttattttttcagacattgacataataaagttttatttgaaatatatcttaatcaataaatataaaacagaaaccactctaatagaggacaattgttctagtcaatactcatatttgttctgactattgagaaaaattatgtctgcattttaaaagtttcaaattttgaagcttcagattttagaatagggattttcaacccacggtactgggtctcctcagtttacagtggcattacgtcttgataaacccattataagttgagaatattgagaatgagaaacatagaaaacacatacactttatctaaagaaaaatggttaataga

SEQ ID NO: 10561 - DNA, 534 bp, Homo sapiens
  misc_feature 1, 2, 3, 4, 5, 6, 7, 8, 534: n = A,T,C or G
nnnnnnnnccgccgtacgcggggagaacggcatctgaaccttgccgagtaggaatgttccagaagtaagagagatgactagggtttcaagaacaaggaccagcacctatgaaggctctgaggcacagaccactgtgacctgtggagaagtgacagcaaagtgaaaggcacgttttgattactaccgacattcacagtctggacacgggtgacaaatctaaaagatattgcccattcgtccaactgccgctgtcctgccagtatatcgtctgagattaccatcagctaaatattgcattgtctttggacaattttcctacattgtgactcctcactacattttcaatgcttttctagtcccagacaagctacagactgttaatttacacttgcttttgccttgcctgaggaaattgaaaataaattttaatttcctagtcaagggctacgggtgctttgtgtggtttggaggaaaaaaaaatactgttagatggaattagggaatattaggagagtttctgaagttagtgaaggn

SEQ ID NO: 10562 - DNA, 1314 bp, Homo sapiens
tatagggcgaattggagctccccgcggtggcggccgaggtacttacaacttttcatatagtattggtagtgttttgaataatttaaaaaatcatcttaggtttgttatttaactttatttatatagtgcttgtattaatgattttgtgaatgttttttaaagatggataccttgatttggcttggcctcccaaagtgctgagattacaggcgtgaaccaccgcgcccggccgacttcaggagatctttaggcatcattggtttgtgttcttcagttaaaaataaaaagccaaactcaagacaaagaatacagttcagttccaggttaggaagagggagaagctcagcttctgaagtagtgctatatttactgtttaccttgactgttatctttagaagttgatgattattttaaaaattgtgttaactgctgtttgaactgttaaagttccgtgctgaatgctatgtagctgtaggtatgtatcagtggaaaatgtctggtttgcagtaaatgtgattagtgacatcttaagctaactgaaatcagctggtgcattgtcctacaccggtgcattgtgctacactatgctgttactgctctgtttgcaaatttatcaaattgtgtaattttgaaagctgacaaaattgttacttttgaactgattatttttgtattagagattatttaatttggtgaatggttacgcaagtgagatccttgaagattatagagcttcatcttttgatgacttgggagtcagggaagagttaactatatggaaataggcagaatgcctaggttcttgtatcttttgtttttaaatcctagaaatgatgatttggatgtggtggcatcaaagactacagaaggggtagcgctttcttagttattctttgggatacttattctttctgggtgaactttagaattgttttggcaattcttttgcccccttgcaaatatttccctttggaatttagagcggttgaatgaaattgtattaaatatgtaaagaaatttaggtgtcattgacattatcttaatattgaattttcccatccagtaatatgaatcttttgaaaaggtggcttgagtaactggatttttctcgaagtttttgttttcttcacaagggttatatacatttcttaaattggtttctagatgtttttatattttttgttgcttttatgattaggatgtttttgttgcttagcaagttaatactggtgtattggaaggcaattgagttttttttgttactattgtttgtttttgatatggagtctctgtcgccactgtacctgcccgggc

SEQ ID NO: 10563 - DNA, 1151 bp, Homo sapiens
  misc_feature 1148, 1149, 1150, 1151: n = A,T,C or G
actggttttactgatctttgtgcaatttgctgctcagcagatattttcaatgctgattggtaatatgtcagtggataaccagtggaaatgcatgtctattaattactattgcacataatatttatcttgtttttatattttgcacaggattttcaaggtgctggtatatttctgagcactgtaaagttttctttgagaaataagtgtttatttttaaattgcgttgtctcatgggagggtaacatttgtaaatatacttcaaattagtgttgttccctctgctttctttttcctgactcagaaacagagtgctttgactgctctatgttggggccatgttttccgcagacttgaacccaagccaggcccttgaatgttcccaggcacggataaacttgtttagactggctgaaacaccaaaacatcaaacgtgttgctaaacatgtaaatactagccccatccctgaacccaattccttaagcccccatataaactccatatccgattccccatatctaggttagaacgtctcttttctccctgtcaatcatgaggactaatgcagcacacaatgtatacagtactaataaaggctttggacttaccacttccttctttgaaatcccaactggtcgcatcttaggttggtttggggcagtcccttgtgggaactctcctgctattctgtctggttttgggccttactgcagttgtggttttgggtggttggaacaagcatatatttcaataaatacgttttttaaatgtccaaaaaacaacatgacacaactgcgggtcgagagccagttttagtttgtcccataagctttctgtctttgttcagtttagttacaatggagaaaacctctttaatgttgacaggatttctttagaaaaaaaccattgctatatctgaaagtccagtttcaactggcaaaattggacaaaagcagcaatttgaaaaaccaagctacttataacttgataaagtcctctataaactaagtcattatatttctccttttaaataaaccattgtaaatttaatgttcatatcagttgagtattagtttccagctggattcatgctgaataaagtccagaaactttctttgtgattcaaatagatgcacaggaagctgggaannnn

SEQ ID NO: 10564 - DNA, 724 bp, Homo sapiens
accatacaccatggaagttagccttccacctcaggagaaagcaagctgctctcataagcctctcaccaactacccagtagtctttgcctccaaactgaacaacaggaaaaagtgccatagtttttaattaagctgttttaaaagtccatgttccgggggaaaacaaaaaagaaacaaacaaaacacttgttatttgctgaactgacaaactgacagatattccacgagagttgaaagccttggatcgaggctgattgcctgggttactgaagtgctaactccactgagggcaagtgtatagcctccccaaggctctagtgcccttccctagcacagctcagccccataatgatctcctgagcaggagtgttcattatttctccagactgattttcatttcagccccctactcttgccattgctctaaaaatgatcctaaagacttgtgactgtttgaatcaatagcaacatcatcagtagaaagcccgaccaagcacacttcaaaattagcaatcttcttggctctatggctcaatatcagcaagaagaaaaaaagacaactttttttttaatcatccccacatttaaattaaccaaatagtttttacaaaaaagtaggtaagtgggtttaattctttgaaagtatttgccagtgaaaagtagatgatttttaggtaagataacgtttaggcctctgggggatccccaaagccttctgcaatgt

SEQ ID NO: 10565 - DNA, 932 bp, Homo sapiens
  misc_feature 913, 914, 915, 916, 917, 918, 919, 920, 921, 922, 923, 924,925, 926, 927, 928, 929, 930, 931, 932: n = A,T,C or G
accatactttgtttttattcttgagaggaaacttcgatcatttaaagcagatatttgccttcatcccctacccccacccaataaaacaaacctggaaatgcccatttacatattttagcttaatcacggtcaactgtcttctatcgccacttcactgctcacaaaatacacatatttaaaagtgaaaatactgaaatatgtcttcacaatacagctaataccaccagtagaaaattcacgtcaccatgttcagtagacaaacgtgagaagcaatgtggtgtcagattggaaacttgggagagattctcagaaataagtaacttcaataggttgctttttgcatagtgcaaaattaaacttcactttatttagtggaagtgacccaattcaatcttatctggggtcaacacagctgatttcatttgtgtttgaccactgcacattttgtcatccaaaaagttaaggagaggaagtcaaggttataatgagaactacgaaagacagatgctacaataaagactttttttgttgttattgtttttgttttggtgatgatttgatccaaaagagaaacacttagatttggaattcacacacaaaattcatacttcagaagacccaacaatagtagttgtgagacagctaatcactgaagactttctgcattatttttataacagagagattgagtgatttagatactctatcctgcaagtatacatttaaattcctacacagataatgtgaaaaatatcccagataatggcatcctatctgcatgtcattattcaaatagaaaatagatttaaaaaaaaaaaaaaaaaaaaaaaggtcctttttttttttttttttttttaagggtttttacggtcctttcaggtgacttcccctcaaagtgtcaacatacattacnnnnnnnnnnnnnnnnnnnn

SEQ ID NO: 10566 - DNA, 538 bp, Homo sapiens
acgcgggatgattaatcttcccttatccacaaacttaactgtggagaaacaggagaaagtgtgtgcctagaagctggattcagggacccatggttacccacttctacttatgattccgtcattactgttgttttaggaaaataaacagatcttgattctttcataaaagtcgattcttcaacaagcaaatgggaaaatcggcaggcccagatatgtgtgtatagcagctactggttggaaatttggacacaaaagtctttatctacccagcctgtgagccacaaatctggactgagtataaaaaagaataaaactaaataccacatgttctcacttataagtgggaactaaacattgagtatgcatgtacatatagatgggaacaatagacactggggaacatgagaagggagggagagaaaaaagggttgaaaaactaccaattgtgtgctatgctcactacctggatgatggatttgtttgtactccagccttaacattccacaatatctttttaacaaacttgcactttaccccc

SEQ ID NO: 10567 - DNA, 434 bp, Homo sapiens
acttgaagctgtcatggatcaggtcatctagggcaagcaggtagagtgagaaaaactctggagagcttcaggacttaaaatgtgatcagaaaaaaggatccttatagaagagactgagaggtaggaagggaacagaagtgatattgcagaggcctgaggcagacactgttaaagagggaggcacctggacacttttgctgtagacaagtagcccatctaatcctaaagagcccctttgatatggccacttacatgacgtatgaacatacttcaaacaatgattttaaacagtgtttaacagtaactgggcttctcgtgtcatttccactaatattattctgggtgcctgccatgcgcaagacactaacataggtgttggatgtttcaaacaaataacatttatttgcaaactctcgtaactgatacttttcttc

SEQ ID NO: 10568 - DNA, 567 bp, Homo sapiens
  misc_feature 560, 561, 562, 563, 564, 565, 566, 567: n = A,T,C or G
tgatttcaaaagtaacaccatctcccgctttcaattctttgagcaaaatgctcacatgtcattatttatttattttcattatttttttagagacgaggtcttgctatgttgttcaggctagacttggactcccagcctcaagcagtcctactgcttcagccttccaagtagctggaaccacaggcacacaccactataaccagtttattttacattgttcttgtaattctggtatcagtgattcttataacaatatgctctcaatttattttaagcatgttgagaccttaatgataactattcagaaaccatactaaacatttgatcttgaaatcttccatcgttttccatcctctgcttatgcctcagttattccattcgcatgatatgggcacttaatttagccaactcactgacccatttcatctactgctcccaactctatggctggatctaagcacagtttctacatccaatattagccggtcattgtttcacaggacagatttccacagctgacaactctactccataactggaatgaacacttcaatctgcannnnnnnn

SEQ ID NO: 10569 - DNA, 1170 bp, Homo sapiens
  misc_feature 1167, 1168, 1169, 1170: n = A,T,C or G
tttctctgctgcacgctttctttttcactctattattataatatgactacattatatctgacctattcttcttctctacttttaagtctctcctatttgtcgacatatcagcttctctctttctcgtataaaatagtgggcgcacaccattttctctcctcttttgatctttcaacggagatatttttttctacctgctccataaatgttttaaatttctctctccctataaaatattcacaggcaccctctaaccaatgttcgcgaggcttctatagggttcattttccagaaaaattttgtaggaaattgttctgattttaaataaactaaattcatagatttgtgttgacagaatatgatttgtgaggtaaagtcactgtattatctccggtctaaagcacaatgtagcatgtgcaaaagaaactaaagagacatgtatttcaaactccaggcagaaaggcagaatataagagtgcatagagaagagagtgcttttcaggtcagatagtgaaggaagacacaatagttacctaaatcaataagctgtaagcaacatataaatatgcaatgccatttcactgaatgtgaacaggatcaattagaaattgtactgtgatatccacatatttttgagaaaaattcccaagccaggcgaatgtggattggaataaagacataggcagtgtataccaccatagcaataatggttagtaagatggtgttaaacatagatcgctcccagggctctaaaacagcacagcagctaatgatttggtattgatagtagagccaggagaaatattccttcacacgcctcaaatccatggttggctccttcaagctgcagtaagtttgtcctaagaaagtccaggtctggttcttcagccttgctccttcgcgaaatgatcctgtgtgggttagttctcctctctgggttgctgtttcctcatctcccagttgggtgtatctccctgcggcttaggtgagcgccgaggctttggctcctccccagctgctgcgagcttcccactgcccccgcgtcctgggagcctcccggagttaggtgttaggccccgccctcaggactcttgctaaaactcaaattctacctggctaattccggtgattaattattgacaaaaggaaaacactcatacgcaaacnnnn

SEQ ID NO: 10570 - DNA, 704 bp, Homo sapiens
gattctaatgtgtttcccgaggtacgtggcgtagcattccatgttcagctttgacatttattttctcatatcaaccctttttacacgtgaaacacaatctcgctcttgaagtcttaactgcatgatctgtgaaacctgtatttatattttcttcagtgtattcttgtcgtgtgtgtgtcctaaacaaaccaaaagaaaactttccaaatctaaagtattcattctccaattggagcaagaggagtcagttagatactatcacggcattcatttgtggctggcttgtcatatttacttatgattgataataaatctattttgctttttagagcctcccgagaagccatctgccttcgaggtatttagtttcatgatttcattttgaatgacttattaactatgtattttgtgaagtatacattctttattaatcattttgcttccaaccccatttagcctgccattgaaatgcaaaagtctgttccaaataaagccttggaattgaagaatgaacaaacattgagagcaggtaaattttttaatggaactatgcaaagaccaatatttcaatattggacattttgatggtccttctatccccaatgctttatttttttcaactttgaatgaaaagatttgatctaggtaatgccaatactggtattgatgtttgaaaagctggtattacaagcacagtaatttca

SEQ ID NO: 10571 - DNA, 864 bp, Homo sapiens
  misc_feature 1, 2, 3: n = A,T,C or G
nnngtacgtctgttgtcttcatcatgacatcagaaaactctatgctgctccctaactatgtgaccttgagcaagtctcttaaaggagaacttcagtttctgtatttggagaagaaagaagatcatggtagatgatcctcttgaattggcttcaggctctaaaattctgtagtttggtaaaaatgcctaatgaccaaatggaggcaagatctcgttaccaagatcatggtggctttggaagtgacagagatggctgagaccaggaggctgaaatgaaattaagtcctatgatgttgctttaagttaatgctatctaagaaaaggtgctggtagaggagtggggccccaaacttggcttcatagtgatggagtttccaaatcaatggaatagggaaagcacatctcctatgatacagtaaatgattcagttataaaatatagagccataagaaagaaaatataatacagttgggtagaatctttatatctgatgagggaggaaaccagcttaggacattgatcacagaagagatggagaaccgggatggaaatttgtctgaatctctcaggattgtggggcttgatgacatcagccctccataaattactaacaggaggagtaggtgagtgtttacagatatatgagccacaaagggcatacaaaacaaggaatcaggaaagaggagaactaaatttctagaatttctctgacaaagcccagatgatgaggacaccaagtcatggcttaggttgggtgctgtttcagcctgaacccaaactatggtttggggacccacccctgaaatgaccctgctcccctagagaccccctggttcatgcatattgaccatccctaggctggagc

SEQ ID NO: 10572 - DNA, 592 bp, Homo sapiens
agcgccgcctcgatgcgcgggatcttgcaaatgtcggtgccgatgccgtagatcatgggctagtcctattccttatgctttgttgcccaggcgcgcagccaccatgatggccttcatttcgcgcacggcgttttcccagccgacaaacaccgcatgcgcgacgatggcgtggccgatgttcagctcagtaatatcgggaatggcggcgatcgcctgcacgttggtgtaatgcaagccgtggcccgcattgaccttcaagccacggcccacgccgaacagtacgcctgccttgatgcgctccagctccgccaactgctcggcgcctcccgtatcggcgtagcggcccgtgtgcaactcgatcacgggcgcaccgatgttcggcaccggcggcgtatctgttgctcgtcggcatcgatgaacaggctcacgcggatgccctcgccctgcaattgcttgacggcagcctgtacttccttgaagtagcgcaccacgtccaggccaccttcggtggtcacttccgtgcgtttttccggcaccaggcagacgtcggctggcttgatacggcaggcgaagtcgatcatttcctgcgtca

SEQ ID NO: 10573 - DNA, 854 bp, Homo sapiens
  misc_feature 1, 2, 3, 854: n = A,T,C or G
nnnctccataaggtagaaatactttccagaatttgcctaaactagtaagccctgaatttgctatgattagggataggaagagattttcacatggcagactttagaattcttcactttagccagtaaagtatctccttttgatcttagtattctgtgtattttaacttttctgagttgtgcatgtttataagaaaaatcagcacaaagggtttaagttaaagcctttttattgaaatttgaaagaaccagaagaaaatatcaaagttctttgtattttgagaggattaaatatgatttacaaaagttacatggagggctctctaaaacattaaattaattattttttgttgaaaagtcttactttaggcatcattttattcctcagcaactagctgtgaagcctttactgtgctgtatgccagtcactctgctagattgtggagattaccagtgttcccgtcttctccgagcttagagttggatggggaataaagacaggtaaacagatagctacaatattgtactgtgaatgcttatgctggaggaagtacagggaactattggagcacctaagaggagcacctaccttgaatttaggggttagcagaggcatcctgaaaaaagtcaaagctaagccacaatctataagcagtttaggaattagcagaacgtgcgtggtgaggagatgccaaaggcaagaagagaagagtattccaaacaggagggattccaaagagagaagagtatcccaaacaacatttgcacaaacctgatggggagagagaatgtggggtggggatggatgatgagactgaagaagaaagccaggtctagataatcagtggccttgtacn

SEQ ID NO: 10574 - DNA, 547 bp, Homo sapiens
  misc_feature 547: n = A,T,C or G
acttttccatatttccacatactaccaaggattttcaagtgtaggagtaattcaatcagaccctttctttcatatgagaattctcaaaagagtagaataaatggaacacagaaagaaaagactttaagcaaggggcttcttggaagccactgcagcagtccaggcaagtgatgctgaaggtctgcaacagaacaggggcccgagagtggagaagagtgggtaaactatcatattaaagaggccaaactcagactgggggcagtggctcacgcctgtaatcccaacactttgggaggcttaggcaggcggatcatgaggtcaggagtttgagaccaacctgaccaacatggtgaaaccccatctctaccaaaaatacaaaaaattagccaggtgtggtggtgcgcacctgtaatcccagctactcaggaggctgaggcaggagaatcccttgaacctgggaagcagaggttgcagtaagctgagatggtgccactgcactccagcgtgggtgacagagagagactctgtctcaaaaaaaaaaaaaagn

SEQ ID NO: 10575 - DNA, 381 bp, Homo sapiens
  misc_feature 1, 2: n = A,T,C or G
nncctcaggctccagccgggactctctgatatctcagtcccattcctcacacaaccttcaccctcaaaagcctcatttgcctgcctcccatggcccacagatgcatggacacccaagagataactacaatcaccccaacaagagacacttcagtaatgcaggtaggtcattaagtggagtttttaaaagaggtgccaaaagataaaaaattcacacagccgtttcattttccaaagacactggctagacttctgtgctttattatcttctaacactttattgtcctctcttttcttaatgagagaaagcatgaaataaagatcccccaatttttttttttgtttgtttgagactgagcctgggtgacaaagtgaaacttca

SEQ ID NO: 10576 - DNA, 991 bp, Homo sapiens
  misc_feature 1, 2, 3, 4, 25, 45, 70: n = A,T,C or G
nnnnccagtggttttccatcagggnaaaacttgccccttcctgcntgcacaagagttggcaagtgtctgnaaacagttttgcctgttaaaactgggaaggggcaactggcatctactgggtagagaccaacgggtgctgccaatgctacaacacacaggacaccccccactgtaagaattatcctgcctaagttgtcaatagtgctaaggttgagaaactctgcccccaggctaaggtgtagctggactataaacctcttaaggacagaaatcaggtcctgtaccccttttctaagcacagttgaggaaaatagcagggttaagttaaatgattcggtccaaattgtcccaacctggctaaacttcagatccttccccaaagtccatgtactttctctcatagggaattttttttttaatttttaaattttaattatttaagagacagggtctcactctgtcacccaagctggagtgcagtggtgtgatcatggctcactgcagcctcaaactcttgggctaatgtgatcctcccacctcagcctcccaaagtgctgggattacaagcatgagccaccacacccggccatcctagatgattttttaaacatcacttttctcctggcagaattttctgactctgtagttcttgttaacttccagagaaagccctgagtaagccagaccctaattacaaacatgcctcagtggatgaggctacaatttgagtccaaactgctcaaggttcacactgacaaagtctcacaccgtaaacctgaaacatcatgttacagtctgaggcctgctccgagctgggtaagaaaggcctcgtgaatgcagccccctgggcagatgaggtttgggccttcacccctttgggactgcctcctcattgctccttgggaagcagccccgcttgctgcctgtgtctttgggaagcgaaagggaggggaggatgacctgttgctcaaatgtatatgccactgatgca

SEQ ID NO: 10577 - DNA, 551 bp, Homo sapiens
  misc_feature 502, 503, 504, 505, 506, 507, 508, 509, 510, 511, 512, 513,514, 515, 516, 517, 518, 519, 520, 521, 522, 523, 524, 525,526, 527, 528, 529, 530, 531, 532, 533, 534, 535, 536, 537,538, 539, 540, 541, 542, 543, 544, 545, 546, 547, 548: n = A,T,C or G
  misc_feature 549, 550, 551: n = A,T,C or G
actccatgccatgcttgtttctcagtcttggttgtgttagccctctccctgctcatgccccagttccgtgagcagcagcttgagttttccttaatgcctgggattggcaaccctggtaacaaggaccattgaacactctattaagagctaggattaacaatggcatcttgctatagctgcttaggcttcaggaagggtgtggaactaaaagcattttccctcccttgagcagttccttgtctcagtcccctgactgctccctatgctagattcagggattgagagggtcaaaatgctctcccaagatctagattgtatgattccccagtgagaaaatggaccacagaaaagccattgcttactttctcctgtattatagagtcactcctgatttccagctggtcttggtcacacaggctggctgtttttcttttcctttctagtttttgcagtctcctgtcacttctgttaaactcttgtgttctctcttggataatgtacnnnnnnnnnnnnnnnnnnnnnnnnnnnnnnnnnnnnnnnnnnnnnnnnnn

SEQ ID NO: 10578 - DNA, 531 bp, Homo sapiens
  misc_feature 1, 2, 3, 4, 5, 6: n = A,T,C or G
nnnnnngtttcaaaaaattctttgaattcctcatgagtttcttgtatgcaggatgtaattaggtcatttttaaaatctattcagccagtctctatcttctaagtggaaactttaatccatttacattgaaggttattattgatatgtgaaggcttattcctgtcattttatttattgatttctggttgtgttgaatatcctttgttcctttctttctttctttttgtttttcactgtggtagggtggagcttaattgggcagacctgtcctcagggaccctggtggtgcatgtcaagcaaggctggctgtggtagtcaatgggccaggtgataaccaggtctctggtggtatgtcagatggggggccacagtggctgtactgtgaccatgttactggaggaggtgaagtagctttcagtggaagcctccataggcaggaagctagggacacaaactttgctaatgctttagccccagaggctacaacccagcacagcagcagctatgagcagtgaaatttacccttgaggt

SEQ ID NO: 10579 - DNA, 542 bp, Homo sapiens
  misc_feature 1: n = A,T,C or G
nagcggccgaggtacaacttgacagtttataaaaatgctaacctatatcaacatttttccccaccaaagtgttcccaagggcaaaggtaagtgaatacatgtttccatgcttgtgtcaggggcacacagcaagggaaggcagaatgggcatgacctagattagatcccagaagccttcaaattccttataagacttgggactgcatcttaaaataatattgtttttttttattctttgataataaaagaatggaaccaaatcctggttgtctgattctttgcccagtgctctttcttatgtctaacactgcctcgtcttatgaataactctgacattacagagaaagactattgtttgttcagttcaacactcaattccataggtgctagcaattatgaaaaaggctgttagtatccagcggggaaagcaaaggatccgcaggtggtaacaccctactgagagcagagggggatgaatacataaaattttgcagaagcacgttgggaattccgccatcttcacatagcacccctgcaagcta

SEQ ID NO: 10580 - DNA, 1781 bp, Homo sapiens
  misc_feature 1, 1771, 1772, 1773, 1774, 1775, 1776, 1777, 1778, 1779,1780, 1781: n = A,T,C or G
nagggagtcgacccacgcatccgcaaaaccttaatcagtagaccttctagagtggaaaaagagtagaaaatagttcataggtctgttttgggtaggctgttccattccattatatcttagagatttcagcctttatgtgttactcatttttgctaaatatagtggaaattatgtaactatgaatcagcttaaaaattctaagtaatcactgaaaatgagtttttaaaaattaaagtgattaaaaagaactctgaaattaatatactttacttaatgatttattccatgatgttgtcaacaacagtactagaaatgtggcctctttccatcggaataaggtattaactgggaatgtgattatgccctgacagcttccccctattaatgtaaggaatagaaaactggggaacttcacacttaattagataaattgggatatgcaatataaggcttttctttatctgtgggattttacaaaaactcgactttgcagtcagttgtatattgtttgctttagttgattatatttgaaatgggtgattggaatgcgtctcgtgcctaggataataatgtgctatgatccgaagtattacatccttaagaaaaaaccaaaacaactctatttggcagttgcagaattgtagaccatgtgaatacctagcacatgcccagagacagaagcgttgcaataaccttgccacagaacaaaaaggtcattctatctttactctgatgtagtctgatgctgtagaagcatggagtgaaatacttatttttatattaagtcagacttcaggatttattttagccttcctttttgagaagctttctaagccctcagcattaagcagcatttttcctcatcgcacacggatctgagcaggtgaccgcggctgggataggtgctgttgtgttgtgtgcaggtgggctggccagccgttgggtgtgtgtttttcctagagtaagaagcactccaggctgagatgagagctgttgaaatgagtaacatttccgtctcctgtgatacgcgctgctgttgcttctttcaaatgatcagatttacattcttttaatgggtcctttaaaaatgtaatcgagtgagaaggacttctaaagatttttctttggcctggatacacacgaggggattggaaattactaattcatgaaaatgaaaatgtgggcttcttttaaggaaaaattccctttgaacattgacagaagtgggcgtagggaaggggaagattttgcctggattctccacttaactcttgtcaccactggagcatcctgactccctagacacaagtgatggaagttattttgtttccactctaaacactgtctcagggggacattgatgggatggtggagggtgtgtttcattgtgacaacagcatctttggtggggaatttgctgttggtgaaaacccagtgctttctctgagcatgggtgattgataagggcctgacatgctccttcatttggaaaatggtattaatagaattggtttcccagtgaatagtgccttttacccaagactcataaccaaatattttcacaaagatgttatatccccatgcatgagcattcattttgagatgttcattataatagagtttaagtatgaatgtgttttaaaaatgattttaaaatcatctgcaaaaaaatgttgtgtttcaaatggacagtgtctgggttttgtatagtcatcataaaaatgtctataattgtactgtttgctaataaacctacctgctttcagaaaannnnnnnnnnn

SEQ ID NO: 10581 - DNA, 2640 bp, Homo sapiens
  misc_feature 1, 2634, 2635, 2636, 2637, 2638, 2639, 2640: n = A,T,C or G
ngtactgatctaaccaagatattttgtttttctcatccaccagtcactttctcagtcctttctgtatcccttgcaatttgaacaaagcttggtgaatagtgtgcacacaaaaagcacactaggtgaaagacagatacataaaaagggtaaagtcaggatattttaacaaacctatcaagctctaaatataagcctccttggtagttttctctttaaccctctctccactgttggatgaaatttgctgcattcaattccagttcccaccccaacttccttcttaacacaaggtcagggttaagccttcggtgctttaatccagaggaaaattacttattttaaaaagcagtgaaaaacaccgcattcctttggcacaggatgaagaccagctcagctcttcagttgttgatcattgtctattgttctccaaacagtaaaccagtatttcacactgagattgtcggctgcgggtatattccaattccccgtctcctcatgaatatgaagtgaagggctctgaccctggaagtggttctaagcagggcaaaatggggtctcggaagtgtggaggctgcctaagttgtttgctgattccgcttgcactttggagtataatcgtgaacatattattgtatttcccgaatgggcaaacttcctatgcatccagcaataaactcaccaactacgtgtggtattttgaaggaatctgtttctcaggcatcatgatgcttatagtaacaacagttcttctggtactggagaataataacaactataaatgttgccagagtgaaaactgcagcaaaaaatatgtgacactgctgtcaattatcttttcttccctcggaattgctttttctggatactgcctggtcatctctgccttgggtcttgtccaagggccatattgccgcacccttgatggctgggagtatgcttttgaaggcactgctggacgtttccttacagattctagcatatggattcagtgcctggaacctgcacatgttgtggagtggaacatcattttattttccattctcataaccctcagtgggcttcaagtgatcatctgcctcatcagagtagtcatgcaactatccaagatactgtgtggaagctattcagtgatcttccagcctggaatcatttgaataaggacaaaatgttttccattatcaagacatggccatctatctaaatattatatcaactgtgtagacttgagggcaatattgaaatgatggtgctttctgcatttggtgtttatttgtaaaaaatttgcagtcctcactgcacatgcaagtataccacccttccatttagtatgttttttaagtaatatgcatcagaaacttcagaaatacttctgccctttgatcaaacaaatccatttccaagaatctgtactagggaagtaaataagaatatgagagaaacctttatgcaaatatgtatattgcaacattatttaatattctggaaaattggaaacaccccaaaattctaaactcagaggaaggattaagtaaagagtggtacatactgtaaatgttttctgatattaaaaaaaaaattaaataaaaaataaagagtactacatggttgtaaaattacagtcattacaaatgatgtttttaaaattatgaataatgctacatcaaaaagcaggttacaaattcatgtttactatataactatttaaagcaaatgaaacactaatagtcaaagtttaggatgaaaactaaatctaaaaggaaatataacaaaatgccaattatgcttggtttggggcattgatgacccttcttcccacttttctatattttccaagatttctttattgaatatgttttactataaatattttctaaactcatattttcactattaaaatttttttatttttccaaactttaaggcatatgctctttccacattcctcaacattatttgcaaacatcatgaaatggacacttccatcaacattcaatgaggaaagtagtgatatagatgagccaaaaagagttttatataaacttatacaatctaaactcttgctcttcctttctgactcctgagggtgagtgtgatggactagaagaggtagccttaaaataagtgagcagctagggaacatgctcaatgggcaagagaaaatgaccactgaccagtcaatacctgtgtcagggggagttaccagtacctatatttatttttaaagtaattaaaaagtagaacacttacaaattttccacctatacatgccatgtcttcctcggggacagtagccacatcttatatatttcccaccatgcataggacccagcacacagtgaagccagtaggcactcagtgtgaatgctcataccaggttttctgcttcctgtagttaccctgctgagcactgttccatcacaggtgcactgggctcaacacttctggcatttcccatttgtctctccatggaaactgtcaagcaatggtctgtcacacctgttctgtggcaaaggcagggagtaggtgggggatacaggaaaagaaatctttcctggatctggtgtgcaaaggcccttaagctctgttacagcttggggaacacgtttggaacagctttacccgattacgtatgcnnnnnnn

SEQ ID NO: 10582 - DNA, 560 bp, Homo sapiens
cagcacataatgcagtatacgcccaattaaatttgagactcacagagtttagagtggccaccttgtccaacctctcctattagagatgaagagacttccagaggtcataccgcaagttgacagcagagatgcagtaggaactgaagtgaggcagaatttgaggattcaggtccatggggaagatagtttgctgaatgaaggagcagtgctttagggaacaattttaatggaatttaaagacagaataattcagaactggatacatagtagataccaactgcaccttgtgggaataattctctggatagtatctggcagtcttcagatactttgctgttatcctggctaaaccacataagttgttgtgtgttggttcacaatctgatcttgcagatgtaagttagaatcttgacagttttttttgagagagtttaagtcctaagattactgctttagaacatgaaaatcaaacaagactaattttaagcattaactctttggctcgttggcaaagaagggtcacataggatctgaaatttgtgcactgtgcagtttaacgt

SEQ ID NO: 10583 - DNA, 423 bp, Homo sapiens
ttcacggccgaagcccgattcgcggtaaccgccgaagccgcaagccgcgtcgaactgattggcgctgttgatccacaccacgccagccttgatggcgggagcgatgtccagcgcgaggctgatcgactcggtccacacgctggcggccaggccgtacaccgtgttgttcgccagctgcaccgcttcaggcggcgtgcggaagctcatggccaccagcacggggccgaagatttcagcctgtgccacggcggccgaggtcgacgcgcccgtgatcagggtcggcgggaaccacgagccgtcagccggcagttcgcacgccggctgccatacgtcgcaaccttcggcacgggcagagtcgaccagcgcggcgatgcgctggcgctgcacggggtcaaccagcgcgcccacgtccatcgatttgtc

SEQ ID NO: 10584 - DNA, 402 bp, Homo sapiens
  misc_feature 401, 402: n = A,T,C or G
acgcgggggccctcaacttctgagagcttaaggtatttgttcatgttaggcaggtaatgtctataaaccaaaagctgccacatactatctctctgctcaacactttactggatactggaggatttaagggaaggaaaaaagtgaccttttttgcctttttaagagcttgtaatcggtaaaggagataaaactcacacaaaggtcagggtatattttgtgctaagcatatgacgtagacatttaagtgctgccgtaatgcagaagaggaagaagtggtgtgatctagagtaacataggttttgttttgttttgtttttgatattttctttttctttttctttttctttttctttatctagacagagtctcactctgtcgcgcaggctggagtgcagtggcann

SEQ ID NO: 10585 - DNA, 640 bp, Homo sapiens
  misc_feature 1, 640: n = A,T,C or G
natcatggagtactgcaagaggcaagagattacatttttcttatttctactactttttgttgcctaacacgtttagctggtgggacaggttctaagtatttgctaaatattgttctcattattttgaacatgtaaaagatgactgcattcttatatatttcccttttaagtttgaaaagtgaactactttctttatataaaaattcatttgcctattgtctcagaatatcacatataactggtgcactggacataagggatacgggttcccacttgtggctttgtctataaatagctaccaattaataagcctaattaataggtttggtctataaatcttagagtgatgagtatcagttcaacatcagtaaagtgagtggcttgaaacagtcatacagaaaaaatggaggagacctgagactgtttcatattttctttttgactttcaattgttgagtttttttcactcttgttctaggtaaagattcttttcttgtatatcccgatcaggaatcatagcttctcaaatgtttacccattctagaaaattcttggccatcgggcatggtggcttacgcctgtaatcccagcaccttggggagccgaggcaggcagatcacaagtcagagatcgagaccan

SEQ ID NO: 10586 - DNA, 6169 bp, Homo sapiens
  misc_feature 1, 2, 3, 4, 5: n = A,T,C or G
nnnnncgccggcaatcgagtggcttcctggccatggagaggagatctggacccgaggacgccagggactcctctccgtctccctggaccgctgtgtaggcacctgagttaacggacgctaagcggggtaggggaagtaacagtgtatcatgtatgccactgattccaggggacactcccctgctttcctccaacctcagaatggaaatagtcgtcacccatctggctatgttccagggaaggttgtcccattgcgtccccctcctcctccaaagagtcaagcttcagccaaatttacctccatcagacgagaagaccgggcaaccttcgcattctcacctgaagaacagcaagcccagagagaaagtcaaaagcaaaagagacacaaaaatactttcatttgttttgctattactagtttctcattttttattgcacttgcaatcattttaggaatatcctcaaaatatgctccagatgaaaattgcccagatcaaaatcctcgtctcaggaattgggatccaggacaagattctgcaaagcaagttgttatcaaggagggagatatgctccgtctgacctcagacgccaccgtgcattctatagtcattcaggatggaggactgcttgtatttggggacaataaagatggatccagaaatattactttgaggactcattacatcctgatccaggatggtggggcgcttcatattggagcagaaaaatgccgctataaatccaaagcgacaattaccttgtatggcaagtcagatgaaggtgaaagtatgccaacatttggcaaaaagtttattggtgtggaagctggcgggacactggagttacatggggcacggaaggcatcgtggacgttgttggcaaggaccctgaattcctcaggcttgccctttgggtcctatacctttgaaaaggacttttcccggggcctcaatgtgagggtcattgaccaagacacggccaaaattttggaaagtgagagatttgatacccatgaataccgcaatgagagcaggcggcttcaggagtttctgagattccaggatccaggtcggattgttgccatagctgtcggggattcagccgctaaaagtctcttacaaggaaccatccagatgatccaggaacggttgggaagtgaactgatccaaggactgggctacaggcaagcttgggctttagttggtgtcattgatggtggaagcacttcttgcaatgaatccgtgagaaactatgaaaatcatagcagtggcgggaaggctcttgcccaaagagaattttatactgtggatggccagaagttctctgtgacagcttatagtgaatggattgaaggcgtttctctttcaggattccgggtagaggttgtagatggagtgaagctaaatttgctagatgatgttagtagttggaaacctggagaccagattgtggtcgcaagcacagactattccatgtaccaagcagaggagttcactcttcttccctgttctgaatgcagccattttcaggtcaaagtcaaagaaacccctcagttcctgcacatgggtgagatcatagacggtgtagacatgagagctgaggttggaattcttacccggaatattgtgatccaaggagaagtggaggactcatgctacgcagaaaatcagtgccaattttttgattatgatacctttgggggacacattatgataatgaaaaattttacttcagtccatctttcttatgtggaattgaaacacatgggtcagcagcagatggggcgataccctgttcattttcacctgtgtggtgacgtggattataaaggaggatacagacatgcaacatttgtggacggcctgtctattcatcacagcttctcaaggtgcatcactgtgcatgggacaaatggcttgctaataaaagacaccattgggtttgacacactaggtcattgtttctttttggaagatggtattgaacagaggaatactttgttccacaatctgggactcctcaccaagccgggtactctcctgcccaccgataggaacaactccatgtgtaccaccatgcgagataaagtgtttggaaattacattcctgtgcctgctactgactgtatggctgtttcaactttctggattgctcatcccaacaataatctgattaataatgcagctgcaggctcacaggatgctggaatatggtatttattccacaaggaaccaactggggaatccagtggattgcagctcttggcaaaaccagaactcactccattgggtatattttataacaacagggtccattcaaattttaaggctggcttatttattgacaaaggtgtcaaaacaaccaactctagtgctgctgacccaagggaatacctctgtttggacaatagtgcaagatttcgacctcatcaggatgcaaaccccgaaaaaccacgtgttgctgctctaattgacaggctcattgcttttaaaaataatgataatggagcttgggtcagaggaggagatattatcgttcaaaattcagcatttgcagataatggaataggactgacctttgccagtgatggaagcttcccaagtgatgaaggttccagccaagaggtatctgaatctctctttgttggggagagcaggaattacggctttcagggtggtcagaacaagtatgtaggcactggaggaatagaccagaagcctcgaacattacccaggaacaggacgttcccaattagaggctttcagatttatgatgggcccattcatctcacaaggagcactttcaaaaaatatgtgccaactccagataggtacagcagtgcaattggcttcctcatgaagaattcctggcagataacccccaggaataatatctccctcgtgaagtttggtccacatgtctctctgaatgtcttttttggaaagcctggtccctggtttgaagattgtgagatggatggtgataagaactccatattccatgacattgatggctctgtgacaggatacaaggatgcttatgtgggaagaatggacaactacctgatccgccatccaagctgtgtaaatgtgtctaagtggaatgcagtgatctgcagtgggacctatgcacaggtctatgtacagacatggagcactcagaatctttctatgaccattacacgagatgagtatccgtccaaccctatggtgctccgaggtattaatcagaaggctgcctttccacagtaccagcctgtcgtcatgctggagaagggttataccatccactggaatgggccggcaccacggactacatttctatacctcgtcaacttcaacaagaatgactggattcgagttggcctttgctatccatcaaacacaagttttcaagttacctttggctatttgcagcggcagaatggctcattatccaaaatcgaagaatatgagcctgtgcattcactggaagaactgcaaagaaagcaatccgagaggaaattctattttgactccagcacggggttactgtttttgtatctcaaagccaaaagccacaggcatggccacagttactgttcatctcagggatgtgaaagagtcaagatccaagcagccacagactcaaaggacatcagtaactgcatggccaaagcatacccacagtactacagaaagccgtcagtggtcaagcggatgccggccatgctcactggactctgtcaaggctgtggcactcggcaggtggtgtttactagtgatcctcataaaagttacctccctgtgcaattccagtcacctgataaagcagaaacccagcgtggagacccgtctgttatttctgtcaatggcactgactttaccttccgaagtgcaggcgtcctcctccttgttgtggatccgtgcagcgttccattccgcttgacggaaaaaacggtttttcctcttgctgatgtcagtcgcattgaagagtatttaaaaacaggcatccctccaaggtccattgttctgttgagcacaagaggagaaataaagcagttaaacatttcacacttactagtacctctgggattagccaaaccagctcatctttatgacaaagggagtaccatatttttgggattcagtggaaactttaaaccatcatggactaagctatttaccagtcctgctggacagggccttggggtgcttgaacaattcatacctttgcagctggacgaatatggttgtcccagagccaccactgtccgcagaagagacctggaactgctaaagcaagcttcaaaagcacattagagactaactgtaacttaagtgctgggggaaaaaaaatgtgaactaacttatttaatttatggcattttaaaatgacactgttaacccaacggaaccattttccagtttgatacagaatggggagaaaagaaagcgtttgaaattattgcttggataccagcttcatgcaccttctagttgtacaaaatgttaaagacgttgtttgtatttgtaaggctggtgtattcagagagcagatctcttattcctcactttccacccccgtattttgtaatgaccatgagcaatgtttttactttttgtataatggggtggggtggagtgggggcttctgagagtcagcctgaggtctttagaggaccagctattgtagcaccttggatacttgaagtttaatgctcagttgggtcgggtggcagttgacttggtggctggcatgttcagcagtgcctggggccctgtttctgggcagcctttgaggattttctatgatattgaatgacagttttaagtggcaactcaggcccagctcatgcccttttttgcctggacatgtgctatttttattcacttatatatcaattacttgtaagggttaaactttcaaacaggaagtatattgggacaaaagggctcttggggattagatatccctttaatctgtgaccattgggcaaaaaattttcctgcagcaaaagtctgaggctgttgggaccatttttgcagctttaatccttagcctcttttgactgtatatttgtgtttaaaatgcagagctcaactgaatatttccttttttgttttgttttgttttgttttaagaagtaggttgttttcctgaaccgtaaacttgtatcattttaacttgcacaaaggaagtctgttcttggtattgctcttgcacttgggttttttgttattgttttgtgtggattttttaaagcttttctgttcaccctcctgccaggaaaatcccagaaagcttaatgataccccaaaatgattacacccagggaggaaaaaaaggagcgctttctagggtcagaatcgtggagagaatactcagaaatgaacctctttaaagccttgcaggaatgagtcactcttacttaatgaaatgttaaagccaattaaaaagcatgctgtgatgcccagcttccctttccacagggtgcatgcgtctcctgctggtgaatcacatgcggcaagaggcaactggctccacagcctgggatgctgccgtaccaagaggaaagaagcagcaaaatgcctttacgttgttctaaacccccgacgcataaagtgtagaggagggatggccaagggtgggtggtagaaagtgtgttcaggctgacactggcaatgagtacagataatttcactttcctcttccaggggcaaaggctgatggcctctacctttgtatccaggagaaactgcagagcagccctgtgactttacaaaatatgctacctcaaagtgctaccgataaacctttctaattgtaagtgcccttactaagggcacatgtcttaatcaaagttagttttttgttttctggtttgtttttttttttttgtatattgatgaatgagatcttacctattaaatatattattggattatggttcctgaaggtcattagagtgtgtgtgtgtgtgtgtgtgtgtgtgtgttttatgacttaaatatctttacgtgtgttttttagagcttggttctttaaagatttggagaagatatgtaaattaccaaggcacttggtttttctgttttatatactaataatcagggcctaagttaaataaaaatatgtgtgcatgtattttaaaaaaaaaaaaaaaaaaaattgcggccgcaagcttattc

SEQ ID NO: 10587 - DNA, 1381 bp, Homo sapiens
gcgtccgatttcaggaactcttagtttagatggtaacaaagagactttaggagcaaagttaatatccgtgtgtgactagcttaaagacagtgtactccacaagccagaagattagtctccttccctgtagcctcatctagcttacttattcagactttctgttcacaaggggtttgttatcttcatgaaattttaatatgtgtaagttagaaatgaaattagaaaaagaggttcttgctgtaaacactgggcagagtagctcagaagaagactgtggttcttggatgccctcatgcctttgttccagtgcaggtgcctagtggagggtgcagtgctcttgcaacatagaaggacccatcttgcaggagctgatggcttagctcctgggaacgggaggagaggaagggcttgtggacccaacctctgttgaattgactggctttttgagagaccactgaaactctcccctccccactccaccccccatctgtgctagcggaagtctatctagaaagaaaaaaggagaaagtgtttaaatacgtgatggacgaatgccccctgcctctggtatactttttcttaacagaaaaggtcattctaactttgcataatcttcaattataatgtagaagacttttccaccttcctaaataattaaaagcaaactaatgatctctaaatatttgccttcctggttcttttgaaaatccttttgtctcaaataccacttcagtgctgtgtgcatgaatagtctgccagctgacttgtgctatggaagatgtttacccctctgtatacacttaacccatctcctgccatttacattttagctgttttagagaactccagttaattcagaaaatgcttaactttttctgtgttcatgattataaatctaattttgttttatggttttaggtctcgtcagcctatctcggcccctctcttttcatgtcctgacaaaaacaaggttaatttcatcccaaccggatcagctttctgtcctgtaaaacttctaggccccctcttacctgcttctgaccttatgctcaagaactctcctaactctggccagagctcagctttggcaactctgaccgttgagcagctctcatcccgggtttcctttacgtctctttctgatgacaccagcacagcgggctccatggaggcctctgtccagcagccatcccagcagcagcagctcctgcaggaactgcagggtgaggaccacatctctgctcagaactatgtgatcatctaaaaaagggggagctggcctccccctgtgttccatggattcggaacaagatttcagacatctgcatgagtgacaaactttctgaacaccaccaccaccaataatacttatcagcatcat

SEQ ID NO: 10588 - DNA, 494 bp, Homo sapiens
  misc_feature 1, 2, 3, 4, 5, 6, 7, 8, 9, 468, 494: n = A,T,C or G
nnnnnnnnncaggtacatctcagatgaagctgagctatcaagtgacttggttcaagacctatctttcagactgtctttccttctactatgcagatcaacatcctatgtaagctgtgaccccaggcagtaattagttttcacaatccttcttcaagattgagggacccttttcccagactatgttttcatgaagtaagctggctggcctttgtctcccaacatttatggaaagcttttggtgcctgatgtatacttgatgtcaaactctttcccatttttgtgtccctctggacacagaagtcagtaggtccaagacttcggtgtccttttccttctctgagctcagtttttttttgttcacagaaatgtttatttgttcatatatgccagggaatttacctacaaaagttgcatatctaactcaactattattttatggaagatttttactttgaggtccatttcttnccatggcttggctttagaatatcaan

SEQ ID NO: 10589 - DNA, 712 bp, Homo sapiens
  misc_feature 1: n = A,T,C or G
nctgcaccgcggtggccgccgacggtgagccgttgcttgttctcaaagagccatttcttgaacgacccgttccattggcgcaccatctcggtgtgtgaagtcgaccgacggaacaagaccaagcctgtcgaccccgccatgtgccagctccactctggagcaagctcaacttgccacccgatgagcttggccaagttctgtgcttcaataaagctcggcacactaccatcttcgctcaggtagggcattgacacccgcgcggtgcaatattcgatgcgcttcccagactccagtggcagataatcatagtagtactgcatgtggtcttggcctggaaactcgatattggctgctgagccccaagccggcaggcacgctttgtaatcgacacccatttgcagctgcgcaacgactccttttccgctccccggggcctcgatatggcccaacccgaaggccgccccgaacgatatggccaggcgccggcgcaagcgtgcgcgctcttgcgctgcgctcggtgccgtactgtcgagaagctcaagcaggcgtgcttggtccgcgcggtagctctcgggcacgccgggcccaaggttgcctacgtgcagggtggcgatattcacggtggaatcgacgtcgtagcctagctgctgcaggcgcgcgaaaaacgcacttggccttagcgtaagcagggtgttagggcttgccgtttgct

SEQ ID NO: 10590 - DNA, 1039 bp, Homo sapiens
  misc_feature 1, 2, 3, 1035, 1036, 1037, 1038, 1039: n = A,T,C or G
nnnctgttgtctcatgagcgcatgtgttcctataatttcatgctgtccgtgtgtgtgtcgcctgttcttatctcttttctgtggtctcttacaaagatggtgttctaacgtggcccctcgagattttttgcgcgcccctctttttcttttctaagggcgacagaatctgaccgtgggtaataaatgtgtctcctgtgggttctcctgtgaagccccctccttccatagagagtccgccattattctcgtgctcttaggattccgggagaaaaatagtgctcgattttacaaaaagacagtgttcattgactgagtgcttccgggacctcggcttctacaggctcatgatggcttgaagatgaacggatggttcagctgaaacactaatttcaaatgtttcaaattatagcagtatcttcaaagctgtcattaattgtacagaggaaaagattagctggtgtcctgcgtcccatctttccccttaggctccaaccttgctctccctggagatggtaccttagcaaatagatagtttattcaccaactataatcaccttaacaataaaagctctcttttcgagaacactgcgtgtcaggcacttcatgaaaattatactaaacactttatgaaaattatctctagctgcaaattcccgcggatgctatgcaaattaggtatagctacactttgctgatggggaaagtatagcttagagaaggtagacgaactgcccaaggccagagctatgtggcagagatggaattcaaatgcaagtataaataatagaataattttcagttggaaatttcaaaaagctgttctagttacattgatgttaaaatctgttattcatttaagatgaagatggcaaggggagataaaattacagggaagtggtgaggatagagctgaggaaagaaacttggaatgagattttaaaaagaaatctggaaagtttgctagggatgatagtcagaaaccttagttgctgctttagattttttgtttaaagaggtatttttccttctatctcnnnnn

SEQ ID NO: 10591 - DNA, 714 bp, Homo sapiens
  misc_feature 1, 2, 713, 714: n = A,T,C or G
nnaattcacccctcctgtctagattccttggctatttgaaacagtcccaggtttactctgaactctccacccaggatcctattccacatgactgttctctgtgccatctccccaggttttcctttcagatatttgtgtggcctggttaatgcctcttgaatgttcattgtactttggcatttatgtaagaattcaagattttgttctatttagttcaggccttagtgtacagtcaggtatttggccaaatgtattgtacatgacattattgtagctgttgtttacattacaggaatacttcggatataccaatgcatgtgaagaatgggtttcccctcagtttcacataaacttagaaatgtctcaactgacatttctttttcttttttttaatttttaattctttttttttttttgagacagtttcgctctgtcgcccaggctagagtgcagtggtgtgatctcagctcactgcaagctccgcctccagtgttcaggccattctcctgcctcagcctcccaagtagctgggactacaggtgcccgccaccacgctcagctaattttttgtatttttagtagagacggggtttcaccatgttagccaggatggtctccatctcctgaccctgtgaaccacccgccttgaccttccaaagtgctgggattacaggggtgagccgccgcgcccggctcaactgacatttctaaann

SEQ ID NO: 10592 - DNA, 557 bp, Homo sapiens
  misc_feature 429, 430, 431, 432, 433, 434, 435, 436, 437, 438, 439, 440,441: n = A,T,C or G
acaatcattacataatcatgacattttaattcttaattacaatgcctttccaactatataaaaatatgtctagtgacacatattttggaaagctttcttggaaaaacatccagagattgtgttcatcactatctatataaatgagcttatactgaaccttaaatatgtttattcagcctaacaatcagaaaaagaaaacgttttttaacagtataaagttcagatgagtccacttgtcttggaattttattttgattttaattagaagaaagactgccattagaattgttttctaatgaaatctttataaattctctgggcagtgccctgtatctttattagaaagacttcttatttttaacaattttatttggaagaagttctactcatttgcatcagttcatcgtctacataatttgtgtgtgtgtnnnnnnnnnnnnntttacaactttgactctttgaaactagaatagaatcaggtaaaacatctaagatcagtgtgccagtaattggcctgaatcatcgggcaccatgatgggtttggccgccttcaacgt

SEQ ID NO: 10593 - DNA, 524 bp, Homo sapiens
  misc_feature 498, 499, 500, 501, 502, 503, 504, 505, 506, 507, 508, 509,510, 511, 512, 513, 514, 515, 516, 517, 518, 519, 520, 521,522, 523, 524: n = A,T,C or G
actcagtaacttcctgggaccccttttgcctatcttctgaatagaaacatagagcttcttgcagagtattagctcctggctttattgcttgctcatttctacataactgggtcaaccctggggcaccacagtgacagaaaaaagaaagaaaaataatggggtccccaccctgtcactctttggagtttatggttcccttttcttagttcttcttgtcaaaaagataggtttttccttcaggattttagatcagctatcaccgccacattgcagctgtatgattggggtggcccttgacacaggaccaaaagagagcaacaacaacagcatcaacaacaaccatagtgatcctaccccctactcctggtgacggcttcctggggctccttatccccattcttgggacagcttatctcagattttctctgctcacccctgctatgcagttccaaatttgatatttggaactggtagtatcttcagatcaagttgagagannnnnnnnnnnnnnnnnnnnnnnnnnn

SEQ ID NO: 10594 - DNA, 916 bp, Homo sapiens
  misc_feature 1, 607: n = A,T,C or G
ncgcgtccggtttaaaatgcccaaatattcaactaggaggaaatactgaccccataaacctaaatctcacacacggttttggacgtttaaacgaatggatttaacagccttttggaattcagcctgtttgtcatgactgtccaaagtatgataatcacatgagagtgctcgttgctacggatgtcatttgactcatcagagaaaatctgtctaaaagaaaatatccatgtgaccaaatccatttcattattgaatggcttgatggatttcctttactctgattcataccaaagctgtccttctcaaccaaagcaagaaaggatcctgcatgagtcaatcccagaatgcaatttttacatcaccaacaggtgaagaaaacctcatgaatagcaatcacagagactcggagagcatcactgatgtctgctccaatgaggatctcctgaagttggctggtgagtctgctagaagaacaactccacagtataggctaaaagtagacactctctttctatatgaaaaccaagactggactcagtctccacaccagcggcagcatgcatctgatgctctctctccagtccttgctgaagagactttccgttancatgattctaggcacagacagggtggagcagatgaccaaaacttacaatgacatcgacatggttacacatctcctggcagagagggatcgtgatctggaactcgctgctcgaattggacaagctctcttaaagcggaaccatatcttatctgagcagaacgaatccctggaggagcaattgggacaagcctttgatcaagtaagcctttgatcaaatgtctgcagtatgaaataattaggttttatgcaattgaaaatttattttcctaggtgtccctgaaatgatggcaatagataaataacaccagt

SEQ ID NO: 10595 - DNA, 255 bp, Homo sapiens
atagggcgaattggagctccacacgcggtggcggccgaggtacactgggtgcaataaagtgcatctttaaagtgttttgagtttggacacagacccgtgaaaccaacaccataatcaagattcatgatgaatatgttccacgtagttttcatttaaatccctctcagtagcatatttgtctgtttaagagccatttgcattttttccataaattgcttgttcctctccccctgcccgcccccgcgtacctgcccg

SEQ ID NO: 10596 - DNA, 767 bp, Homo sapiens
  misc_feature 747, 748, 749, 750, 751, 752, 753, 754, 755, 756, 757, 758,759, 760, 761, 762, 763, 764, 765, 766, 767: n = A,T,C or G
acagtgtcagggcttatgctaccagactaggtggaggagatgacatgcagattcaggagaggatccagggctcatgaggacgtggaggttttgttctaagcattgggtttttgtttggctttttctgtgtaaacttctctttcaccttccattcagaatggctccaaattctttcttcaatagtggaagtattattgttagtcaggtttttcaatacttaatagtggtctgtatttgtgggtgcatgtggtattttggtgcatgcataccatgtggaattatcagaccagggcagccgggacatcagtcaccccagacatccaccccttctttatgttgggaacatttcacttcctctcttccagcaattttgaacaatgcaacaaactactgttagctttaaacacccaactgtgctatcaaacagtagatcttacttcactaatgtgtttttatgcccacgcagtctccctggataaaactttgtctaagtgtttcaggaggctgctcaaaggaaatgtggcttgttttgggaggtctgaaatgttttcagatttgctgtcttgaaaaaaaaaaaacagacatatgggatttcttcatgcaaaaatcccatcacatgtggctgttaagatcaagaagacagtttacctgcaggatatattttttccttttcttcgtacctaccccggaataacttttcaggtcctctcacagaatgaagcagtttccttaggaactaaaaccgannnnnnnnnnnnnnnnnnnnn

SEQ ID NO: 10597 - DNA, 236 bp, Homo sapiens
  misc_feature 236: n = A,T,C or G
ccgggcaggtactttggcacatgctggtagccaggagtctgggcctgaaatttggtcctgactccaccctcatctctctgcatgacttctctgggagatacagcctctccattttacactgagagaactaaatgagctctaaagctgccctgacagctgacagtcaaggttagcatatttctgtgtggctctggcaaaaggacgtcggctgcagcatggatgtagagggcactagn

SEQ ID NO: 10598 - DNA, 898 bp, Homo sapiens
  misc_feature 1, 2, 3, 4, 5, 6, 7, 8, 9, 10, 11, 12, 13, 14, 15, 16, 17: n = A,T,C or G
nnnnnnnnnnnnnnnnnaatctaatgaacttgaatgtgtatgctgggttcttctgtcaagttggctgctatcatttttccagaagctggatgactctccgaggtgggcaaaggaacacgtacccatgctcccacctcatctacccataaaaggctgggcagggccaggcttctctctggggtgtttgagctcagagagagagaagtaccggttgatgtaagcacagggatggtggggacagggtgaccaaagtgaactgggcacgagatgagtagctggtatatagtgacttggaaggcaaggtgcttgaaatttcctggaaaatctctgcaagtgcacagtagaaactattatcattggttacgtgcttcaagaggactgggcagatgggggggcaggaataagagagccactattcacttgacaaattcttggacattttgatttctgagccatatggatgtgtgtcctatcaaaaagaataagtgaaaatgttcaatagtaagagaacactttgtaaatctctggctgttgctctttgtgattagcctctcagcactcttatttggaataatcagaaaaatacaactatctaaattttgggaggagagtatacttgtggagatttgggaagaaagaaaataagtatggaagtttcccccaataataaaatgaaattcactggaagccatttcaaacatttagaaagttaaccagaaaaatagaaaggtggccgggcgcagtggctcacgcctgtaatcccaccactttgggaggctgaggcatgagaattattggaactggggaggcggaggctgcagtgggctgagattgtgccactgcactccagcctgggcaacagaaaccctgtctcaaaaaaaaaaaaaaagaaaagagt

SEQ ID NO: 10599 - DNA, 1137 bp, Homo sapiens
  misc_feature 1, 2, 3, 4, 5, 6: n = A,T,C or G
nnnnnnagccctcttaccatccaagcaaacaccggaaattgctatctttctctctgcttaataatttttaaagaccaaaaaagtgacatttacactttttagaaacacaatgactgcacggttggtgtgggtttactgcttaataacaatcattgagtcaaacagttgagagacaatggaattcaggacttggttagcctctgagagagagagagagagaatgtgtattatgtgcttgatagaaatacactgaacaacagtcattctttaaggcaaagtgctgactctaataaggccccctcttttggggcaagggagggtgagcagtcgctcaagttagtgagccctgtacattctaatcccagtttacatttaaaacacttcaaatggagccactaggactcaaagttgctaaatacacccatgccctcttatcgccttccactgggggtggttcttcggtattttaagtcttggaagttaatttttgaggaaaaaaaagtaatagacatgtgacaaaaacaggaagaagggacacagttcaactgggttgtagctctaatctcactttatcagctgcttgaaagagggaaatgaaggacagagcggtaggaagtctgcacacaccaacctcatggagaccagctcagcccccaatgcagtcaagctacctaacctcctggaaacataaagatcggcgtgttacttggagattggagtgtatcagcttgaacacacccaccagaagctagcatgacaaccagttcagtggaaaggcagccccagcatggctcaatacctagggagtttcctgacagtacaagatcttcacccatcaccacattcagacacagctcctatggcagtttccaagataacaaagaaaatttgccttcaaattggagatactccttcatttaataaattttgttgagcaaaatttattatacgccacaagttgtccagaagctaactgcgagtgagcaagatcaggcttactctctagtggggggaaaagaggagtgagcacgcatttggaatcaactgggaaatgtgctaaaatagaggaggtgtggggtgtgttcagagcacagaaagatgaagcctgaaccccggccacctacataatcaacttgt

SEQ ID NO: 10600 - DNA, 243 bp, Homo sapiens
acttgcttagtcagttctgtgggccagaggacactcatggggagagatcaaggttactttttgcaggtggggcattttgtaactgaataaaacccagtcagtaaaagtaagcaacatgcggaatctaggcaagtgttgcaatgtatgtgtgctcttgatctgaggaagaccatgcatttgactcagactagaaacctacaccacagaaatcccacccacaagcaatgctctattactgtaggt

SEQ ID NO: 10601 - DNA, 351 bp, Homo sapiens
actttatattacttacttgttcactaataaacttctggcattgcatgtttattattctaatttggattaataaatatgtcaatttattttataagtcaaccgatatgcttttttcagcttataattgtggctacttaggatcctctaagcagcatatcctaatctattcttaagattcacattgttatatgcttgacataactttacaaccatcaccatggagaaagagatctataatgtagacagattttaatttaatcataatatcatcacattttaattttatttgaacctacacagtgccatttaaataggtgacaagctaatattaaaattatgatggagttggga

SEQ ID NO: 10602 - DNA, 357 bp, Homo sapiens
  misc_feature 356, 357: n = A,T,C or G
acctgcacttcagaccctggctccatgtacacctgtgctccaaacctggctctgtggctactgcacaggtgccagcagctcaaacagtcaaacagtgccacccttgcaataaggaaacctacaagctagaccggatatcaagaaagattccttcagacatgacatcccctgtggaagaaaaagacattagggagtccctagcagcctttgtctttgaagatcccttactgctgctgtggatgcccacagccttgtttgttgaaaacccttgcaatcttcaccaattctgatctcagctgacaaagatgcacaggggagtttgccacaggcccttcccagacctagaactgccacann

SEQ ID NO: 10603 - DNA, 1023 bp, Homo sapiens
  misc_feature 1, 2, 3, 4, 5, 6, 7, 8, 9, 10, 11: n = A,T,C or G
nnnnnnnnnnnttttttttctttctcttttaactgggggaaatgacacaaactgacaagtatttatttagcctcattcccatcactcaccactgccacccagaaaagtgtcacctgagtatttattgcatgcagccccaacactaaagaaagatcagaaatatttgttcccgtggtggaaaataaagggctatttgcccacgtcgccaggcttcctctggaaagcatctgggaatcattccagaaattcaatttccaggtgtgtgtttctttaaggaaatattgtggagtagagaaggaacgcactgtgcaggtgccattggctgtgggcgttgctatggcagatcagccttattactgaatagcaaaggaaggagtcaccaggaaaacacaacatgaacaggcagagtgcacacgccgtggcctcgggaagccacaatcatgtggctgacatggttccagagtgtggcattagggagaccaacttctgagctgcagattcacagcatggccatgcaggcagggaagatgtgctctactccaggatcaaggagcaagcccatatttcctcttgattctgggactccctcttgagactgatttgctctaatgttagctcttgagagaactggggtccctgccttcttggggagcctgaaaagaagttttgctgtctgggcatcacagcatccagagtgtacaggagacaggtcagcagctgcggtcagcagaggcacacacgccagcccctggagatgggtggcttggcctgagccaaagctgggctggtttataaacagcacctgtgaaaagaagagggatgactccagtgggacattcctgaaccatgtgcacctattcacctaggagaaggaatggctggagttgcatctatctttctgtttatgaaatatgggcccaactccagcgacaacataatttttagaccatttagtggaataataaaagtcaaaagaggaaagagaacttacatggattgaacacccactgcatgcttagctct

SEQ ID NO: 10604 - DNA, 383 bp, Homo sapiens
  misc_feature 380, 381, 382, 383: n = A,T,C or G
acccccagcactttagccctgtgtggccagcgccccatgcgcaagcgtctttctgccccagagttgcggctgagtctgactaaggggcctggaaatgatggagcttcacccacccagtctgcaccttcctctcctgatggcagttctgacctggagatagacgaattggagacaccttcagactcggagcagctggacagtggacatgaatttgaatgggaagatgaactaccccgggcagagggtctgggcaccagtgagacagctgaaaggctgggccgaggttgtatgtggggatgtgactggagaagatggacatcactgggagggtgttccgaatgggaccacgggagcagcacgtagacatgactgtcattgannnn

SEQ ID NO: 10605 - DNA, 245 bp, Homo sapiens
  misc_feature 1, 2: n = A,T,C or G
nnaccctggatcgtttcagagatctaacgtgttgccacaccatagctctaagaagctgtggggcacagttcaaattcttagtggagtgtatgattgcacaaggaaatactttaaatatgttacttttaatttctaatgactaagaaatcagcagataaaactaactttttaaagactcccaaatttgcatgttttcagttttatttattacttctcggcataaaaattgtgcaattaactatggt

SEQ ID NO: 10606 - DNA, 1437 bp, Homo sapiens
  misc_feature 1429, 1430, 1431, 1432, 1433, 1434, 1435, 1436, 1437: n = A,T,C or G
gacctgctgcaacttatcctgtcacccctgaatgtgtttgtcagtgataactatcagaggtatggcaaacttgtggagagactgaattataaagtatgacttatttggggattagagaaggagttcatggagtagagataccaaggtgaaagtagaagtactagtgataattcatttccccgattgttgacaacttaccccgaagacaaagcagcgaccccctgtggatgaagtactcagggaaggtcacatcaatttgtcaggtctccagctgagagcacacgctatgttctcagcagaaggtcttcctttgggaagcgattccttagaatacgcatggttaattgatgtgcaggctggaagtcttacagctaaggtcacagcaccacagtatactagtaaaaactgaagcatattccaaagcagcttgttccctacgaagggaataaagccatgctgatcctgcaagactgggtacaattcctttattccaaggcctgctagaatcttacatgtttataaattgcctttataagctggcatgcctcttggagtggggacagacatttgtttttcatgtggtatgtcgggagtatgaactggaaagaccgaaatcagttataatatgtcagcatggaattgatcgtcggttctgtgaatccaagttgagttgtattcctgggccttgtccaacttcagatgatttgaaatatactatgatctcgtttagcagtagatggagccgatatttacattgttgagcatggttgtgctacaaatataaagatgggtgcaattcgagttgcaaactgtaatctccacaatcaatcggttggggaaggaatcagtgctgcaattcaggattttcaagtgagacagtacattgagcaattaaataattgcagaattggacttcagcctgcagtgctacggagggcctattggcttgaagctgggtcagccaatttaggacttattactgttgatattgctttagctgctgaccatcattctaaacatgaggcacaaagacatttcttagaaactcatgatgccagaactaagaggttgtggtttttatggccagatgatatcctgaagaataagaggtgtagaaacaaatgtggttgtctcggtggctgcagattctttggtggcacagtaactggcctagatttcttcaaacttgaagagttgacaccttccagtagctctgcattttcaagcacaagtgcagagtctgatatgtattatggacagtctctgctacagcctggagaatggataattactaaagaaattcccataattatagatggtaatgtgaatggcatgaagaggaaagaatgggaaaacaaatcagtgggaatagaagtagagagaaaaactcagcaccttagtcttcaagtacctgcccgggcggccgctnnnnnnnnn

SEQ ID NO: 10607 - DNA, 570 bp, Homo sapiens
acgcgggcggtctgaatggaggaagttggtaatacttggcttttttttttcttctctcatgcaagtttccaggatatagcttctttttttgctgtatgtaattgagaccaaactctaagcttggggccctggagagaacagttgtggcctgcaggtcattagtgaggtgagcagaagggaatcctggacttcccagagaaagaggagaccatgccagcctcgtggaacacagctaccaggaaatacagaagcaggtctattccttgcgaactccgaagtccatgaaaaaacggacccacagtggggtggctaaaatgtcccagcgcaagctgccgctgctgctgatggaccatagctcaagggcaaggcttgtaaaggattttacaaaggattttaaagtatagccagaaaagatacggtgtttagaagttaaacgctgttgtctgaaggaagtttgccggaaagatgtaggcttcaagggctactggacaatgattggtctgaacttcaacttacgggaactgctgacaaaatttgaaaaggtatgcagaaagcaaacttcatgaatgt

SEQ ID NO: 10608 - DNA, 715 bp, Homo sapiens
  misc_feature 1, 2, 3, 4, 5, 6, 7, 8, 9, 10, 11, 12, 13, 14, 15, 714, 715: n = A,T,C or G
nnnnnnnnnnnnnnncagggcccgccttttttccatgcttgatttgtgaggatattgaaaacaatggcattgacgtcattctgactccttgatttccatttgttttcaggaagttttcatctgctgaaggcaactaatccacaatgagcaaattatcctgccctggagggtaagctataatatcggtcccatgcttcaggaagagaaaatcatgtgttcaggtttgactttgaggtcagctcagcatttctaaattcaaaccgcagacagcagaatcatatggcatagacacttagcaaatccaatgccttccaggcatctgtttcctgttgatgaaatcctccctatggagagcaaactggttcatatcttcagatagtgtcattcaaccccttggtagctttctgggctactaaatatcacaccgtctggtgggacatttcacccaagtcgtgaaggtccgcagcttcactcctgagccagcgagaccacgaacccaccagaaggaagaaactccgaacacatccgaacatcagaaggaagaaactccggacacaccgccgcctttaagaactgtaacactcaccgcgagggtccgcggcttcattcttcaagtcagtgagaccgagaacccaccaattccggacacaatatagtccaaggatgtcaaaaatacgtgattgcagtagaagtctggtaggaaaagcaatgaann

SEQ ID NO: 10609 - DNA, 528 bp, Homo sapiens
  misc_feature 528: n = A,T,C or G
acagatgtaactgggagatacctgaatgtgcagtcagtgccaagtggaggcctaggtaggtttatttggttattgggaaaaggagtggcaccagaaaattggaggactagaggacagttgggtgagagcagtttagtttctttgattctgtgctaacttttttggatatttgctggaaaatgcaatttatagaggatatttgctcttggctatggaatgcatttgctggttcttctcttttatacgtaagatacatctgtgagaccctctacaggagatgaattcctggtgtaaaagagtcatgtgaatattgtggagtaattattctgagccaggggagcaggctaattagccttctgggaatgtcccagttatagcactaacagctggcttggtgtgcatattagctggaaaatgtctccagagggagctggagactgatgcccccataggaaaaaagcatgcggaatcagaaaatgctggcggaggatgaaaccttgtaaccatgaggacaaccttcccactggn

SEQ ID NO: 10610 - DNA, 715 bp, Homo sapiens
  misc_feature 695, 696, 697, 698, 699, 700, 701, 702, 703, 704, 705, 706,707, 708, 709, 710, 711, 712, 713, 714, 715: n = A,T,C or G
accgttcctccagtgcccagagatgctctccgcaccaagccacagatgtggaggaggcagatgtgatactctaacaatgtctgaagctctgtcacttgggtgctgaatccttttctatactttctcaatactggtcaggattttacggtgttgtctaggagagagcaaccatgatgggcatgcaatgctcaagttcacagaaaaacatgaatagcaagactcaaatctggctgccagatttctgcaaggtatttttctctccaaacgaggtaatgtgtttcttataacagtctttataataaggagatgtgtgtggaaaaaaatcaagtgttaaacggagtcatgcaaattagccatctggataaaacaatgttgtcttgcctaatatttagttcactggattcatagtcttataaagaatctcattttttagcctttgcagtattccagcatatttgaccaatccttatagttcctcaaatagacagttcccttgagaacttaagaactctactgataaaagctgtgagaaaggatgatattatataaacaaacaaattttgtgatttgatgggtaggcagattatgcacagcagaggccagagagcttctacaatttaaggaggaatcatggcattcttcctcccattgtttgctggaggcttgtctatctacttgtctgaggatgttactcnnnnnnnnnnnnnnnnnnnnn

SEQ ID NO: 10611 - DNA, 881 bp, Homo sapiens
  misc_feature 881: n = A,T,C or G
acccttcactctttaggagaaggtttgaaaaaaaactgtgtttcctgttgaaggccagtgatacctggcagcttacagttagaaaactctataactttattattttcatttgcacttaaaactgctatgagttttttaatgcaaaaaatagtgattgagaaagaaaaaagtgaacatatttatattcttccccctcagagagaaacactgttaacattttgtgtatttcggtccaggttcttttctgtgtgtgtaagcacacatatgtgtttatattgtataaaataagagattcatgctggacatacattgtttgtaacttccttcctttccttcctttctttcctgagctagggtctcgctctgtcacccaggctagagtgcagtggtgggatctcagctcactgcaacctccgctgcctgggctcaagcgatcctcccacccaagcctcccaagtagctgggaccacaggcacatgccaggatgcctggctaatttttgttattttttgtagagacaaagtcttactatgttgcccacgttggtctcgaactcctgagctcaagcgatctactcaccttggcctcccaaagtgctgggattacaggcatgtgccaccatgccccgccacttttttgttaatgttttagacatatcccatgtatatataaatatagatcattgtcattaataataatgacggtttaatactatgtgatgtgttgcaatttattaaattccctattttttgaaatttaagttgtatatctgttaactcttgccataatattgctgcgtaacaactacaaaaataaggcagatagaaataagcacttctttcttgctcgtgagttttcagcgtggctgaggtggtattggn

SEQ ID NO: 10612 - DNA, 687 bp, Homo sapiens
acgcgggaaggttaagcatttgtttattaaatagcacagatttccacccccatttggtttatctagtttccatttgtagtaactaatagaaaaaactctaaaatgcatcgggagggaaacacatttaaagctctggaggcataaaaacctgcatataaattcaggctgcaccgattgataagtgtgttactttctcaatttacttattctttcttaaccttagttttctcatcagcaaactatcttaattacatgactttgtaatccataaagcttgcttcaagctcttagcatgcacacagcacatctgcaaaagtaagcatttgccactttcggttctcaggataacatattcacccttccctacctactagcaagctgtgctcacaagattaatcaggtagtgctagagagaagaatgaggtggttggggcttaggaagagagttattcagatagagtgtgcagagaaagtttctcaaagcaaaggcaatttagcagagacttaaatgctgtgagagagaaagccatggggaaatacagagggagagcattcaaggtgaaaagagcaagtgcaaagaccctgaggccatgagcttggcttattcccctgtgagccaaagcatggagtcagtggcaggaagtgatgctggagagataggcaggtacctgcccgggcggccgctcg

SEQ ID NO: 10613 - DNA, 962 bp, Homo sapiens
  misc_feature 960, 961, 962: n = A,T,C or G
actcaatgaagagtggctacttttattagatcataaacagtttccatgttactaaccagactttacgactattaagatagcatcttaacctacgactgtataaatattttatgatcaataaatcttaattggtagactctgagaataaagatggtgtttttccaacccctcaatatttgcatacgtaaaagtatttagctactattttaaagcacctaaccggtatctgatgttaagtgcatgcaatcatgaaacatctttatgaaacacctaacaggatatggcattacatgaagcttttataaaagcaattaaaccaaaatagcctttacctcctggcaacttaaactccagccaaatattgatgcagactaaattattaagggatcaaaacaaatagtcattaaattagttaaatattattattgcatttaataaatgaccaaatgtttttgttgggataaagagtagataaattatttctaagcctgcatatcaaaggaaaccctaactctttcatgacacagagagaaagcccactgagcaaaatggaaattctgaagcattcggttactaaccaggcagaacaatataatagcatgtaggtgacataacttgaattaaaaaactgaaaggaaaaatagaaactaccgtagaatatggagagaattggtctagcttgtgtggtgctatgaatgacattgcaatactcaaagatgaagatactgatgtgaaaatttgtgactgccaaaagtggcaagaaccaagctagctacagagaagaaagtatggaaagtgaagttaaacagtcatcaggctgggtgcagtggctcatgcctataatctcagctttttgggaggccaaggcgggaggagtgcttgaatccaggagttcaagaccagcctgggcaacatagtaagacttcgtctctacaaaaaatgaacaaacttatgcaggcnnn

SEQ ID NO: 10614 - DNA, 1627 bp, Homo sapiens
  misc_feature 128, 137, 146, 147, 197, 198, 257, 258, 303, 313, 326, 1624,1625, 1626, 1627: n = A,T,C or G
acatacattctatgacagactctaaaagttctcatcatgacatgcatgatttttaacactaaacagttctatgatcgtgaatattttaaatgtttactgctgtatgtgtccagagtctctgtgagacntgtttcacnagaagatgnntgtgtttacccaagggctgcgcccatcaaaaagaaattagaataaaatannaatggaaaattagaaggggtctttcctgttaaagaatggtcttctgaagggctaactgnncggaatgaaagtttctatttccaacctaaagccttagaattgatnggacatgcanaactttcaaagcnagagctctctcggggggggaagccatctgccttcgagcctgccactgaaatgcaaaagtctgtcccaaataaagccttggaattgaagaatgaacaaacattgagagcagatgagatactcccatcagaatccaaacaaaaggactatgaagaaaattcttgggatactgagagtctctgtgagactgtttcacagaaggatgtgtgtttacccaaggctgcgcatcaaaaagaaatagataaaataaatggaaaattagaagggtctcctgttaaagatggtcttctgaaggctaactgcggaatgaaagtttctattccaactaaagccttagaattgatggacatgcaaactttcaaagcagagcctcccgagaagccatctgccttcgagcctgccattgaaatgcaaaagtctgttccaaataaagccttggaattgaagaatgaacaaacattgagagcagatgagatactcaagtcaggtaacgggacaaacaagaaagaatgtaggcaggtaattctggagactctgagaagaacagttgagtgaactcacttcagatgcatgtagattatttgcactccagaatgtagactgtgggcactccagagactaccagaattgggggaaccacagtgactcattaggtttctctgttacaatcaggcatgagaaatatatatattttgttgatgttagctattgaaatgagatatattggaaactgagaacattggctttatgtttaaggaagtgtgttgttttggtaaaattgccattccacaaaaatttattatagactaatgatacaccaaaccaggcgaattgtaggatctgaaaaaatactgaatttatacttgaataataagattgctttttaagataaatattgtggtgacttaacaatataaaaaaagttacttatgtttatttaatctattgcaataaatttttatataaatatgtcaatattgaaagcttagtatagattatttccatgatgagttttacacatcttgcatgagtggatcgagaagcattcagatggataaagtagaggatacagaatcataggcatatgattacaccctatggttatggaaaaaaacgaatattcatatttagtattatgacctaagtgtatatccaagctgatcaattcataacacttcagtgatgagatgtcagttgtacattcggctgaactctcatcataaaaaagtacctttccaaagataggctatttaggggataggatgaaatggaatctcatcaggattctaatgtgtttcannnn

SEQ ID NO: 10615 - DNA, 474 bp, Homo sapiens
  misc_feature 473, 474: n = A,T,C or G
gcgccaggaagccgccatcgcggatattcaaaatggaccagggagccgcgaagtatggttcgtgccagcgcagcacgaacgccaggcgcgccgccagcaggccggcgatcagcaggtcggaaacgagggggccggcgtcgggcagctggcggtagcgccgcagccaccacgccacgccgtaggcgacgcacagggaaaggaacagcagtaccaggcccgtgggcaaagccagggggccgatttgcagggacagcatgggcgctctctatcacgtcgaatggacggccattgtggcccatgcggattaagcgtgcattaatccggcgtcaagaagcggccagtgcttccttgcgcacgaaatgcatggcttgcggctggtccaccagcacgcactgcttgcccgtgcgcttgcaatggtcatgcacgcgccagtaggcgtcgtggctgacgcagcccgtctggcaaatcaccann

SEQ ID NO: 10616 - DNA, 524 bp, Homo sapiens
  misc_feature 1, 2, 3, 4, 23: n = A,T,C or G
nnnnccgcccggcaggtactttntttttctgatttttttttttttttattaacagagacagctttctattctgtcacccaggctggagtgcagtggcacaatctcagctcactgcagcctccacctgttgggctaaatccatcttcccacttcagcctcctgagtagctgggaccacaggcacgcatcaccactcccggctaattttgtttttcatagcacattacattaccgatttcccagtttataagtaaccaagatgctcaaacaagcaaatattttccttgagtatgacttactacaaaaaagagaaagaacagagaaattagttctgaaagtgcatttttctaaagcccatttcagtatttgatagctcagatcatatagaagttttaatcaaaatgctaaagaatattttattaatattcttctattccatcctttccttcagtatttcataaattatttagttaaatgggattttttaccatgtgtcctgaaatgtcattgattgtaatccacctg

SEQ ID NO: 10617 - DNA, 441 bp, Homo sapiens
taccggcgccgctggcgctcaggaccgcacccgcgttcagcgtgacgtcggcgccgatgccgcgataaccgaggtcgaagccgcagcagttggcggccaggttcggcaggtctcccaccgtgccggcgccattgccctgattgatcagtttgatggtggcgccggtgatgctgttgacgctgatggagccggccatatggttggtcttgtcgctgccgtccgccatcagcagcgacacgttgccggtgccggcgtcgatcttcgccgccacgccctgcttgtcgacgcccatgctgagggtggcgatgccggcgtcgcggtaggcgtcgttgacgccgttggccaggctgtcgttggcggtcaggttcaaatcgcggttgcccgtgatgatgtcgcccagcaccgtgatgctgcgcccggcctgcatggtcagcgcgccgc

SEQ ID NO: 10618 - DNA, 586 bp, Homo sapiens
  misc_feature 585, 586: n = A,T,C or G
acacaataaatactttcaactattttgttgctagctttacatatttttttgcgataaaaatagcttttcccaaaaggaataaaaactaaaacaaaaaattcaaacatccaaaagttaacatccaaaagtgttggtttttcttctcagaaatagcaatttgttctgcttctcatcagtcccacttaggctctctctaggacttaactgagcaactcctaagatccaagttcccttaaattcctacaggcagtggtcccaccaacaaagacttctctactcttcctttgcctccagatgctcagacttgggcttctggtattctgaaagcatccttgtttattttcctaccagagattgttgatttgccccaaaggaagtttttttcttccattttgtgtagtgtgagtggtgactaactatgagaatggtctcaatggcatctctgaggccagaggaaagcttctgatgcaattcaaaattcagatctgaagcctatgaatatggttactgggcgtgatcgacagattgaggccaggtatcaaacagatctcagatattgacagaacctctgctcattggaatgann

SEQ ID NO: 10619 - DNA, 2270 bp, Homo sapiens
  misc_feature 2269, 2270: n = A,T,C or G
cacgcgaggaaagtttgtaacgctcccaggccgcgcttcctgcgtccccaacccggtccctgagagggcactgcgccctctccaccactgcgttccctcggctaagaatcccccgaaccccagccccgcgatcgcggcgcccaccgaggaggccgcccgggtggggcgcgggggtcgcgaagcccgcagccccggaccgcccagccgagacggagccggacccgccgcctcccgggcccttccaccgcagctatccgcacgggaggcctcgcgattgctcggaaccatcccgcaggagttcagctgatattttctagtgtggggcgagagattttgtggagcgcatttaaggggtttttgttgtgactgctgccttgtatatatttattttctttcttggaactgggcctcgccctcctcccactgacatgatggcccagtccaaggccaatggctcgcactatgcgctgaccgccatcggcctggggatgctggtccttggggtgatcatggccatgtggaacctggtacccggcttcagcgcggccgagaagccaacagctcagggcagcaacaagaccgaggtgggtggcggcatcctcaagagcaagaccttctctgtggcctacgtgctggtcggggccggggtgatgctgctgctgctttctatctgcctgagtatcagggataagaggaagcagcggcagggcgaggacctggcccatgtccagcacccgacaggcgctgggcctcacgcccaggaggaagacagccaggaggaagaagaggaggatgaggaggctgcctcaaggtactatgttcccagctacgaggaagtgatgaacacaaactactcagaagcaaggggagaggagcagaacccgaggttgagcatctctctcccgtcctatgagtcactgacggggctcgacgagaccacccccacatccaccagggctgacgtggaggccagccctgggaacccccctgacaggcagaactctaagttggccaaacgactgaaaccgctgaaagttcgaaggattaaatctgaaaagcttcacctcaaagactttaggatcaacctcccagacaaaaacgtccctcctccctcgatagagcctttgactcctccaccgcagtatgatgaagtccaggagaaggcccccgacacccggccgcccgactgaatggccccacttgagccacgctccctcctgtctctcacacctttcacccccaagactctaacaaagccacatgagccacagttgagaagcggaggggccagctgtgcatggagccatttggatggcggcgggcggggggggattctctgtatcaggagtgactttgttgccccacacagcctcctgctgcaggtgctttggaaagagatgctgccttggagctggtgaatctgtggaccacattcaagggtgtggcacaggcatcttcccatccttttcactccgaatcgctggcgacacattctcctttccagctaggaaagggttcctcgcggctggtttagattgtggttgtttgttttgcttctactaagactgttttgtttcaaaaaggaaacaagttttgtgtttgctgtctacgctggagtcctgaactgtgggtagaaaacacgacctggctttgtagaaaggacacagggctgttttatgaactaagcggtgaggctcaggtggcggctctcgcagagcccctgatgctgttgttctttgagggcttaaggcctgatgaacgtaggcacgtgatgcgtaatagtcttcaatggtacacttaactagtctcttctgtgtaacagcaaaaaaaaaaaaaaaaagaagaagaaagaaaactgtaggaaatgttctttttgaaatgccatgcaatggagctttttgtaataaaatattttactttgtccaacacaacaacacaagaaaaccaaacgaaaaaaaagaaaacgaagacagcccaccagaacaaaaaaaaaacagaaaggcgggcgccaaaaaagaacgggagggggcaaaaataatccactcacttagtaagaggcgcacaactgggaaaataaagacggcgccgccatcacaaccaaggtggaacaagctgtagacaataagacacacttaggtgatgataggaaccacacaagaaggcagccgacataatatggttgtgaacccattgaggagctgataattccgtcagatgaaaacaacaagaacagaaccatgggagtcaaaagcaaagagcgacgacacann

SEQ ID NO: 10620 - DNA, 355 bp, Homo sapiens
aggcagtcactacacaccaaacatcttgtgccggcagtcgaatgcttccatctagtttgactttgagtcagctcagcattctaaatcaaacgcaaacagcagaatcatatggcatagacacttagcaaatccaatgccttccaggcatctgtttcctgttgatgaaatcctccctatggagagcaaactggttcatatcttcagatagtgtcattcaaccccttggcagctttctgggctactaaatatcacaccgtctggtgggacaattcacccaagttgttcatttattagttttctggcttcgtggagaattatctgccttctctgagtattgatttcattgtccccgcgt

SEQ ID NO: 10621 - DNA, 295 bp, Homo sapiens
  misc_feature 1, 290, 291, 292, 293, 294, 295: n = A,T,C or G
ncggtggcggccgaggtatttctgtgacatgtatcaccaactcacacagtgattcttacgttcttaggtcactgcttggattatgcagcaagaacaaggccatgtaaggggtaggggtggggccaggattagacctgatcattgagaaatggcagatggtaagggaaggtcagtcgcagatacctacactggtaggaaataaaaagcatatgagacagaacagagtattacaaatgaagtgtaacagaccacaggttctgggtgtacctgccgaaaaggccgccaccgcnnnnnn

SEQ ID NO: 10622 - DNA, 365 bp, Homo sapiens
acaatctctggccctacattttctaaatgttatgccaccctgaccaaggggcaactcctacaaagccaggcaaaataataaaatcatatttgtctctagtggaatggataactatgcctaaaactgtgccctttgaaaagcaactagagagataatttctgaagtgtttgtccctacctgaatgtgtggcaaaattctaaactccctgaagtgtgaaagtggtttccaagccacatgcacatccagtagtggtaaagggtgaaaatctaactggctaagagggcttcatagcaacattaaccaaaaagtggtttatgtagtctttgcctgcttcataattccctaggcattctatgctattctgt

SEQ ID NO: 10623 - DNA, 630 bp, Homo sapiens
  misc_feature 626, 627, 628, 629, 630: n = A,T,C or G
cttctattttgcccacccggagtcgaaatacttcgtcgtcggcaagatcggcatggaccaggtggaagacatggccaagcgccgcggcgccagcatcgaggacgtggaacgctggctggcaccgaatctgtcgtagtgccataatataagcacaaggcgcgcggaacttatcgcgcgccgcagcgcactaacgcagtatgccggtcggcatgctgcatgcccgctccggcccgttccctgactggctaaggaggatatatggcaagcaatttcaaactgaaacgctggcaagatcaagtgatcctgttgctgggcctgtggctgctcgtttcgccatgggcgttttcctatcccgaaggctcgccgcagatgatcaacgcctttgcctcgggcctggtgatcgccgtactggccgccttcgacctgtacaagacctatttctgggccgtcgcattaaatatgatgttgtcctgtatcttatgcccatactatatactttataaaaaccaattgcctgatgggctattaaattcatgtttgagtaaattagtgaagaataaaattttagaacaaataagacaatctgaaataattgtaccttgtttccttgttagtgatttatcagnnnnn

SEQ ID NO: 10624 - DNA, 989 bp, Homo sapiens
  misc_feature 1: n = A,T,C or G
ncgacgatagagtatattcctacgacgtggagaagcccagcgagtattctttattaatacacccaccgacggcagtctaacacaccaccaactaagataaaagagcatacatatatatgtatatcgacaaacacatagttgagcaaacagttaaagtcgtatggcaccatatgtcaacgagtttaatatcaagtgatcgataagtatagattaattacatgatataggttgtacaatgattgatataacaaccgttattaactcttatacagtgagaggtatgagatgtattgctaatccgattagggtgagataagatataaataccagttatcgagaagttcacataagtcgttgaatacatattataaaacgtggagagtcatgagcataatagataatattatatatgataatagctatatatgcagatataaaactatagtatcaatgactaaatctagataatatattatattacaaaatcattaattaacattcaaaatagtatccgtatataacagtaagatacttagtaagatagtaaagataacacaatatagcaccccgagaccattatcttaattaaaacacccgtttaggataatatgtatacaacgcactattataaaaaaccaattgggccctagtaaacgatatgaggcgtttatccccatcacgttaggataggttgacccctcagtttatttcccagacacagaagggcaggtcctatcgtcaacatgagaaaaatactgacaggtcattattaattgagcacttaatatattccaattgcttcacctgcattatcaccttccatcttcactacaaccctgtaaggaggcttgagaaagaagatacattcccaaaggcacatctgggcaagcaggaacttgggcaagtattttaacatctctaaacctcagtgaattcattttcttaaaaagaaaaaaatctgttgagcgccgctgtaagcccagtgctgt

SEQ ID NO: 10625 - DNA, 497 bp, Homo sapiens
acgcggggctgcttaaaactcttcagaggttcaccatcgcttccagaaaaagatcaatactcctgacgtggcaacctgtcgagactcaggaccgctaggaaatcagctcttgtttacccctctatccattacactacgatccagctgggtttaggcatcacttcctctgagcaatcctccctgatgtcatgaggcagtgctgagtgccttctctggaccctctgtttacttgcctgttaaatcctgaacatctggaagggagtcgtgttcagcaacatatctacgccttgcagcacggtgcctggcctgcagctggtgttccgcaaacagctgctgactgacgggatgcatcgatgtgtttcccaagacatccaggagaggatattggcgcaaacaaggccttgaaagctccatgatagagatgacagagctataagatgaaagcagcccaaatccctgagtcaccaatgtttgaagaagagcttcccaggagaggt

SEQ ID NO: 10626 - DNA, 444 bp, Homo sapiens
actgactagacaattgagtctcaaagacgataatttatccaacataattgtgtgaataatgacaaaaaaacacccagttttgggaaaattacaaatgcaatttctagcagacactgcttggttatctagtgttttgaaataaacaactccaaaacttcgtggcttgaaataagcattatttatcttattacagttgtttgggttgataatttagacagagcttagctgggatggcttgtctttgctccatgttatgctgacttgactcactcatctagttgcagttaactggcagggcagctggagcctggctggtcccagatggccacacactttgtggctggtagttgcctggcactcataaggtgccttcattttcctccacctagcctatccagcagactatcttgggcatcctgggcttcaagaagaaaaccgcgatgt

SEQ ID NO: 10627 - DNA, 1266 bp, Homo sapiens
  misc_feature 1197, 1198, 1217, 1259, 1260, 1261, 1262, 1263, 1264, 1265,1266: n = A,T,C or G
accttaaagtttgagtctcactttcctcttatatataaggcttcctgaaagcattaacagtgatgtatatgaactggccaatacaaagtaagacctcaataaatggtgggcaccttcttttatatgccagcttgtattcttattggacaaggtatgcaacctctttgggccccaatttctttctgaaagaatcaattctagtgctcaaagattcagaacttagtgcttacactttgggaaggaggactgatgtaaagaatcaggattttctggacaagttgatgaatctcctccctctctttggtgtccctgaatgagtgatagatggataaaagtccagtgtccacatatgcacagatgctaataaaatgaggtggaatgatggtaaggccttaaagtagaaagtatgaaacctccactcttgtcttggctttctctctttcccttgcttactcactctatctccttctctctctccctttctccaaatgtcagatgtaatctctgccttaaatttcggaaaatcatcaacacccttgtaaaacaacatacaaacataagttattattattaactatgtaatcattgttgcagacatacttttaagtcagtgtctccaatcttccttggttgtaaactacattcaactctgtactttcctaggccgaggtacgcggggagtacgcggggaccctagatcccaagatctccaaggatttggtggcatacccactccagcacacagaagcatgaggttcatgactctcctcttcctgacagctctggcaggagccctggtctgtgcctatgatccagaggccgcctctgccccaggatcggggaacccttgccatgaagcatcagcagctcaaaaggaaaatgcaggtgaagacccagggttagccagacaggcaccaaagccaaggaagcagagatccagccttctggaaaaaggcctagacggagcaaaaaaagctgtggggggactcggaaaactaggaaaagatgcagtcgaagatctagaaagcgtgggtaaaggagccgtccatgacgttaaagacgtccttgactcagtactatagctgtaaggagaagctgagaaatgatacccaggagcagcaggctttacgtcttcagcctaaaacctaaaaaaaaaaaaaaaaaaaatttaaaacagctattaaactaggtactttnnttttttttttttttttttncctggtgggcccagatttattgaaaataatacagcactacannnnnnnn

SEQ ID NO: 10628 - DNA, 1126 bp, Homo sapiens
ggccgcccgggcaggtacagtttcacaatcatagcttagtgcagcctcattctcttgggcacaagcgctcctcagcctccctcctcagcctcccagttgctggaacttacaggtgcaccaccataaccagctagttttattttttgtagagacagaagtctcactttttttcctagactggtctgaaatagaccattctatttgctagaatggtctcaaaccatccttctgcctcagcctcccaaattgctggaatttcaggcataattcatcatgcctagccatttcttttttctgctgcattgcagagttagaaccaatttcatttgtcctgcactgagaatgtgcattcccagcagatcatggttgagctcagcacacctgcaactcagccagcctctttgaagggtgcacagttactaactgtcagcgttgcacagccacctttagcaggtatgttcagaacttacattcccaccctttctaaaacagctcacagtaacaagagaacgggatttaacttttgacatgcacactcatgaaaaccaatgattttggaaagccaaattgttgagaagataaggtggggattctgactactagtatttttacaaatctgattgtcgttgcaggttttgttttattttgttgtgttaatgctgagagtggagaatagattggaatatttgcctcttgtgtttctttttgctttgtaacattgcaagtggtccacattttcctttatttaaaatttaaagttggtgcctggggtttctggtgttaaatagaagtgatacttctgcataaagtattatggagatgctctgttccatccagggaggtgcaggtgaaaagagggcagttcatcctcctcacacttagggcagggagcagcatgcaggggcagatcagcagctttgcatgttgacaaatccactctctgctgcagatgcctaggggaagttgcagacttaaattttcttttgtaaaatgggggaacacaaacagatcttatgtcacactggttactccagaaaaaaaaaagaaaaagaaggaaggaagaaaagaaaaagaaggaaggaagaaaagaaaaagaaggaaggaagaaaagacagaaggaaggaag

SEQ ID NO: 10629 - DNA, 539 bp, Homo sapiens
  misc_feature 505, 539: n = A,T,C or G
acgcggggattataatgtatgttggaatgtcctcctttgagtaaatgctacttaagggtctttgggctgcataaatttgtatgtgcatatccctatcaacatttgggaagttctcagccagtatttctttaagtaagatgtttatcttgtctctctctcttctcctactggaaattccataaattatatgttcatatgccttgatagtgtgccataggtccctcatactttgttcacttatttcattctttttttcttttgtttccccaagtggctaattttaaataacatgtcttaaagttgactaattccttcttctgctgaatgaactttaaaagatttttaatagaagttttttggtaatcaaaaagaaaaacatatagtagaaatgctttttaaagttcaggcatggtggctcatgcctgtaatcccagcactttggccagcctaagtaggaagatcatttgaggccaggagtttgataccagtctgaggaacatggcanaaccccatctctactaaaaaaacgaaaattagcn

SEQ ID NO: 10630 - DNA, 664 bp, Homo sapiens
  misc_feature 659, 660, 661, 662, 663, 664: n = A,T,C or G
acaaaccagggctgttactcctcaacaaggaggaataacgcctcttagaagcatggcaagcaggtgccataaaacatgtctactacaatttctcactgcctggaataattggaaaagtttcataaatgctctggctttcaggttcttcacttttgcaataaagctgctaagtctggttgcaaagcttttatgatgattagaaataatatatgtaaaatgcctgatgcacaagagtcactcaataagtgacagcagtgtgattaatctatgacataataaaaagttctaacttgaaacacgagagaaaaaaataactgccagtgcgtaaagagataatttcatgatctcagggacactaacctccctataacccattcctccatattaatttttactttacattataccttctctaaagaaattgttacagagaatcacactcctagcaatatgacagaagactagtacatcacacctaaaatataaaatatgtctttttaagcatggttcagccagagagtaacagaaataaatgtaagccagaaacaactgaaaaaaataacatttctcagaaggaaaaaaacttgggaggattctttcctgagagcagttgccaatccttaatgacccgcgttaattaattctagaagactctcgannnnnn

SEQ ID NO: 10631 - DNA, 346 bp, Homo sapiens
  misc_feature 1, 2, 3, 4: n = A,T,C or G
nnnnacctcaaatctctgcctcaggaaaacatccaactttcaaagtttctggtaagggttgtaaaggaagcaattagtgtcattagaaagaactatcgatgtcactatgccaagggagaaaaggggtagcaaaaatgagaaagaaggcatgaggcacagacattgaaaactaacctgtatttaagcttagtgtattttcgctttgcctctactccaagtggggagttttcattgcaggcactacaaaccccaggtatgacaatgacataagaatcagggaagtggctggaaagggaaagctatatagttagactggcctgcctttgagtcctgccctgccatttgt

SEQ ID NO: 10632 - DNA, 899 bp, Homo sapiens
ccaccgcggtggcggccgaggtactcggggaaaccatgttgccagcactctcctagcccaaaaaaattacatctaggaagcaggggccattaacctactggaatcattgactatgtcatagaagtccagtcaccccgcaggaaccagaatcttccccatggatatttaaacccaattagaaatggccaccaggtggtgccaaactgcagctaaggtccaggtgaatttgaaccatgcaatcttggatcttttggctctcctggtgattttcacagagtttttttcatcgttaatccatttatgaataaatgctgtcagttttgataactctttcttattgtctataggtaaaacagaaaacctttagcattgtataaaagtcttccttattttttactgtgacctctttctttcttttgatctctaatatttagtcgcatgggaacaccaactgttaactgaatttccatttttccatgcctttgcaaatgctcttctgtctggagggcctttcctgccacaggccttgcactttagatttaattaaaagcttttgctgaaaaagaggtcaaacctgtaatgatctacctcaaaggtgttgttgtctgaaatttcttggattacttccctctaaaaaaaaagcaggattattaatcctgacatctctggtctgccaaagcactttgttcatatttgttaaagccgtgatttctcacattaaatatctttattgtcttactcagtttgccacttagaatgtaacgcagtcagtatagaaacaaaccaaacttttcatctttatgtcatcattgactaaagacacatatatcatataacttcaggaactgtatttgcagtaaataaaaaggtattttaataaaaatatgtatattttatgt

SEQ ID NO: 10633 - DNA, 511 bp, Homo sapiens
acttgcaaaccaaattggcagcatattaaaagaattacacaccagggaaaataaccctagaccttgcattctagtgctctgcttatctgtgacttcagacaaagatggagagagctgaccatcagtataatttagctgaatgaaataatgagatattttaggaagaagaacattgaatgtcagaagttaaatgtgagatccaagaagtaacagtgaacagacaagtttgtgggtatgtggatatgtcttaaataagtcaggttgtgtcaaattatgatggatgatgatgactgcgaggcaggaaggaagatgaaaaggaggaggcattgaacactaatggtcacagggagcaccgggagcgtggtgacgccagggtgagctgcttgttctgtgagggtggagggaagagatttattaaccttagactttgttaaagtatacatgtgacgtctacatgggaaactgctaaatgaatagaagtggaaggtgtaacttccacaccattaaaggg

SEQ ID NO: 10634 - DNA, 921 bp, Homo sapiens
acaatactttctgactgtccactaaaatgtcaaactatttcagactcctactcctccactgtcttagttgattttgtgctgctgttatagaatacctgaaactgggtaatttatagaaaacagagatttatttcttatagttctggagactggtcaaggggatggcatctggtgagaaccttcttgctacatcatctcatggaagaaggtggaagggcaagagggcacatatgcccaagaaaatgtgtgcacacacaagagaggtggagagagaaagagagagataaatagagagacgaaaagggggccaagctcatccttttattaggaatccattcccatgatctcccatgataacagcattaatccattataagtgcagagccctcataacctaatcactttttaaaagtcccacctctcaacaccattgcattgaggattaagtttccaacacataaactttgggaaatgcatacaaaccatagcactacctcccactcacatcttggctcttcaatgtcaaggtatattggttgttaagggaatataaacacatgaaaacatgtctctcctttcaatccaagacttactggaattgtgtcaagcttcttgtggtcagaaatgaggacttctctttattttgtcattcttatgatcccatgagcccaaataacagtgagatgttaagaacctagacaccctccagtaaatgcccactgattgccttgctctcagaaatggctggtttctctgcagatcttcagctgggtcccacccaggttgggagatgccagaagcctggctgcagaaaagcaatctccctccaccgtgactatcacactgctgctgctgtcaccatttatatttctatcaccaccaccatggctggggagctgccatgtcagatgatgtcagagt

SEQ ID NO: 10635 - DNA, 468 bp, Homo sapiens
  misc_feature 461, 462, 463, 464, 465, 466, 467, 468: n = A,T,C or G
acatattcgaatgatctcttacatgagaaaggtatttcttctcgaaagaatacagagagagcttttagagggatggggcaggcatctcaataccatttcctatttttgagatggttgcttcattcacaaagaagctacattccacaagcaggtgtctcttcctactttatcaactcatccattcttttcccacaaatacttactgaacactctctatgcctgtcgtattgcagacatgcggaatatatcgacaaaactgactgaacttcctgcccttggggtgcttccttctttatctggctcaaaactctgttcgctgcaggtgctagctgcaggttgttgctcattaaaaaggaaaatctattctacaattagaaaaataccttgggagaacattgcaaaacagtatctgaataagtaaaagctggtgtcaccccagagtagaagtttgtacctgcccnnnnnnnn

SEQ ID NO: 10636 - DNA, 487 bp, Homo sapiens
  misc_feature 1, 2, 3, 4, 5, 6, 7, 8, 9, 10, 11, 12, 13, 14, 15, 357, 374,487: n = A,T,C or G
nnnnnnnnnnnnnnncccgggtacgcggggaaacacttcttacctcagagctgagctgggcatgagtagatgctcagtaagtggtgcacagggttggtccctatggtggaggccccctaacaccgcccaacccccctccatgttctcacagctccacgcactgagcacgggcatgaaggccatgatgtcagaattctgcacccagggagctgagatgtgccgcagggcctgtggcggacatggctactcaaagctgagtggcctgccatcactggtcaccaaattgtcggcctcctgtacctcggcccgccacgggccaggtaccgccgggtgtgtctctttcacagcttgaaaagncctgagaacagctgtcnttgtgaagggaactgagatgcaggaaatttcttcacgcccctcccctttgtgaacttcaagaaagcctctggcattctctttctgcaaaaggcaacctgaaatgttgtctgcn

SEQ ID NO: 10637 - DNA, 672 bp, Homo sapiens
actgtatataaatacctgaaacaaaacaatcggaaaaagcaaataggaaatagagtgagaatcaggggaactgaggggaagcaccaagtttatcttctttagatagttcttattttggagacaggatatttatttcttgcgagctctaaggactgtgcatttagcaaggaccgttcatttttcatcttcctcactaatgtcttaagggagggaaagataaatctgagtgtcatcaggatacatatggagctgagggccacagttgctaattaagtcctcttcaaagacccatttggatgcctcagcatacgtgataaaaaagattacccccaatgatgtcatgtttttccaggcatcaaaagaaccccaaattaccttgtgttaacaagagtggttggagaaagctaagataccactacaatctccccttaccctctgcatagtgctggctaagtggtatggtcctgattttctgataattactacttttaaggagatggtattttgttgcagtgtcactgaggaaacggaattccaatcataacaggccccgaagcaatttaagtgctgcaaaccgaccccaaatagaattcacttgaaccttgccagaaataggaatatcactttcttgaagctcaaggggagagaaaagtaatttgggaaacagacagt

SEQ ID NO: 10638 - DNA, 2542 bp, Homo sapiens
  misc_feature 1, 2, 3, 4, 5, 6, 7, 8, 9, 10, 11, 12, 13, 14, 15, 16, 17,18, 19, 20, 21, 22, 23, 24, 25, 26, 27, 28, 29, 30, 31,32, 33, 34, 35, 36, 37, 38, 39, 40, 41, 42, 43, 44, 45,46, 47, 48, 49, 50, 51, 52, 53, 54, 55, 56, 57, 58, 59,60: n = A,T,C or G
  misc_feature 61, 62, 63, 64, 65, 66, 67, 68, 69, 70, 71, 72, 73, 74, 75,76, 77, 78, 79, 80, 81, 82, 83, 84, 85, 86, 87, 88, 89,90, 91, 92, 93, 94, 95, 96, 97, 98, 99, 100, 101, 102, 103,104, 105, 106, 107, 108, 109, 110, 111, 112, 113, 114: n = A,T,C or G
  misc_feature 115, 116, 117, 118, 119, 120, 121, 122, 123, 124, 125, 126,127, 128, 129, 130, 131, 132, 133, 134, 135, 136, 137, 138,139, 140, 141, 142, 143, 144, 145, 146, 147, 148, 149, 150,151, 152, 153, 154, 155, 156, 157, 158, 160, 163, 164: n = A,T,C or G
  misc_feature 165, 166, 167, 168, 171, 172, 173, 174, 176, 177, 178, 179,180, 181, 186, 187, 190, 193, 198, 202, 203, 204, 205, 206,207, 219, 223, 224, 228, 231, 232, 233, 234, 235, 263, 264,2542: n = A,T,C or G
nnnnnnnnnnnnnnnnnnnnnnnnnnnnnnnnnnnnnnnnnnnnnnnnnnnnnnnnnnnnnnnnnnnnnnnnnnnnnnnnnnnnnnnnnnnnnnnnnnnnnnnnnnnnnnnnnnnnnnnnnnnnnnnnnnnnnnnnnnnnnnnnnnnnnnnnnnnnnngncannnnnntgnnnnannnnnntttgnncancanctggntaannnnnntttgaccatcanctgnntaanccnnnnntttgaccagtcaacctggttaagccaannttgaatctactcttgcccccaaaatctcgaagagcttccatttcagggttcggacagtgaatacacatgtccacttgggaatacttgtgtgctccaggtatcatttctatgtgagggtcaaccaggcggtgatctgggtagacgtgctcatctactggagtgtacacattctggacatagtaatacctcactggttggtaaactctgtatccatctactggataatagagtggcggttgtggtgctggtggtgggagcgatggtggtattggagaatacatccggcagtggtagcggcagtattcagaatcaaagacgatagatcgagtgctccatgtgatattgggatcatgtgtgctcagccagcgaacccctaggacgacagggaagaatggagactgagtcacatcaaatgacagcacctctcggtgatctcccaggtcaactatcaggtcgtgagtttcgtggacaactgggcccgatgctatggggcgcccatcaattgcttccacaagtattggccagtccttgattcttagaggaattccattttgagcaacatattcgtgatcaatgaagttgccagaagcaccagaatcgatcatggctcggacgaacagggtgtgtctgcccggaagatgaatctggagcatcacttgcaagtgtggagatgaggcatcatcttgtggggaccttattatttctggcccggtcgctgaaggtccctctacagcggggccggggagtttcccgccggcgaagactttgaggccttggcaggacaattgtcagcgtagtgacctcctgttccacagtagaggcacaggttcagctttctgcgtctttctttttcttcctgcgtcaggcgcatgcgggcacctcccaccggctcggttggatctacctggtggtggcttgcaatgtgaggcaacaccagcgcccggggtggcgagcgtggcttgcgagctgcagcagccctggccagccttctctcaatgtgaatgcactgcccaatcagagcagacagcgacttggcgacctcgaggtgggagagctcctcctgaatgtggtcgctgaggccctcgtggtactggtcaatcagcgcaggctcgttccaatccaggtcctgggcaatcatctggaaagcattggagtagtcgatgacagaccccatgccttggcgcaggcgtctgatcttgcgtttggcaacctctcgcctctgagggtcttcaaagacatgcttcatttccatcatgaaagctgggtagttgtgcatcaggtagtgggagcgctccagctttgctgaggcccaacgggcagcacggccggtcatcatgcttgtcacgaagcagacacggacacgatcaactgagaaatccctggtgctcttttccatgaagatctggcactgggccatgaaaggagccagcatgtctgggttgccatcgaacttctctgggaggtcttctgggcactcttcctctattggagggggtggggcagcagctgctgcagcaccgcggagctcgatgtcatcatcctcatcctcaggggtgggttccacttgctctcgaagggtggtgttctcctctgtgagcttctgcacctggctctgcaggttgttgttctcctccgactgcttcatgaccttctctcttaagttgttgatctcttcagagagctcgtcccttcttcgttcggtcatgttggggacacacgcactcttatggccggtgtgcttggagttgttgttgttgttgttgttggggggagggggaggaggaggaggtgggcagtcgggacccagggtgacggttggggtgggaggagacctcccagctgtagcttcacttctgtggggatggaggcctggatcctggccccctcttccactccttcttttttttgttttcaaaacccgcttatttcacgcgaggactcctctgcgaagacaggaaggatggggtcccacacctgagccaggcgcggtccccactgggtgctccgcagcccggagtggctccggacgacagcccgctcagcggacctttcgccaggctcggtggaccttctccgctgttctcctcagggcgcagtcaggtttcttcgacacacaccaaccgaagttgaagcgcgtgtgacaggttagttttaccctactgatgatgtgttgttgccatggtaatcctgctcagtacgagaggaaccgcaggttcagacatttggtgtatgtgcttggctgaggagccaatggggcgaagctacgggcgcgtcatcn

SEQ ID NO: 10639 - DNA, 1074 bp, Homo sapiens
cccacgcgtccgtttgaattttcttaattttgtaactatttgtcattgaaaggagatactaaaaaaattatatatcgtcctagaaagtacatgaactaataatgcatttctaaaggtgaaaaaagaataggtatttttctgtttaatattcaattttatagagagtagtacgttaatttttttaaaccccagaagctcaggatcttatcattttaaaagaaattatcaccagttctgtgtgagtaaataaagtattataacactttgtgtttttcatccatgataccttgtatttacttacctgagctttttttctagggaaagaaaaatgctcaggtaataacagagccttgaaaaatttggattttcaaaactacctatttatgtataggcctttagatcatctgatgttgaatactctttaagtgatctaaaggcctacatataaaaaggtatttttattaaattctggaattaaacatttcagcattacaagaaaagaaagcaaatccactggaacaattctgggaaagaaggaaagactgtgattaaatgcctcttaactacttcagattcctggattgatgtcttatctacaggcttctttttaaaaatcaagaatgattggctgtgagtttaccaggattatagttgaggctaaaggacagctcctcaggaaagcccctgttctacatctacggtcacatgctggaccttgagttgtcactcagagaaaagagtgccatctaccgaaactccacagtttccattgtgaatggcttctttggtgcagagttccaaaaattatgtagcccagctctttaattttgtaacatctaatgatatcaccgccttgaagtgattaaagtagattgcttaaagaattaaagctttaaagatgaaagatgttattgcttttgctggacatgaggaacagttgtaaagtttccaggtctacaataactttctggaaccctctcagtgaactgtttcttgtaaaagttttccctaagataaaagctcaatcccattgtttccacacacataaaaaaaaaaaaaaaaaaaaaaaaaagt

SEQ ID NO: 10640 - DNA, 207 bp, Homo sapiens
  misc_feature 206, 207: n = A,T,C or G
tcacggtgatgttgttgtcgcgccggggcacgctcagcgagcgcacgccggcgtagccggcattgacattcacgctggtgcgcgcactggcttgccagttccagcccacgttggcgccgatctggcgcgtgcggtcttcgctgccgaactccatgccgggcagcagggcgctgtcgatgccgctggccgtttgcgccgtacggtcnn

SEQ ID NO: 10641 - DNA, 555 bp, Homo sapiens
acctacttactattttatgagaattgatttttactaagcctgatttgaatgggttgcatttacaccaactgctatttattaatgaaagtggtagcctgctttttaagtaatatgtgttttggcaacaggagagggttttctgagcttttaacaccagtaaccctgaacttcttccaaaatccacaccttttattcccccttttccttgtctccttctaggtgcctcagtcctggcatctcgggaggactctgccattactcatctgttactgattctgaatcttgtgctctagctctacagcccagtgaagaagcaatatatctttaattcagggcttgcctcttgctttccaactctaacctgagagcagtgctacttttgtaattgcaggtctaaataacttaagcgtatatacagaagccaatcactgatcacttccattgcaatgaggcatctgttgtcaaagaaggaaaccatttgtcaagtcccttatagatattgaatcttcaaacccaaatctggggatgtttacatttctggattaaaatcagtgt

SEQ ID NO: 10642 - DNA, 470 bp, Homo sapiens
tgcgcggcgatggcggcaagcgatgcgccctcctcgcacactgcgccggccagcatggccgtgcgcagttcggccagcacggcgcgcgcgcaggccagggtttgcacgcggccgtaatgtgcaatcagctcaaggcaagccgcgtcgcccaggatgcggtcgaccgacggcaggcgcacggtttgccccgtcgtcatgctggctggccctcgccgctgtcgttcttccccagccacagcagcggattgccgctggcgcgctggtagcccgcttcgcccaccagcaggtcgagcatcaggctggccagatcgtcggccagcggttcgacgttgtaatcgtgttcctggttgaagactttgcgataggtatggcaatcgtcgcaggtttccgcgcgcgccaccttcttcggatcattcgccttgttgggcaatttgtcgtccttcgccgccacggggtcgaacggctttgcg

SEQ ID NO: 10643 - DNA, 447 bp, Homo sapiens
  misc_feature 1, 438, 439, 442, 443, 444, 445, 446, 447: n = A,T,C or G
ncgcggtggcggccgggtacagggctcttgatatatcctggccttaagtctcaggttctccaacaaagctggcagcctgtggtatgccttctggggccagagagtgtggcatgatccgaggtcctgagtctctctctcaatgagcccatcatattggcttaaccaaagccagtggtcttcaggacacggaaaagggagtcccttaggctccaggtttttttcccttcagttcacactgggagaagggtcacagagctccagtgaaatctggtcctgttagatcatttgtggttggctgcagatgcacatgtgggcatgtgatagttttgatttagataaaaagcccacaactgagtggagtgttgaaacctcagggttatagactggtgtatctgtgagaaaaccacaacaagtatggtatttgcccgcgtacctgcnnccnnnnnn

SEQ ID NO: 10644 - DNA, 866 bp, Homo sapiens
  misc_feature 1, 2, 3, 4, 5, 6, 7, 8, 9, 863, 864, 865, 866: n = A,T,C or G
nnnnnnnnncccacacccaaaccaatgtgagtcggccttgagaaaacttaacccagatccaatagggcacgagaacgtgtccacgtttatctcaggccaaaaagcactagcccaaagggcctgttctgctccggccacaggaagctggtgaaatttaaagagcacccaacaagcaaaagagtccaccggggatccagaggcccatggggacagctgggagcctggaatcccacttgcacgccctgtggctttgcaggaaagtatatgggaaatgggggattcttgaagggggtcccactgctcctattcctggagagggggcagggagagctaaggagagatttgttcttcaggcatctgatgtagctggagaccgtgggtaccatggccaaagctgaggcagccagggtgggacaggggcctccaagcaacacagcagtgttagcagttcacctggacctgttgatgagctgtcttagatgcacgaaggcaagagatgtctcatctcgtctctaagatcttagatcttaagtgcagagggaaggcagctgggagtgtggacggcagccacaagggagaaaagtgcaagagcatttacaaccagaagagaagccgaggggacatgatggcccatggacaatgtagccatggacagtgccctgggaggctggtaaggggggtgctgggactggtggtgaagagatcatttttaagaaaaagaatggatttactttctccatcaaccagccacatctatttgctagtctttaaacattttaactacatgggtacttatttatttactttttgagataagttttccctctgttgcccaggtgaggtggtgcgtgcctgtagtcccnnnn

SEQ ID NO: 10645 - DNA, 854 bp, Homo sapiens
  misc_feature 853, 854: n = A,T,C or G
gggactatgggcatgccccagcatgcccagccaactttataaatgttttatagagacggggtctccctgtgttgcccaggctggtctcaaactcctgggctcaagtgatcctcccaccttggcctcccaaagtgttgagattacagatgtgagccactgcacctggcccctcatttagcttttacttacataaataaataaagctctatggcatttcatattcaacagaattgcagaaactgctatttactggaatggtaagggttcctctcctgcccatacctcccacaggcaaatccatttaatcatgtgtgtacacacaggcccctgaaaagcaccatggcagtaagaccttccccacatgagttggtaacctgtaaattatcttagcctttccttattcaacttatcaaaccctcctcagaactccacactattacttcccctttggtgacgtgaagggttggaaccccagcatctcccattcccgatgagtcataactcacacactgcacaaaacgcagtccacataactgaccaatcacttcagccacctggttacccagggcactggccactcaacgaggaaggactgccctgaagcagccacagataaggcttccctttgagtttaaagggtcacaaaacagtaccatggaaaagggaagaaagagggtgatgctgtcacgctgaggacctagtcacaggctgcccgtgaacttggaatcagtgaatgattacaggaaaaaaaagtacataattcactgtactaaaaacgtgaaatttcctcatcactgaaaacacgctcatctgaaatctctgtaaaaaaggatttggctgttaaactcggacnn

SEQ ID NO: 10646 - DNA, 273 bp, Homo sapiens
  misc_feature 251, 252, 253, 254, 255, 256, 257, 258, 259, 260, 261, 262,263, 264, 265, 266, 267, 268, 269, 270, 271, 272, 273: n = A,T,C or G
ccgggcaggtacccccatgctacctgggcactggggtttctcagccactccactgaaatttgcattggcttattgaaagtcaatcacaagtcaaaaccacagactcacataggagaacactgttgtttgggcccagcagctctgaaatcaatacctttaatggtagaacctaaaactaaaataaataggaaggaaggaaggagaaagaaagaaagagaaagaagaaagaaagagaaagggagagagtgaannnnnnnnnnnnnnnnnnnnnnn

SEQ ID NO: 10647 - DNA, 910 bp, Homo sapiens
  misc_feature 908, 909, 910: n = A,T,C or G
acaaatttgggcatagtcagaaactctgctgactctctcttcccatttaacctaatcttaccatagcactcctcaccctatgacttgcccattgcagtaaaccagaaagcaaaaaaaggtcaagcacgtgtgtttgagatccaactctagtgtttgtagcagctctgcagaaccacagtttgcacatctgtaaattgagcaataacaactgccctgcctgtttcacagggttgcttaaagagttatatgagctattgcatgtgaaagtgttccataagctgccatttgctctgaagctcacgggtataattattctagtctaacctacttatgtttgccctcttttctgcagttgcatctttgtgcataaagattctctctccaacctgtgcaattgattcatctttaaagaccaactcaaattcgaccttctaaaagaaatcttctctgaccttccaactctaaactagagtaatttactaactgtatttatcactttcaaattcttcattaggtcttgcatcatagaatattgttacccattggcatttatcatccctgccaacaagacagtgggttccatgtgttagacttcgtgtcccattgctccttgcatctcaaatgcacatcccccaggtcttttgcacatttttgtgtgaggggcagaaacacactgtatgttcatttcgcttagctcttcctctcaccactcagcctgctagcttctccctggacaccatgactgatgatcctctttccctctccctctccaagacttgtgatatgagacacatccttgtgacacatgcaaatattgagaattaacttcagtaatttaaaatctttaatgtaaagtttctgttaaaatatttatggtaaatataagactctgaattgctaaggggaannn

SEQ ID NO: 10648 - DNA, 549 bp, Homo sapiens
  misc_feature 549: n = A,T,C or G
actaaaactattccaggaagactttaacttttgttgattcaaaaggaacatggtgcatcatttagcaccgtagggtcatcgttatgataatccatttttattacagtcctgtggttctcatctaccctaattatccagcaagtggttcattgcagattctgatttattccatcctacctcaaccctattaccaactatcaccacccaccacccgccacccaaactggaagacaaccagagataaatcctcaagaaacttctttttaagagggtggttaacaaagttaaattgggtagaaaacagatgaagcaagttttaatctctttgctgagtaagaatagtgcctacatggtgtgggtgatcatgtgtaagactctgatgggcaaacctggggcccattacgagggcatgaagactcaggcatctgagctggaccatggcactaaaagattacagtgatgacaactgtaacgatgatgggtatgacgggaatatctctaacatcatcatcttcaattgtagcatgtggtccttatgttccaggcacn

SEQ ID NO: 10649 - DNA, 687 bp, Homo sapiens
  misc_feature 678, 679, 680, 681, 682, 683, 684, 685, 686, 687: n = A,T,C or G
tacacctgtccatgtgatgaattagaacatgcttttccacctataaactacaacttaatttgcataacttaatataagtagtattaatgtaagtgttatacatatttcaggttataattttgattacaatttgaagacataaatacaattggtttagttataaaattacactacttacttgctactttataactgctcactacctccttagtggaacccagattttctctatgatttgagaaaaattactccacatgttgcctagttatcaaactatattgggaagcagaaaaagctatgaaaggcttcaaagcttctgagaaccttagcacgaaaaactcttccaaaaagcttttttcacttttcaatagttcctctttacatcacatttataatcactcaccagcaatctcttttccatgcttgatttgtgaggcttattgaaaacaatggcattgacgttcattctgactccttgatttccattgttttcaggagttttcatctgctgaaggcaactaatccacaatgagcaaattatcctgccctggagggtaagctataatatcggtcccatgcttcaggaagagaaaatcatgtgttctttcttataccttgatagtcatccattgctgtgtcttcacatggcagaaggagcaaacgatctctctgatgccnnnnnnnnnn

SEQ ID NO: 10650 - DNA, 3621 bp, Homo sapiens
  misc_feature 1, 2, 3, 4, 5, 3619, 3620, 3621: n = A,T,C or G
nnnnnctgccttgtctccgccgcgggtcaggggtgagagctggaatctctgcacgggccttggaaaacgactgtcttcttctgccaaaatgtcaggaattggaaataaaagagcagctggagaacctggcacctccatgcctcctgagaagaaggcagctgttgaagattcagggaccacagtggaaacaattaagctaggaggtgtctcttcaacggaggaactagacattagaacactgcaaaccaaaaatcgcaagctggcagaaatgttggatcagcggcaggccattgaagatgaacttcgtgagcacattgaaaaactggaacgacgacaggccactgatgatgcctcactattgattgtcaaccgatactggagtcagtttgatgaaaacatccgtatcatccttaaacgttatgatctggagcagggcttgggagacctactcacagaacgaaaagcccttgttgtgcctgaaccagaaccagactctgatagcaatcaggagcgtaaagatgaccgagagagaggggaagggcaagagccagctttctctttccttgctactttggccagcagttccagtgaagagatggagtctcagctgcaggaacgtgtggagtcttcccgccgagccgtgtcccagattgtgactgtttatgataaattgcaagaaaaagtggagctcttatcccggaagctaaacagtggagataatctgatagtggaggaagcagtgcaggagctgaactctttcctcgcacaggagaatatgaggctacaggaattgacagatcttcttcaggaaaagcatcgcaccatgtctcaggagttctccaagttgcagagtaaagtggagacagccgaatcacgagtgtctgtcctggagtccatgattgatgacctgcagtgggatattgacaaaattcgaaagagggaacagcgactcaaccgacacttagcagaagtcctagaacgggtgaattccaaaggttataaggtgtatggagcggggagcagtctgtatggcggcacaatcactatcaatgctcggaagtttgaggaaatgaatgcagagcttgaggagaacaaagagttggctcagaaccgtctctgtgagctggagaaacttcggcaagactttgaggaggtcactacacaaaatgaaaagctgaaggtggaattgcggagtgcagtggagcaagtcgttaaggaaactccagaatatcgctgcatgcagtcacagttctccgtcttgtataatgagagcctacagttgaaagcacacttggatgaggctcggaccctgcttcatggcaccagaggaacccaccagcaccaggttgagcttattgagcgagatgaggttagtcttcataagaagctgaggactgaagtaattcagctagaagatacattggcccaggtccgcaaggagtatgaaatgctgaggatagaatttgagcagacccttgctgccaatgaacaagcaggccctataaacagggagatgcgccacctcatcagtagcctccagaatcacaatcaccagctgaaaggggaggtcctgagatataagcggaaattgagagaagcccagtctgacctgaacaagacacgcctgcgtagtggtagtgccctcctgcagtcccagtctagtactgaggacccgaaggatgagcctgcggagctaaaaccagattctgaggacttatcctcccagtcctcagcttcaaaggcatctcaggaggatgccaatgaaatcaagtctaaacgggatgaagaagaacgagaacgagaaaggagggagaaggagagggaacgagaaagagaacgggagaaggagaaggagagagaacgagagaagcagaagctaaaagagtcagaaaaagagagagattctgctaaggataaagagaaaggcaaacatgatgatggacggaaaaaggaagcagaaattatcaaacaattgaagattgaactcaagaaggcacaggagagccaaaaggagatgaaactattgctggatatgtaccgttctgccccaaaggaacagagagacaaagttcagctgatggcagctgagaagaagtctaaggcagagttggaagatctaaggcaaagactcaaggatctggaagataaagagaagaaagagaacaagaaaatggctgatgaggatgccttgaggaagatccgggcagtggaggagcagatagaatacctacagaagaagctagccatggccaagcaggaagaagaagcactcctctctgaaatggatgtcacaggccaggcctttgaagacatgcaggagcaaaatatccgtttgatgcagcaattgcgggagaaggatgatgcaaatttcaagctcatgtcagagcgtatcaagtccaatcagatccataagttgcttaaagaagagaaggaggagctggcagaccaggtgttgactctgaagactcaggttgatgcccagctacaggtagtaaggaaactggaagagaaggagcatctgttacagagcaacattggcacaggggagaaagagctgggtcttaggacccaagccttagagatgaataaacgcaaggcaatggaggcagcccagcttgcagatgacctcaaagcacaactggagttggctcagaagaagctacatgattttcaggatgagatcgtggagaacagtgttaccaaagaaaaggacatgttcaatttcaaacgagcccaggaggacatctctagacttcgcaggaagctggagaccacaaagaaaccagacaatgtacccaagtgtgatgagattctgatggaagagattaaggattacaaggcacgcttgacctgtccgtgctgtaacatgcgtaaaaaggatgctgttcttactaagtgttttcatgtcttctgctttgagtgtgtgaagacacgctatgacacccgccagcgcaaatgtcccaagtgtaatgctgcttttggtgccaatgattttcatcgcatctacattggttgatctaagtcaagagaagaagaggagctggctagtcaggaacttattcattaaccaccaaacctctacctcttctctccttgactgtcacctgtaggacagtttatcagtcaactacctttcctccagactttacttccaggctctcctcttcagtagctggatgactttagcagaaaggactggtaaatacaagccttgggtttcagaatgaattagaaacaaataactcttactgtcttccctcccagctttgtttattttgtgcttttagacttttcagtgttttctttttccagcccactgtataaacttggattgtccattcctcctgaagaaatcaagttggtattttgaatgtggaaagggaacaaagtgggaacatggctactttggcggagtgatattttaaacaataggtgctatggcccaggttctccttgggtgcaacttctgtgatgtggcttccacggtttatgggcaccccctggtgtgaacagaaatgtttgagtaagtttccctaagaatgtaacagcgccttaataaagacgaacgacggaaaaaaccgtaaaaaggaatatgaaaaaaacttcaggttacagacannn

SEQ ID NO: 10651 - DNA, 1900 bp, Homo sapiens
  misc_feature 1, 2, 3, 4, 5, 6, 7, 8, 9, 10, 11: n = A,T,C or G
nnnnnnnnnnncagtctccgtagagactgtcaaaaattgccagcgctgattatatttcaagtcatcacggtggggtattgggaaaatttccaattagcaataatcgcgtctcggataaatctcattggctacggtactgccactgtgcaaagctagcttgacgtaggactttgatggtcatgtataacacctcacaggggcagaacctcctccatccccgactccaaagactcatgtaatcagtacgcaagaaagttcagagatgagacctctggttgtattccacctttgggacatgggggatgtctttagttcaaagtcacaaataaatgcaggttctacaattcagaggcttcatatccctgctggagtattacatgtttattcaggatggaccacttttcttagcaacagtttctaaacctttgccaggtctgggaagtctggcaggagagatttctaagaaccaatcattcctgcacacatttcttgaagataatatacattattccctagttatctcttcctaggtttttgtaggctcatttcaatattacaacaatctttattggaaaaccccaagtattttgtcttgaaaaatcagcaatccaggtattaaaaatagcatggaatgcccaattttactttgataattacatggtagtcagtttccgctcctggctaaagccttggattttcttctgggcagttcctaaaggcacaggtggcatggaagaaatcattccattttcatctcctccccttatttgattggtgtctggttaccaaaagagtcatcaggcccttggattaccttcttgaactgatcttctagatcgcaagtcaagactgccatcatgttcccccaaatgcaaaaagccttgttgctccacctctctcctttccagaacaagtgagctggggtttgctttcttctccatatcctgcagcttgatcaatttttctatcaggaacattttatctttgccctcattaatgatctgctcatggagcagccttatcataatcttccttccctctgtgatctgccagtaaagataggtgatgattagcacaatgagggtgaggatgaaaaagaagtgcacacttccaatgaggttccgatagatccaaacaacccacaggtagccaggccgtgtacttagggtgtcgatccagctgtagatggagtgaatgaagagaggcagacctcgaaaagggccacagtcagctgaaggcttcaatctccagatggtgatggccagggtgcacaagaccccggtgaaggatgggaaaaagagcaagaagatgaagaaagtcatcatctgtgaggcccgccaggctttgctcggaggctggaaattcatcatcaggctgatatttttggagtagaacatgatgaaaagcataatcatttggataaagggcagcagggggcagaagaagatgccaatccacaccagagtttgtgcatagatcagttctagaacgttcctggcaatgtcaaactcctgaaggccaagacttgtgatcagttgcatcccaatgattctcctcagaaactcccccaggaaggaattgactaaagagaacacaaaatccatcagaaggagccggtagatgtcctggccaatgagggtttcccaacactcttcaccagacagggccacggtgttgagccaatagtaacaaagaatgccaatgattgatattttcaaaaagatgtttcggatcaggagaacgtagacttcgtgccgtggcatctcgtacctctccacaagcctgaacatggagtagatgcatggcacggccagattaatgcaggacgcaacgaaaggcagtaacagcaccgccccagggttactgtgtgtcttcaggaactctaagttgtacctgcccg

SEQ ID NO: 10652 - DNA, 1764 bp, Homo sapiens
  misc_feature 1, 1762, 1763, 1764: n = A,T,C or G
nacaagactgtagaaaatttgcgcgtacctcgtccttagctatgtaaggtgcgcgtgacggccttttgtgtttcggttaaaagttcctctcccggggcgggggcgcgtaaccttctcgggtccaacattccccctcccctccattcggaatagccaccatcagccggctatttaaggtttctagtaaagaggggtttcaccatttgccagcttggtctcgactcccgacttcagggatccacccactgcctcccaagtgctaggatacagcatgaccactgtacctgcccttgtttttgctttttgagacagagtctcactctgtcacccaggctgagtacagtggggcaatctcggctcaatgtaaactctgtctcctgggttcaagcgattctcctgcctcagcctcccgagtagccgagactacaagtgtgcaccaccacacccggctaatccctgtatttttagtagagatggggtttcaccatgttggctaggctggtcttgaactgctgacctcaagtgatcggcccgcctcagccttccaaagtgctgggataacaggagtgagccactgcacccagccttcttgccattacttttaatagcaaaaagcacaattacttttgcaccaacctaagagatgcagagttgtcaatttgtctcatcctttttctgcagggcatcagaaaaccattctggtgaggtccacacccataagtcaccatgtacaaggactgcatcgagtccactggagactattttcttctctgtgacgccgaggggccatggggcatcattctggagtccctggccatacttggcatcgtggtcacaattctgctactcttagcatttctcttcctcatgcgaaagatccaagactgcagccagtggaatgtcctccccacccagctcctcttcctcctgagtgtcctggggctcttcggactcgcttttgccttcatcatcgagctcaatcaacaaactgcccccgtacgctactttctctttggggttctctttgctctctgtttctcatgcctcttagctcatgcctccaatctagtgaagctggttcggggttgtgtctccttctcctggacgacaattctgtgcattgctattggttgcagtctgttgcaaatcattattgccactgagtatgtgactctcatcatgaccagaggtatgatgtttgtgaatatgacaccctgccagctcaatgtggactttgttgtactcctggtctatgtcctcttcctgatggccctcacattcttcgtctccaaagccaccttctgtggcccgtgtgagaactggaagcagcatggaaggctcatctttatcactgtgctcttctccatcatcatctgggtggtgtggatctccatgctcctgagaggcaacccgcagttccagcgacagccccagtgggacgacccggtcgtctgcattgctctggtcaccaacgcatgggttttcctgctgctgtacatcgtccctgagctctgcattctctacagatcgtgtagacaggagtgccctttacaaggcaatgcctgccccgtcacagcctaccaacacagcttccaagtggagaaccaggagctctccagagcccgagacagtgatggagctgaggaggatgtagcattaacttcatatggtactcccattcagccgcagactgttgatcccacacaagagtgtttcatcccacaggctaaactaagcccccagcaagatgcaggaggagtannn

SEQ ID NO: 10653 - DNA, 822 bp, Homo sapiens
  misc_feature 822: n = A,T,C or G
ccggaaacgcataaaacagagagaggcattctgagtcatctgactggatgaagactgttccaagttacaaccaaacaaatagctccatggactttagaaattatatgatgagagatgagactctggaaccactgcccaaaaactgggaaatggcctacactgacacagggatgatctacttcattgaccacaataccaagacaaccacctggttggatcctcgtctttgtaagaaagccaaagcccctgaagactgtgaagatggagagcttccttatggctgggagaaaatagaggaccctcagtatgggacctactatgttgatcaccttaacccgcaaaccccgtttgaaaatcccgtggaggaagcccaaaggaaaaagccgttaggaccggttgaaattgggtcttccaaacccgatatggaaaaatcacacttcacaagagatccatcccagcttaaaggtgtccttgttcgagcatcactgaaaaaaagcacaatgggatttggttttactattattggtggagatagacctgatgagttcctacaagtgaaaaatgtgctgaaagatggtcccgcagctcaggatgggaaaattgcaccaggcgatgttattgtagacatcaatggcaactgtgtcctcggtcacactcatgcagatgttgtccagatgtttcaattggtacctgtcaatcagtatgtaaacctcactttatgtcgtggttatccacttcctgatgaccgtgaagatcctgttgtggacattgttgctgctacccctgtcatcaatggacagtcattagacaggtagagccgan

SEQ ID NO: 10654 - DNA, 2174 bp, Homo sapiens
  misc_feature 1, 2174: n = A,T,C or G
nagagtttggtgtaaagttcaaagcgcaaccgaagggcaatgcccgacttgtagtgtgcgggccccttttataaggaaagaactgccgtccgggaccgggggttacgagcgtttattaatgcctttaagggaagtctcttggaaacggtgtctgtccggagaagcgtggcccaaattccctgggggaccaacctgccgtcccgaaggaccaggaggtactttgtccccaggacggaccggaaagggcacgcattgaatactgctctgaactcaaggttaacttctagcagaattaaaggagtcctcgtttttttaactattaaaggtcactctatgatccagagctggaagaactgcttctaaaaaagaacgtcctaatgaaggcaggacccaaagttatttccagttcctagtcctgctttctgtagctgtaggtatcagtatagttggctaagataacaagaacagagagattggcccaactctgggaaccaaatttacatgttttgcacttaagttagtcaaattcatttttaaaaattaggttatcataaagacttcagttatggaatagaaattccataactcgcaagtagaggggaatgggaggaagaattagtcaactaaaaagtgcatgtctttccaaagcaggtgtaggaggtcaagaggggctcgaggcttctggaagttttgctcctttacaggttttgatctagccacttgatgtaactattcctagtccggattcccactgagaagttggtgggccagctagtgaaaatcatacatccgtgaaagccatcctcaaagtgatccagggtcacctccacaccggcactctccaaacgcttggcatacatgatgccatcgtctctgaggacatcatgctcacacgtcagaatgtaggtctttgggaggagctgcagcactgcctggtctgcaatgagtggggcggagcgggcatccagcaactgaggaagctcctggacaatcctggcattgcctgtggtctgtacaacaggcttgtagttctttgtgaaggatgcaggcaagagggatgtccagtttagacgggccctgacagcagcagcctcttccacatcaagtgaagtgtgattgttaacgatcattgcctgcacaaagtcatagttgcctttgaagtagtccacccaatacttcaccatgacatagcggggcaggattggggtgttcacattttgctgataagatggtgtgttaaaatctaaagcttgaagaactggataaattaaagcttgtagtttgagcttattttttaggctggcatcttgagtaaactgttgtccaagggcagcagccagatttccaccagcactgtcaccagaaatgcaaattctgcctggatcaaccatatacttctgtaagacttctggcttcaggaaatactttgtggcccgtacaacatcatgaatttgctcaggaaaataaacctttggaactagcctgtattcaatggaaacaatgacagcattcaattcctcagccattgctgtacacagctcatcataatacctgatttttgcacttgccaaggcccagcctcctccgtggatataaacgacgctgcgtttcagtggctcttcgggcttcggagggccttcaaacactctgacttccacaccatcaaagtctgtgtcggtcaccttcacttgggcagaagaccacgcgctttttttgccaaaagaaacaatgataaaattcagtgccagcaggtgatggctcagtcccaggtagtggatcaggttactcacttgctgtgcaccccggaaagtggcgtccagcagcatcagcttccaggggtcggacacggagccaggcagcgggatgtagacgtaataggcggccagcgccaccagggcggtgagcaggacacaggacgacctcatcttgccccggctcggctcgccagcgggctggcaaagaggaaagggcgataccacccggagacctccggcaactttctgcccgcggcagctgctcattcacgcgtttcttataagcccaggagccaatcagaggctgcgtcgggaggaagttggagcgcggacatgccccctgtgcggtgtccttgcaaagtgtggcagtcactacaggtttgaggaaggctctgtcgccggacgcgtgggtcgactccn

SEQ ID NO: 10655 - DNA, 289 bp, Homo sapiens
  misc_feature 1, 2: n = A,T,C or G
nnactatgggcaattggagctcaccgcggtggcggccgaggtacgcgggggacaggccatctcgctataggaaaggaaagtggaacagcattcatcctcaacatttttacgaagacaaaatgaagactggagtagaagactgatcagtgcaggtgtagcataaaagtgtaatcctggaagatgtggtgtgagaagcatcatcagcatcatgctattacaatcccaaaccatgggggtttctcacagctttacaccaaagggcatcactatccctcaaagagagaaacct

SEQ ID NO: 10656 - DNA, 752 bp, Homo sapiens
acgcgggtcttttaaccagtaatttaatcttcacatcacttttacttagaccttgatgaatgctcccagtccccgaaaccatgcaactacatctgcaagaacactgaggggagttatcagtgttcatgtccgagggggtatgtcctgcaagaggatggaaagacatgcaaaggtgagtgaagagtctctgacaatcgtgaccctagtctgtatcttttctttcaaatttaaatattagattatcaggaattatgccatgtgcatcaccttcattaaaaggtcccatcctagtggccatgttattgctcatagaaaaactctaccaatatgctcattgcaggaagcagagaggattaaaacccaagttaaaacagtttgcttcttatagaaaactgcataaattttaaaaaataaaataaaacaaaagttttggtatgggaagagatcgaaacaaatcactgaaataagatatttgttgttgttgcttatctaagcttttatttctctaagctacccttattacaggtttactgtggaaaagtgaaaatggataggtaaatttaaattttttgctataggtagtatcaaaagtaattatttatcaagctaaattagatcattaaaatagtttcaatactatactcatatatttgattttatagtaagcctcatcagaatgaaattaatggactgagcaaatttttaaaatgtagattattctcagtaaaatgaggttttatttccaaggcata

SEQ ID NO: 10657 - DNA, 1854 bp, Homo sapiens
  misc_feature 1, 2, 3, 1847, 1848, 1849, 1850, 1851, 1852, 1853, 1854: n = A,T,C or G
nnnatgggcacctcttaaaggccaggtagaagagaggcaaccgaaagttactcagtagaacagtacagtcctcatttcttcaaggcagacagccttaaccacctagaggctgatggcctggggagtacttttcaagttctgaagcagatttgtcaaagtagacaaaatggcatttccctcctgaagattcttcactacctcgattcttatgaaatagtctaaggaagttctaaagaaataagacaagtgaattctattttcgttaccagagaaatacaatcgtactagacggggctgtaatctggtaactgtatgtattttagttcttcagtccctgggaaggagacaggagaaggtgggagggaggaaggggccagctgaaatggaaacagatccctgatccggggcggtcagtggaacccttcttggtgtgcgagagcctgtgcatttcagaggcagcaaaaaagttaaaaaaaaaaaaaaaattgatctttgtttagattaacagacccctgactatgaagaaggaaggcatccagaccagaaaccgaaaaatgtctagcaaatccaaaaagtgcaaaaaagtgcatgactcactggaggacttccccaagaacagctcgtttaacccggccgccctttccagacacatgtcctccttgagccacatctcgcccttcagccactccagccacatgctgaccacgcccacgccgatgcacccgccatccagcctgtcctttggaccacaccacccctccagcatggtcaccgccatgggttagagccctgctcgatgctcacagggcccccagcgagagtccctgcagtccctttcgacttgcatttttgcaggagcagtatcatgaagcctaaacgcgatggatatatgtttttgaaggcagaaagcaaaattatgtttgccactttgcaaaggagctcactgtggtgtctgtgttccaaccactgaatctggaccccatctgtgaataagccattctgactcatatcccctatttaacagggtctctagtgctgtgaaaaaagaacaatgctgaacatgcatataacttatatgtaagaaatactgtacaaggacttgatgcatctgggtagctgtagggcatgaaggatgccaagaagtttaaggaatatgggagaaatagtgtggacattagaagaaactaggtctgatattcaaatggcaaactgccagtttgtctcctgtcactggccacagtgttggatgcattaaaagagaataaaaaaaaagaaaaacagagaaagcgaaaaaaaaagaaaaaagtggtaggcgaatcatttgttcaaagctgtgggctctgcaaaggaaataccagttctgggcaactcagtgtgaccgttcaccagtggcccatttgagggttcagagagcctttttctaggcctacatgcttgtgtgaacaagtcgcctgtaatggtggtcggtatgtataattcaaggagcaccacattaggacaagatgtggatctattcatcatgtttatacaaggccgacggtggcattaattcattgaagggtagtcttaaagaacggttcttccgtgtggtggtgaaaaattttccttctctctcaaattcgggttggattaactagattacttcagggggcgagaaaaaaaaacacatgaaaaaggacaacaagggggcgtctaaaagtgcccggaggaccacggcacggaccgggttgagaaaggggccccaaggggggaaaacaagagggggggtcaaacgcgggcggacacggccggcctgggagccccgggggcagggaccccaaaaagccgaaaataggatggcacatacnnnnnnnn

SEQ ID NO: 10658 - DNA, 2292 bp, Homo sapiens
  misc_feature 890, 891, 892, 893, 894, 895, 896, 897, 898, 899, 900, 901,902, 903, 904, 905, 906, 907, 908, 909, 910, 911, 912, 913,914, 915, 916, 917, 918, 919, 920, 921, 922, 923, 924, 925,926, 927, 928, 929, 930, 931, 932, 933, 934, 935, 936: n = A,T,C or G
  misc_feature 937, 938, 939, 940, 941, 942, 943, 944, 945, 946, 947, 948,949, 950, 951, 952, 953, 954, 955, 956, 957, 958, 959, 960,961, 962, 963, 964, 965, 966, 967, 968, 969, 970, 971, 972,973, 974, 975, 976, 977, 978, 979, 980, 981, 982, 983: n = A,T,C or G
  misc_feature 984, 985: n = A,T,C or G
tatagggagtcgaccacgcgtccggggtgaaggtggtgcccccggacttccaggtatagctggacctcgtggtagccctggtgagagaggtgaaactggccctccaggacctgctggtttccctggtgctcctggacagaatggtgaacctggtggtaaaggagaaagaggggctccgggtgagaaaggtgaaggaggccctcctggagttgcaggaccccctggaggttctggacctgctggtcctcctggtccccaaggtgtcaaaggtgaacgtggcagtcctggtggacctggtgctgctggcttccctggtgctcgtggtcttcctggtcctcctggtagtaatggtaacccaggacccccaggtcccagcggttctccaggcaaggatgggcccccaggtcctgcgggtaacactggtgctcctggcagccctggagtgtctggaccaaaaggtgatgctggccaaccaggagagaagggatcgcctggtgcccagggcccaccaggagctccaggcccacttgggattgctgggatcactggagcacggggtcttgcaggaccaccaggcatgccaggtcctaggggaagccctggccctcagggtgtcaagggtgaaagtgggaaaccaggagctaacggtctcagtggagaacgtggtccccctggaccccagggtcttcctggtactggctggtacagctggtgaacctggaagagatggaaaccctgcatcagatggtcttgcaggccgagatggatctcctggtggcaagggtgatcgtggtgaaaatggctctcctggtgcccctggcgctcctggtcatccaggcccacctggtcctgtcggtccagctggaaagagtggtgacagaggagaaagnnnnnnnnnnnnnnnnnnnnnnnnnnnnnnnnnnnnnnnnnnnnnnnnnnnnnnnnnnnnnnnnnnnnnnnnnnnnnnnnnnnnnnnnnnnnnnnnacgtggagctgctggcatcaaaggacatcgaggattccctggtaatccaggtgccccaggttctccaggccctgctggtcagcagggtgcaatcggcagtccaggacctgcaggccccagaggacctgttggacccagtggacctcctggcaaagatggaaccagtggacatccaggtcccattggaccaccagggcctcgaggtaacagaggtgaaagaggatctgagggctccccaggccacccagggcaaccaggccctgctggacctcctggtgcccctggtgcttgctgtggtggtgttggagccgctgccattgctgggattggaggtgaaaaagctggcggttttgccccgtattatggagatgaaccaatggatttcaaaatcaacaccgatgagattatgacttcactcaagtctgttaatggacaaatagaaagcctcattagtcctgatggttctcgtaaaaaccccgctagaaactgcagagacctgaaattctgccatcctgaactcaagagtggagaatactgggttgaccctaaccaaggatgcaaattggatgctatcaaggtattctgtaatatggaaactggggaaacatgcataagtgccaatcctttgaatgttccacggaaacactggtggacagattctagtgctgagaagaaacacgtttggtttggagagtccatggatggtggttttcagtttagctacggcaatcctgaacttcctgaagatgtccttgatgtgcagctggcattccttcgacttctctccagccgagcttcccagaacatcacatatcactggaagaatagcattgcatacatggatcaggccagtggaaatgtaaagaaggccctgaagctgatggggtcaaatgaaggtgaattcaaggctgaaggaaatagcaaattcacctacacagttctggaggatggttgcacgaaacacactggggaatggagcaaaacagtctttgaatatcgaacacgcaaggctgtgagactacctattgtagatattgcaccctatgacattggtggtcctgatcaagaatttggtgtggacgttggccctgtttgctttttataaaccaaactctatctgaaatcccaacaaaaaaaatttaactccatatgtgttcctcttgttctaatcttgtcaaccagtgcaagtgaccgacaaaattccagttatttatttccaaaatgtttggaaacagtataatttgacaaagaaaaatgatacttctctttttttgctgttccaacaaaaagcatttgaattgtatttg

SEQ ID NO: 10659 - DNA, 1677 bp, Homo sapiens
acgcgggaagcacatatttggtagcctttgcatacaagaatgtgaaatttgttctcaagcacaaagtagcacagaagagggaggatgctgtttccaaagaagtgactcgaaaactttctgaagctgataatagaaagatgtctcggaaggagaaagatgaaagaatcttgtggaagaagaatgaagttgctgattatgaagctacaacattttccatcttctataacaacactctgttcctggtcgtggccattgttgcttccttcttcatattgaagaacttcaaccccacagtgaactacatattgtccataagtgcttcatcaggactcatcgccctcctgtctactggctccaaatagaccatgtcagcttcaccccctggctttgtgtctatgggtggcctgtggtatatggaaaagtagcagggtggtcagggtgggagacacaagatgtttttatagtctagagcctttaaaaaacccagcagaatgtaattcagtatttgtttattggctgttttttgacagattgttgaaattaaatgaattgaaagggaaactcagagtactaggacgtttattaaaaggaaaaaatgtcttgcaatgtgctgtaatcacaagaggagaaaataacttgtttccttgatctgtcagaggtcacagtaacctgggccgagctgttattatttattatataatagtagtaggaagttaataactggttctctgtgttccaagcacaatattacaacttcttttgaaccgtaaatatcagaatgaatcctcttcccaggggattgaacagaagcttaatgtttacaagtgtttgaatttgtgatctgaaataacacaaaattaaaaacatgatttctctaattttccaactagaggaagagaaacttgtggaaaagttcttttttttttcttttttttcttaaagaagggcagccaaggtagtaacctaaaaatagtgcccaggcatatgagagttgtcctacgaggttaaagaacacactgttccactgtatggctttggccctgagtggccagggaggtcaacttgaccctgccatgttggtttgacttactaagacacaggaatcattgttttccttgaccagggtctcacaccctggaggaatgttaagtaagagaaagaacctctttcctgaatattgacatgtaaaagaccaaagtaatttttctgaacttctgcaattctgagaactctccaaggaatttacagtgattttagtgtttgtcagcatttttccatgaggactttcatacatttgactctttagttcacaggttcccattgattgtgagcaagatatttatctctttagcccttggggaaaaaatgctgacaatcactaaaatcactgtaaattccttgaagagttctcagaattgcagaagttcagaaaaattactttggtcttttacatgtcaatattcaggaaagaggttctttctcttacttaacattcctccagggtgtgagaccctggtcaaggaaaacaatgattcctgtgtcttagtaagtcaaaccaacatggcagggtcaagttgacctccctggccactcagggccaaagccatacagtggaacagtgtgttctttaacctcgtaggacaactctcatatgcctgcggacgcgtgggtcgactc

SEQ ID NO: 10660 - DNA, 1063 bp, Homo sapiens
acgtacgtggcgtagcattccatgttcagctttgacatttattttctcatatcaaccctttttacacgtgaaacacaatctcgctcttgaagtcttaactgcatgatctgtgaaacctgtatttatattttcttcagtgtattcttgtcgtgtgtgtgtcctaaacaaaccaaaagaaaactttccaaatctaaagtattcattctccaattggagcaagaggagtcagttagatactatcacggcattcatttgtggctggcttgtcatatttacttatgattgataataaatctattttgctttttagagcctcccgagaagccatctgccttcgagcctgccattgaaatgcaaaagtctgttccaaataaagccttggaattgaagaatgaacaaacattgagagcaggtaaattttttaatggaactatgcaaagaccaatatttcaatattggacattttgatggtccttctatccccaatgctttatttttttcaactttgatgaaaagatttgatctaggtaatgccaatactggtattgatgtttgaaaagctggtattacaagcacagtaattttcaatatctttttttaaaaatgtaggcttaatctcagatgtttctacttttgtatcctgaaactgtaatgttttctattttgaacttctgtatttcttaaggattcaagaaggtgaatgttgaaactccaatttctttttttagctcttcgaagcttgattcaaattccacggtttacttcggggatcccatctcttactgatataacccttgtgttttaacatgaattaccttgtttccggtgttgtcactttgagaatcctaagaaaatcagtaactcggactagtgaactctgtgtgtttatgtgtgtgtgtgtctgcgtgtgtgcctgcgtgtgcctgtgtgtgcctgtgtggtaactttaccttgtgaagatgaggaaaagaattattcatttctttgtgaatatttgataaacacactttttcatgaaactgtgattctgaagcgtttggctttagagtctttttacactagt

SEQ ID NO: 10661 - DNA, 584 bp, Homo sapiens
  misc_feature 531, 574, 575, 576, 577, 578, 579, 580, 581, 582, 583, 584: n = A,T,C or G
actttgttttttttttttttttttttgaaccaaaatcatagatttagagttggaagtgacctttgtgatcattatttcaatcctttcagagaattctctctgcaggaatatctatgtaggacttggatttgacccaagcacatacaatgtctcagagggctctctgctcctggccaagagcatcaggtcttgtttttaatataatcagtgttgtaaattatggcacagagaacaggctcattcagctgtggaatgaactgagttaaatggacttgtaaacatccctaaatgaaagaattaaaaagtcaaatgaggaattatatagccgtcccttggtatcctcaagggattggttctaggacccctggggataccaaaatcctaggatgctaaactccctgatataaaacggcatagtatttcaatataatctaagcacatgctcccatatacctgaaagcatcgctatagattacttataatacttaatacaatgtaaatgctatgtaaatagctgttatactatagttnctttatttgaattatttttaattggggctcctttgctgaatannnnnnnnnnn

SEQ ID NO: 10662 - DNA, 431 bp, Homo sapiens
actacatgtaacaatgacaaagcaattctgtgacagaattgttgtctgatggatgcctgagttttctgattctagatcccaaatatttatagactgtgagaacgcaccttgctagcactggtcaagccaatgcttctgactttttttattatcagtgaagagggctttttgttatagttctaatgctcttttattctagaaattgcctcagacagggattgatgtcaggaggcttcaaggagagaaatatacatgaatgggagaccccaggttgcaggcaacaagagtcacaggtatgggagaaaccaggaagtctgtgccatgttaactttgctcatctcatcgtgctttgtactcagataagaatatcatccagaaacacagcatgttacttcttgtaagtgagtcttactgttccacaaaacccgcgt

SEQ ID NO: 10663 - DNA, 871 bp, Homo sapiens
  misc_feature 868, 869, 870, 871: n = A,T,C or G
ggcggtcccagatttggtgggactctcctctggtatcagttttcaacgccacttcttgtttggagtcattcccagtgcagtcatggactctatgaacaaatacggttatttaaatgtatttgtccagtatgagaatcagaatgaactagtagaggctttacagatcagttggtctgacccattttacagatgaggaaacaggcctgagaagatggagggagttacccacaatctgaaggggctctaccatgactagacccaggtcacctgcctcccaggcctggctctttccactccgaggtgctggctcaccacagacttattctttaatggaattttggaaaggcctcactccagtgactctttggatctttcttctctaagtagatgggaagcctgtaagaagagacttggaggcaaagcaaagggaatcagcacttaaccctcacccaaagggcccaagagaatctttagtaactggaggcagagcagactggagcctctacggggcatctccccatattggagaattcagtctttgttttggaaatcttataatgtctttggagaggctttaaataattttgtttttcttagcaatgttatgctctattttgagacatggattttttttttcttctagtgtttctctcctgaggcaaagcccaacacacctgtcttttgtccacttctccagcaaattagatttgtctctgggaatgtgtttgtaacataccaacctactgcagaccagcagagggagctcccatgttgaatttgtttgttagctattttcccccctttcacaaaaactatttcttgacgacctttgagagatttcaataaaaattttaatcagagcctgaannnn

SEQ ID NO: 10664 - DNA, 356 bp, Homo sapiens
  misc_feature 356: n = A,T,C or G
acgcgggggttactaaggcagcagagtagaaagatgaagtgcaaggacctggaaatcagacacacctgggttcctggtaagcttcactgcttcctggtctctgatatcagctctgcccaaatttcagctgtcacagaatgagtgatcctcatagtataatggaaatgcatcatctcagtttccccatggcctgaatatccatacaaaatgagagccggtagagaaaaacagaggacgtgaggagtttttaaaaattgaggaaaagtggaaggaaaagtaaggatgaaggtgaagatgaaggaatatgtcagagatgctagcactggcatcccccaccacacagtacctcggccgcn

SEQ ID NO: 10665 - DNA, 1784 bp, Homo sapiens
  misc_feature 1, 2, 3, 4, 5, 6, 7, 8, 1784: n = A,T,C or G
nnnnnnnnaaatgaactaaaatagctagcacacatctataaaccactctgacactggtgttaaggcctattctcaaaaaagaaaaaatgaaattactctgaataacagtataacatcatgatataagggatatctgaataaaacataggcaagtggtttacaaatggtagtcagaaaacaaaggtcagaaagatggtagattctaagatggttagggagatagtcaaaatgatgtggctaggtatggatgaaactttgtaagaataaaaataaaataaaattggccactaggaaatcattataatgttcttttactttgagaaagggagaaattacatcaaaatacaaagatgtaaattagaaaaacatgtcagaaagtggctatttctgaaatgaacaagccaagtcaggtcacagccaatgttagcctaaaagcagaacacaggagtcttgacaagaaggggctgaagataagctgggggcctcctgtgttaaccaaagacatgacataaaaattcagtatgcccctaataaatgaaagttttccaataaaagcagcttctcccatgtggtatttgtcatggtacttagaaaaatggttatttctaagcctcagtgaaacgtgtccaatgaaagaaaagcctgaattaccaacatgggttagcatcactcacacgcaggcagagataacagcaagtgtcatttaagacttttctaaaacttcatgccttaaggagtaaagatccagttcatatagggttagcaactgccttcagcgaagaggaaaacagtaaataattaacaaaaagatcaagtcaggagataaggctaagagagacagactgaaaggttagaggaggatagtgaggcttggagacttgaaaaacagaggagcgtgaagattaagtggagacaaacggcacacaggaaacagaaattcccaagtgtggaagagactagacagctgaaataaggaacgcaggtgaaaagtcactctaaaattcagatgatgagaagttgaaaatatcagccccatatatcaagaatgatacttctcaaactttattgcacagaagaatgtcccatgaaacatgtaaaactgcagattttcagcagacttcagccccaccccaaaagttgactggctggcactgtcccctcagatgtgaagaaaacctgctcagacctcattcagtggcataccagcaccatctccaactacttcaaggaatgattactaaagcagagtcaaacaaaatttcattttagttcacataaacatgagaaagcaatctagcagttttaggaatatactgggccatatcaaaggatacacataagtatatggtgttaatggctaatatattgggaaagactggtctcgtgaattaatacaactttgagcttttaaaaaagctttttctgcatttaaagcatgttatagctaaggaggctttttttgcataaatacttagaaaagggaaaaaaattactccaaatatttctacaaaagaagcttcttagaagaaaatgactctaggtagacgttgaaggaaatcagaaataaatatttagaaagatttcagtgatatacaacaaagagattagaagaggttttcaggtaagcttactgtaccaatggaattaggcaggagattgaaagtaaaaggatgtaaaacagatgacaagtaatactgaatgcaaaatagagggacttggtccatgggtgggtgctggctcaaagtaaggcaaatgctagcctgacatgggcaattcttcggacn

SEQ ID NO: 10666 - DNA, 400 bp, Homo sapiens
gtagatggaaggaagaacttgtgtgcttagacctgacgctgggaggagatgctgccacctaggttacttgtaggaccctatacggcaacctcctttgccaggaactatttataaacatcctgcaggaaaatgagtcaaggaagcttttcttttgagctatttacagcttttagcaattgagtaaagtatactcctgtgaacaaaatttggaacatatttgtttctctctaactgatttctccagaatttggaactagttgtagctgagaccaatgatgctgacctccctcaaaagctgcatttctgaatttctgaaggcaaactgtctgcctatattgtacagcaaaataatttcctgtattaaaacgtttttattgctcaaaaaaaaaaaaaaaaaagt

SEQ ID NO: 10667 - DNA, 649 bp, Homo sapiens
acgaccagtgtgaatgaatggagcaaccaagaggttaggcagtaggagatgaggccagagaagaaagagggtgtggtagccccctaatgctggcacttacttccactggatctaaaatccagcacggaattatgctgaccacatcagcctaactaatattgatctaagtaacatttatgttctagcacctaaatcaggagcctgcaaaggatagcccactgccaaaatctggcccactctccagtttttgtaactaaaatgttatcagaactcagccaagtccattcatttacaaactgtctacggtggcagagacaatacggctcacaaagtctaaaatatttactctctggctctttatagaaaaaatttgctgaccccttgtctaaattatagcaagtatgaaatcctctatcatcagcaatggcatagaaggcagcataggaatttttaaatttgcccttgaattatattgtaagccttatgtatgaggtcctatttttgcaaagtgctgagcaccccgtcctataatgaggagtgcccactttcctttctcaattggtctgtcttataacatttacgaagagactcacagtctctctgtggccttgtattcttggctaatatcccttttttttcttcctggagt

SEQ ID NO: 10668 - DNA, 756 bp, Homo sapiens
  misc_feature 754, 755, 756: n = A,T,C or G
ccgggcaggtacctgtttaaaaaattctagagagaaaactatagagagtgtagtgtgtgattcagacatactaaccatcctcacatggactcactctctaaaaactccagacatagccagaaagaggcagaacagccacagcaggagagatcactgatgctcactgaggcagaggactttgtcataacctgtagaaaacattttcccaatgtctctttaccacattggattataaattttctacattcttcttcttcttttactgggcatttatacaacttgaatacaaaatatgggaaaataattttaaaatttaattttcaccatccttgtcagacaaataacattcattatgaatcctctgaaaattccactgttggtacctctatttttccaggctttttccctcaccccttttgtctccatttttattcctcacttattactatctcaataacatcatttctacattttagttattatatcaaaaagaagcaaaaatattaagaagaatctgaaggaagagcaaaactcagtaacagaaaacaaaacaaagaatgcgtcacataatggaaaaatggaagacttgtgaacgcagacgacagaggtgccggctgaggcagaggagaaactatgggggtgctgggagactgagcctgtgggcgtggcttgctcccagagaaccttatggaagaggacatcaaagaaagaaatgccagacctgtatcccagaaaataaagccacataatatannn

SEQ ID NO: 10669 - DNA, 365 bp, Homo sapiens
  misc_feature 359, 360, 361, 362, 363, 364, 365: n = A,T,C or G
actgctaaagaactctagaacatacagggtgtagacggcagtcttcttggggaaaaagaggcttcaggattgcaagatttcagctactgtctctcctcggagcaggattccatcttttccatggctggggcccttgacacatgtcactgtgcactgctcttttcgctgggatttccaaaagaccttggctcaggtgtcacttttgcagaaaagcatttactgactgttgacttggccaaatccctgtgctgtgtttcctagcacggtgagttgcattttcacatgaactcatgcctaccttctcttgttttataagcttcatgaggcaggtacctcggccgctctagaactaagtggannnnnnn

SEQ ID NO: 10670 - DNA, 155 bp, Homo sapiens
ccgcggtggcggccgaggtacgcgggtttcctcaacatggctgcgcccttgtcagtggaggtggagttcgggtgagtcacagagctggggcgccgtggggatggattgaagtcgtcgggcccagaattcctttccttctgccgtggggcctgaca

SEQ ID NO: 10671 - DNA, 1163 bp, Homo sapiens
actatagggagtcgacccacgcgtccgaagagtttgacttagaataatgaaggtaactagaaagtgagttaatcttgtatgaggttgcattgattttttaaggcaatatataattgaaactactgtccaatcaaaggggaaatgttttgatctttagatagcatgcaaagtaagacccagcattttaaaagccctttttaaaaactagacttcgtactgtgagtattgcttatatgtccttatggggatgggtgccacaaatagaaaatatgaccagatcagggacttgaatgcacttttgctcatggtgaatatagatgaacagagaggaaaatgtatttaaaagaaatacgagaaaagaaaatgtgaaagttttacaagttagagggatggaaggtaatgtttaatgttgatgtcatggagtggcagaatggctttgttggcactcagagctcctcacttagctatattctgagactttgaagagttataaagtataactataaaactaatttttcttacacactaaatgggtatttgttcaaaataatgaagttatggcttcacattcattgcagtgggatatggtttttatgtaaaacatttttagaactccagttttcaaatcatgtttgaatctacattcactttttttttgttttcttttttgagacggagtctcgctctgtcatccaggctggagtgcagtggcacgatgtcggcttactgcaagctccgcctcccaggttcacaccattctcctgcctcagcctcccgagtagctgggactacaggtgcccaccaccacgcctggctagttttttgtatttttagtagagacgcagtttcaccgtgttagccaggatggtctcgatctcctgacctcgtgatccgcccgcctcggcctcccaaagtgctgggattacaggcatgagccaccgtgcccggcctacattcacttctaaagtctatgtaatggtggtcattttttcccttttagaatacattaaatggttgatttggggaggaaaacttattctgaatattaacggtggtgaaaaggggacagtttttaccctaaagtgcaaaagtgaaacatacaaaataagactaattcttaagagtaactcagtaatttcaaaatacagatttgaatagcagca

SEQ ID NO: 10672 - DNA, 2089 bp, Homo sapiens
  misc_feature 2083, 2084, 2085, 2086, 2087, 2088, 2089: n = A,T,C or G
acccacgcgtccgatagctttctctctggcagagtccgatggcccgagtcccgctccacagtgcgggtggagggcacggaggggtgtgtgtggggggcgacagcccaggaagactagggggcggcagggcgcgtgggggcgggggttgggagaccgcagggaggatccccgaccttgtctgaagatccaagcaggcggagccgcggtctggtccgtggggtaggcggggcgcaagagtgttcccgggggcggggggccgacccgcgtctaaaggtttccgcgattcacccgccggcgcctggcctggcccagttgcaccacgagcgctgcggacactcggggcggcagtcggtctgtcagtcctcccgccaggtcccgcggcccgcacctgccgcccgcacctgcagctccgcacctgcggccagtgcctactgccctctcttgccgcccgcacctgcagccccgcacctgccgcttgcacctgcagccccgcgctctacccggttcaagcatggctgaccaggcgcccttcgacacggacgtcaacaccctgacccgcttcgtcatggaggagggcaggaaggcccgcggcacgggcgagttgacccagctgctcaactcgctctgcacagcagtcaaagccatctcttcggcggtgcgcaaggcgggcatcgcgcacctctatggcattgctggttctaccaacgtgacaggtgatcaagttaagaagctggacgtcctctccaacgacctggttatgaacatgttaaagtcatcctttgccacgtgtgttctcgtgtcagaagaagataaacacgccatcatagtggaaccggagaaaaggggtaaatatgtggtctgttttgatccccttgatggatcttccaacatcgattgccttgtgtccgttggaaccatttttggcatctatagaaagaaatcaactgatgagccttctgagaaggatgctctgcaaccaggccggaacctggtggcagccggctacgcactgtatggcagtgccaccatgctggtccttgccatggactgtggggtcaactgcttcatgctggacccggccatcggggagttcattttggtggacaaggatgtgaagataaaaaagaaaggtaaaatctacagccttaacgagggctacgctaaggactttgaccctgccgtcactgagtacatccagaggaagaagttccccccagataattcagctccttatggggcccggtatgtgggctccatggtggctgatgttcatcgcactctggtctacggagggatatttctgtaccccgctaacaagaagagccccaatggaaagctgagactgctgtacgaatgcaaccccatggcctacgtcatggagaaggctgggggaatggccaccactgggaaggaggccgtgttagacgtcattcccacagacattcaccagagggcgccggtgatcttggggtcccccgacgacgtgctcgagttcctgaaggtgtatgagaagcactctgcccagtgagcacctgccctgcctgcatccggagaattgcctctacctggaccttttgtctcacacagcagtaccctgacctgctgtgcaccttacattcctagagagcagaaataaaaagcatgactatttccaccatcaaatgctgtagaatgcttggcactccctaaccaaatgctgtctccataatgccactggtgttaagatatattttgagtggatggaggagaaataaacttattcctccttaaaaaaaaaaaaaaaaaaaaaaaaaaacggccgcggccccctcggcccagtcgactctagactcgagcaagcttatgcatgcggccgcaattcgagctcacttggccaattcgccctatagtgagtcgtattacaattcactggccgtcgttttacaacgtcgtgactgggaaaaccctggcgttacccaacttaatcgccttgcagcacatccccctttcgccagctggcgtaatagcgaagaggcccgcaccgatcgcccttcccaacagttgcgcagcctgaatggcgaatggaaattgtaagcgttaatannnnnnn

SEQ ID NO: 10673 - DNA, 347 bp, Homo sapiens
  misc_feature 1, 2, 3, 4, 5, 6, 7, 8, 9, 10, 11, 12, 13, 14, 15, 16, 17,18, 19, 20, 21, 22, 23, 24, 25, 26, 27, 28, 29, 30: n = A,T,C or G
nnnnnnnnnnnnnnnnnnnnnnnnnnnnnnacttgttaaagttctttttactggggctgttataaaatttaaaattatatgtgtgacttgcatttcatttttattggccagggatgctccagaaggttgatgcctgaaactagagatccattacctttcctcctctctagggcttcaaattaggttttaatttaagaacacctttgctatatataatcaatacaaaaaactttacccacttattgtactttgccctgttgacactgacctcccattctccaccagaagaaataatcaaacccatcaccaacaaatcacccatccattattccccgcgtacctgcccg

SEQ ID NO: 10674 - DNA, 2658 bp, Homo sapiens
  misc_feature 2641, 2642, 2643, 2644, 2645, 2646, 2647, 2648, 2649, 2650,2651, 2652, 2653, 2654, 2655, 2656, 2657, 2658: n = A,T,C or G
accgcattcctacttcattgcccctgatgtaactggactcccaacaatacccgagagtagaaatcttacagaatattttgttgccgtggatgtgaacaacatgctgcagctgtatgccagtatgctgcatgaaaggcgcatcgtgattatctcgagcaaattaagcactttaactgcctgtatccatggatcagctgctcttctatacccaatgtattggcaacacatatacatcccagtgcttcctccacacctgctggactactgctgtgccccaatgccatacctgattggaatacactccagcctcatagagagagtgaaaaacaaatcattggaagatgttgttatgttaaatgttgatacaaacacattagaatcaccatttagtgacttgaacaacctaccaagtgatgtggtctcggccttgaaaaataaactgaagaagcagtctacagctacgggtgatggagtagctagggcctttcttagagcacaggctgctttgtttggatcctacagagatgcactgagatacaaacctggtgagcccatcactttctgtgaggagagttttgtaaagcaccgctcaagcgtgatgaaacagttcctggaaactgccgttaacctccagctttttaagcagtttatcgatggtcgactggcaaaactaaatgcaggaaggggtttctctgatgtatttgaagaagagatcacttcaggtggcttttgtggagggaacccgaggtcatatcaacaatgggtgcatacagtcaagaaaggaggtgcactgttcaacacagcaatgaccaaagcaacccctgctgtacggacagcatataaatttgcaaaaaatcatgcaaagctgggactaaaggaagtgaagagtaaactaaaacacaaggaaaatgaagaagattatgggacctgttctagttctgtacaatatacaccagtttacaaattacacaatgaaaagggaggaaactcagaaaagcgtaagcttgctcaggcacgcttaaaaaggcctcttaagagccttgatggtgctctatatgatgatgaagatgatgatgacattgaaagagcaagcaagttatcttctgaagatggtgaagaagcttctgcttatctctatgagagtgatgactctgttgaaacaagagtgaagactccttactcaggtgaaatggacttactaggagagattcttgatacattgagcacacacagctcagatcaggggaagctggcagctgcaaagagcttggatttctttagatcaatggatgacattgattacaaacctacgaataaatctaatgctcctagtgagaataacctggctttcctctgtggtggttctggtgaccaagcagagtggaatcttgggcaagacgatagtgccctccatggcaaacacctccctccatctcctaggaagcgggtttcctctagtggtttgacagattctctgtttatcctgaaagaggaaaacagtaacaagcacctcggtgctgacaatgtgagtgaccctacttcaggactggatttccaactcacttcccctgaagtttcccagactgataaaggaaaaacagaaaagagggaaacactaagccagatttcagatgatctgcttatacccggtcttgggcggcattcatcgacttttgttccttgggagaaagaagggaaagaagccaaagagacttcagaagatattggactgctccatgaagtagtgtcattatgtcatatgacatctgacttccaacaaagcttgaacatttcagacaaaaacacaaatggaaaccaaacttaaatcttgcatccaagcttctatggagacattttgagattcaatgcaatctgtataataaacagaattatttgtaggaatggcaactcatactatttaaatttttttttgcatttgcaacatttttctcacttgttcatttcgaggatatatgaaatgcattgatttttaaatataaagcgaattctactgtgcttttaaatcaggtactagtttgtatgtatgtttaaagtatgtattgaccatgagatttcccagtgtttggtgcttaatgccgtttattttatttaagctaagaatgcatatgtaacccatgcacataaccagtagctactatactaatctggttgagcatgaactgatcaagatatcaaaacttatcaaaactagcctgaagctgatgaaactgttaacccactaattgccttaatcttaaagctgttttttaagcatacttaaataatgtatgaaagtatgtataaagtttgaaggataagttattagtgttctgcagagcaataatgcctttttctattcatcaaatcaaggtcaaaattcatcttttcaagattaaaaagctctcttaatggaaatatttaatttgcttatataaagcactatagccatgttttccaaaaagtataaaaatatacacttacctttcattcagtgaaatataggaagtgctgaattacaatgtgaagttaatgacttctgtttacaaatgagacactctaacgagttttcagtctctctgtatgcctttgctatttaggggtccaccccaagaaagccaaatacaacataaaccgtcctgannnnnnnnnnnnnnnnnn

SEQ ID NO: 10675 - DNA, 606 bp, Homo sapiens
  misc_feature 1, 2, 3, 604, 605, 606: n = A,T,C or G
nnnacggtgatcattactccccagcgcagctcaatccacttccagactgttctaattgttggaataattctccttatgtaattcaatgtcccatctattaatttatgagatatttatttaaaactgaccgtattccaggaactgggctaaacgaagaagagtagtgaattaatacagaaatcaccctggatttggcagaatattttccctggtagtgtaggtcacccctattgtggtgataatcccccacatcatacagcataagaaacaacacacagacaaaaaccaagtcattcttctaggatgttttcatccaaggatttgaaaagatttaggtgatcttccatttttcatcctatgcaatctgggctatgctactactttacagattgaaaatatatttaaaaatcactgaactttcaatagtcaccaatgatcactgttctagttgcagttacaattaggtgttcaaggaaacacttataacttaaatttaatgtctaaatcttacacctttaattggaaaaataatgtaataagtgagcaattagattatctagtattagaaaataactgaggattggctgggcatgggggcttatgnnn

SEQ ID NO: 10676 - DNA, 1132 bp, Homo sapiens
  misc_feature 1, 1132: n = A,T,C or G
nggtcccaaactcctgagctcaagtgatccacctgccttggcctcccaaagtactgggactacaggcatgagccactgtgcccagctgacatattctcacttaatagaattatagagaaatttttcatgtttttctttttctctcccactttttcatattcctctttttcatttttgcctttccgtttctgtctatgatgtaggcttctgaggagaacccagaagcttggctttagtggtagaatgacagaacttagggatcccttgcaggctagaacaaagttctgacccttagaccaaatctttatgttaagagttttccagaattcaaaaaaaaaaaaaaatcaatcaacacaacacacacacacatacatacacacacactgcctttaaaaggaggagccaatatttgttgtacctgtgaactgaggaattatagataaaccttaggtcaaatcatttcacaattgcattggtggtattgaaaaatgatgagatttctctgacagagagctttgtcctagtttttgttcttcataggtcaaaactggcaatattctcttgtctgcaagataaagtgtttgtgcttctatcaccatatgcatgaacatgtaagaatcagatacaatttctgcttcatcagtttcacatgttcatgttgtcactgaaaaaatgcatctactgtttatagctcccaaggagaccccaaatcctttttttttcttttgagatggagtcttgctcttgttgcccaggctggagagcagtagcgcgatctcagctcactgcaacccccacctcctgggttcaagtgattctcctgcctcagcctccccagtagctgggatttacaggtgcccgctaccatgcctggctaatttttgtatttttagtagagacaggctttcaccatgttggccaggctgatctcaaactcctgacctcaggtgatccacccacctcggcctccgaaagtgctgggattacaggagtgagccaccgcgcctggccccgtattcattttttatactggaaaacattttttttgtaatttttctttgcaaagaaatgagcataaaaatgaatactccaaagaaaaggaattattatggcaaattaaaagggacacggn

SEQ ID NO: 10677 - DNA, 848 bp, Homo sapiens
  misc_feature 829, 845, 846, 847, 848: n = A,T,C or G
cgcgtccgattttaaactctagagtgagtgacagcctttttatggttggtgttactatttatttcctgcctctaaacttctcgtggtccttataaacttgtcaggatgtgtgttgcgttgaattctgcatgtcctttttttgcccaccctcaggttaagctggtactaacttatccccagaggaaacagggtttatgagcactgacagatgtcttccctgggcaaaaaaaaaaaaaaatagtatatgtatacacacacacatacacatttatatttatatttcttaaagcttttaatccctttcattccctgatatctcagagatttcaaatcattgaacactgaagtatatttttcaggccagatgaaaaattgtattaaaaccctattcctggtcaggcgcagtggctcacgcctataatcccagcactttgggaggccgaagtaagcagatcacctgaggtcgggagttcaagacaaacctggccaacatggtgaaaccctgtctctactaaaactacaaaaaaattagcctgatgtggtgttgtgtgcctgtagtcccagctacttaggaggctgaggtgggagaattgcttgaacctgggaggcggaggttgcagtgagccaaaattacgccactgcactccagcctgggcaacagagcgagacagtctcaaaaacaacaacaacaacaaaaaccctattccttgcctttgtaggagtcaaataaatgaacttcttttttcttttttttattattatactttaagttctggggtacacgtgcagaatgtgcaggtttgttacataggtatgcacgtgccatggnggtttgctgcacccannnn

SEQ ID NO: 10678 - DNA, 256 bp, Homo sapiens
ccgggcaggtacccgggaggctcgcatgtgtgggtgcatgccgtggcaggagaaggcttccgaagagccatgcatgcgtcctctggctgctccaggtgtaaaaaatgccagggaggggacaatgatgagtcctaggcaggaaaggtcctctggagagaggaaatggcacacgcgcaagcacggaggcatgaggggccagggtcctggaggacactgggccgggacagatcagactccccccaagccccgcgtacct

SEQ ID NO: 10679 - DNA, 949 bp, Homo sapiens
  misc_feature 937, 938, 939, 940, 941, 942, 943, 944, 945, 946, 947, 948,949: n = A,T,C or G
actgatctaaccaagatattttgtttttctcatccaccagtcactttctcagtcctttctgtatcccttgcaatttgaacaaagcttggtgaatagtgtgcacacaaaaagcacactaggtgaaagacaggtacataaaaagggtaaagtcatgatattttaacaaacctatcaagctctaaatataagcctccttggtagttttctctttaaccctctctccactgttggatgaaatttgctgcattcaattccagttcccaccccaacttccttcttaacacaaggtcagggttaagccttcggtgctttaatccagaggaaaattacttattttaaaaagcagtgaaaaacaccgcattcctttggcacaggatgaagaccagctcagctcttcagttgttgatcattgtctattgttctccaaacagtaaaccagtatttcacactgagattgtcggctgcgggtatattccaattccccgtctcctcatgaatatgaagtgaagggctctgaccctggaagtggtaggtaattgcttggcgataggtgattgtctcgccgctcagctataggcgatggtctcaccactcggtgataggcgattgtcccatctaggtcgccaaaatgtgtctggaattggtgggttcttcgtctcactgacttcaagaatgaagccgcggacactcgcagtgagtgttgcagttcttaaaggcggcatgtctagagtttgttccttctgatgttcggatgtgttcacagattcttccttctggtggggttcgtggtctcgctggctcaggagtgaagctgtggaccttcgcggtgttacagctcataaaggcagtgtggacccaaagagtgagcagcagcaagatttattgcaaagagcaaaagaacaaagcttccgcggtgtggaaagggacccaagcaggnnnnnnnnnnnnn

SEQ ID NO: 10680 - DNA, 419 bp, Homo sapiens
gtttgtagatggaaggaagaacttgtgtgcttagacctgacgctgggaggagatgctgccacctaggttacttgtaggaccctatacggcaacctcctttgccaggaactatttataaacatcctgcaggaaaatgtcagcaatgtgatggtgtttggaggtggagccttcagaaggtaattaatgcccttgtaagaagaggccagagagcttgcgcaccttcttcctgccatgtgaggagccaagaagccggctgtctgcaacctgcaagaggaccctcactagaagctagccatactggcatcctcatcttggctttccaacttccagaactgtgagaagtatatgcttgtggtttagtcaatggtctatggtaatttttttatagcagtcccagccaagacagtgcctcatttact

SEQ ID NO: 10681 - DNA, 1086 bp, Homo sapiens
  misc_feature 1, 2, 3, 4, 13, 32, 62, 207, 1060, 1061, 1062, 1063, 1064,1065, 1066, 1067, 1068, 1069, 1070, 1071, 1072, 1073, 1074,1075, 1076, 1077, 1078, 1079, 1080, 1081, 1082, 1083, 1084,1085, 1086: n = A,T,C or G
nnnngtagagacnagttccccccatgttgccnaggctagtctcgaactcctgggctcagggnatcttcctgtctcaaccccccgtaagtgttgggattacaggcgtgggccaccaatgcctaaccttgtttatttatgaagatggggtcttgctatgttgcacaggctggcctcaaactcctgggctctagtaatcctctttctctnagtctcctgagtagctaggactaccaggcacatgtgctgctgtgcctgaatcatccttgaaatttgtaactgataatttacaggaatatacgtaaacccaagatacattgaaaatcgtggctgaagttacttgtacttgaccaaggacttctggttcactgtgcagactgcttttccagtactgatgagatgttgctgcacttgagaatgggaacaaggtataaaagctgaagagaccgtagatgtaatggcttcactgaactaagataatccttccttacccagttatgtttctaaggaacaggtatattatcaagtgtgagatgtttgggatatacgcaagctgtgcctggaaatcatgacagtgcctctatgctgttgatgtaccagccatgccgtttcctgccctatatcctttcttaagggtaagtaatcttagtgcctggtgaagctaattttgtctcacgagcccaactgttaacctgaatccaatacctatgctgctggtgagacagagtgggtatgaaaaaacatataacctgaaaaatctacttatatatgctaaactaataaacctgagggatatgcagggggaaaaaatcaaattttaaggaaatctaacacagaaaataaattcacaatgaaataaaaacataaaattgtgcaagcaaaataaaaatactacacttaaacataaaatatacttgttaaaatatggtaactctttaccccacaattaaaaaagctttaatcaccagtctgatttctatttattttgcactgagattctttcctatgagaaatacatcacagttgatttactttaaaagcaagcccatttagtgtttgaaannnnnnnnnnnnnnnnnnnnnnnnnnn

SEQ ID NO: 10682 - DNA, 500 bp, Homo sapiens
  misc_feature 1, 2, 3, 500: n = A,T,C or G
nnnactttactcacccttcctctgacagaaaaggatgaagtcaagggcctggtagaggcaccactaagaaaggcatctgaaaggaccaaagagagtgaccagcaagcattttttgcaaggctgaggagctgacagcttccatgaaaggctggaccacccagtggtgaaaagcatcatctgggttaccttgtgctgccataaaacacaccacagacttggtgacttaaaccacagatatttatcttctcacaatcctggaggctggaagtctgcaatcacggtgccagcatggtcaggttctggtgagggcctctttccttctcactgtgtgctctttcttgtgcatggagagagagagcatgaacaagccctctactgtccctcttagaagggcactaatcccataataaggcatccaccctcctgacctcggctaaccctagttaatacctgcccgggcggccgaggtacatgatctttcatacacccttttgcaagan

SEQ ID NO: 10683 - DNA, 463 bp, Homo sapiens
  misc_feature 463: n = A,T,C or G
actttctttttttcttgcttcttttttttgggggtgatacataaagttttgcattttccaataaatgatgactgtgattcagtgaaatatggcatatgtgtaattaaaaaccactttttataaaaactatctttgctgcatgttgctctatgacattttctgtgtgttattttatttcttttccttttaatgctgttcactgctacccatttagtcaacttggaccaccctctagaggggcttcaactgttattttcaatacattgtcacagggacagaggagggtgttagggaactctgtgactaaagagttttccataaatgggtggacctcagtttacaagcattaagttattgggccaggagggggaacagatcatgattaggagagtggaaaagaaagatgacaaatcactttaagtcagacaaacctctttctgtactagctcccttacttactaan

SEQ ID NO: 10684 - DNA, 720 bp, Homo sapiens
  misc_feature 697, 698, 699, 700, 701, 702, 703, 704, 705, 706, 707, 708,709, 710, 711, 712, 713, 714, 715, 716, 717, 718, 719, 720: n = A,T,C or G
acagcaacagaatgagaagctacaaacaagaaatgggaaaactcgaaacagattttaaaaggtcacggatcgcctacagtgacgaagtacggaatgagctcctgggggatgatgggaattcctcagagaaccagagggcacatctgctcgataacacagagaggctggaaaggtcatctcggagactagaggctggataccaaatagcagtggaaaccggtaagaattctgagagtgagcaaattgtcttgcttatgcacagcagtcttcacaacacatgacatttcagggaaacttcaaaggagtagcagagacagcagcccgagatgtggtttacatattggggagacaattgggagcttatttgcgcttatcttttttcaagttaaaaggcatgacatctactgaaaacagttcctgaggtttaaaagtatacatctgaaaagagatggaatactttgtctaaattctacatttgtcttaatatgcagttacatgttgtcagtttacccacccgcaatgattgctagcacatggcgcaatctccagtttgctcctttacgttttattcacatatgtaaaaattaacattttaatcaatctaaatcatgtgaactagggacaaagaaataacaatacccactttactttgcatatttgtcctggtgttggaaatgattcctaataatcctgtttnnnnnnnnnnnnnnnnnnnnnnnn

SEQ ID NO: 10685 - DNA, 827 bp, Homo sapiens
  misc_feature 1, 2, 3, 4, 5, 6, 7, 8, 9, 10, 11, 14, 827: n = A,T,C or G
nnnnnnnnnnnagngacctcatcgacacgtacctgctccacatggaaaaagagaaatccaacccacacagtgaattcagccaccagaacctcatcatcaacacgctctcgctcttctttgctggcactgagaccaccagcaccactctccgctacggcttcctgctcatgctcaaataccctcatgtcgcagagagagtctacaaggagattgaacaggtggttggcccacatcgccctccagcgcttgatgaccgagccaaaatgccatacacagaggcagtcatccgtgagattcagagatttgctgaccttctccccatgggtgtgccccacattgtcacccaacacaccagcttctgagggtacaccatccccaaggacacggaagtatttctcatcctgagcactgctctccgtgacccacactactttgaaaaaccagacgccttcaatcctgaccactttctggatgccaatggggcactgaaaaagaatgaagcttttatccccttctccttaggtaagctggacccacagtttctttcccagacaccagagggcaggtcctatcctcaacttgagaaaaaaaatgacaggtccttattaattgagcacttaatatattccaattgcttcacctgccttatccccttccatcttcactacaaccctgtaaggaggcttgagaaagaagatgacattcccaaaggcacatctgggcaagcaggaacttgggcaagtattttaacatctctaaacctcagtgaattcattttcttaaaaagaaaaaaatctggtgaagcaccgctgtaagcccagtgctgn

SEQ ID NO: 10686 - DNA, 249 bp, Homo sapiens
  misc_feature 248, 249: n = A,T,C or G
acacctatgatgaatacaccaaaggctacctggatcaggcttcagggagtgccatcatcgatctcacagaaaatgaccaggtgtggctccagcttcccaatgccgagtcaaatggcctatactcctctgagtatgtccactcctctttctcaggattcctagtggctccaatgtgagtacagtttaaaaacaaatcttacacagccttacatttcaatttttttctttaaaaggagtgagttgtgtann

SEQ ID NO: 10687 - DNA, 1368 bp, Homo sapiens
ggtcactgcctccttttgtgtgagcatctggcggtctggagggcagggacatcctgctgaggggacacctggtccccagctccctgcatgcaccaagcagcggaggtctggggtagacctgctatgcacagggtctggaaggggggcgtgtcagggctcagagggcgactgcaaagacagagagccatggggttgagggcggtgaggtcgggggcagttgtggcctgggtggtggctgagcatggcccacggctcgtgtgtggatctgggtggccctggacaccccgcagagggtggccctaggccccctgcccaatcatgttcctatagtcggggatgatggtctgcttcaggtccaccaccgaggagaagatccacttcaccttgaagaaggtgacggtggcactgtagcacacgcttaacaggaagagtgtgatgaagatggtgatggtcgtccacagcccgtccagctccccgtcctgcgcctccgcacagctctcctccagttgcagctccggagacagggagaggctcttctgcgtgaagcggttgtgcagagcctcatgccatcacggagcatgagaagatgttcccctgctgcccacctgctccttgtcccacggtgagcttgctgtagaggaagaaggagccgtcggagtccagcatgggaggcgtggtgttgtagttgttctccggctgcccgctgctctcccactccacggcgatgtcgctggggtagaagcctttgaccaggcaggtcaggctgacctggttcttggtcatctcctcccgggatgggggcagggtgtacacctgtggttctcgggaggagatgaccaagaaccaggtcagcctgacctgcctggtcaaaggcttctatcccagcgacatcgccgtggagtgggagagcaatgggcagccggagaacaactacaagaccacgcctcccgtgctggactccgacggctccttcttcctctatagcaagctcaccgtggacaagagcaggtggcagcaggggaacgtcttctcatgctccgtgatgcatgaggctctgcacaaccactacacgcagaagagcctctccctgtccccgggtaaatgagtgcgacggccggcaagcccccgctccccgggctctcgcggtcgcacgaggatgcttggcacgtaccccgtctacatacttcccaggcacccagcatggaaataaagcacccaccactgccctgggaaaaaaaaaaaaaaaaaaaaaaaaaaaaaaaaaaaaaaaaaaaaaaaaaaaaaaaaaaaaaaaaaaaccccaaaaaaaaaaaaaaagcggccccccccgggggggacctccaattccccctatagggagtcgtttaa

SEQ ID NO: 10688 - DNA, 3467 bp, Homo sapiens
  misc_feature 1, 2, 3, 3379, 3414, 3466, 3467: n = A,T,C or G
nnngtccaatctggcgggcaccggggtaggttgcagcagagtcactatggcggccggcgctggcaaggtcggaaagtttcctgcctcgtcgggcgcagcttgagcttgccccatcggccgcgatcggtggaggctgcggcggatccagcccggggcctcaaggcctctccccaacctccgggccagtctccctcccccaccttctcgtccgccgggagctgcggctgccgtccctgagatgcgaccctcgcgggggcgaccctgaggggaggcggcccatgtgctgagcggcggcccagaagcctaggcgtccggggaccaacttcctgccgcctgggaactcgagcctcccggtgtcgcgcctcgctcggtccgcaccggcctgcggagccgggtccccgccctggtcgcggggacgctcgccaggtgcccaggagtcccgacttggccactgcccgcgccccgccggcctccacgcctcgcgcggagaacctcagccaccgccgtctcggatcgtgccaggccggggaccgcgtcccccttcccggggcggcctccgctcagcaggggcgatgcagactgtcccgccggccgtctagagcccctccgtctccgtcacctctcgccccttcactccgggcgaggactggcggtggctgcccagaggtgcccagccacaccttccttcggcccaaaaggactttcctggccgcgccgaaccgacccttcattcatgctgcagtgctgcaacgtttccgccaccaagggggaaaagcggccgcgatctcaaaccaaacacaagaattggcgtgtgactcatctgcttggatacctccagtccccaaactgtgttccaggagttttcttggccgaagctgcccgatgtttgagccttttcttcccagagaagaagatggactgaaagctgccagttggggactttttgtgatcacggcgttgcagcgttttaaaggaggtgatggggcttgcgctggcttgtcttcccacccaagtgaagagttgatgttcactggttatgcttagacaatgtgcagtttgtgttaatttaaaattttgggtgggataggggcataggcttgtgaagggcagtccggatccggaggaactcctctttgtccctggtaggagagacacccccagtctatcctcgatgccgtcagccttggccatcttcacttgccgcccgaactcgcacccgtttcaggagcgtcatgtctacctggacgagcccatcaaaatcggccgctcagtggcccgctgtcgaccagcgcagaataatgccacttttgattgcaaagtgctatcaaggaaccacgctctcgtctggtttgatcacaagacgggcaagttttatcttcaagacactaaaagtagtaatggtacttttataaatagccagagattgagtcgaggctctgaagaaagtccaccatgtgaaattctttccggtgacattatccagtttggagtagacgtgacagagaatacacggaaagttacccatgggtgtattgtttccacaataaaactttttctaccagatggtatggaagcccggctccgctcagatgtcatccatgcaccattaccaagtcctgttgacaaagttgctgctaacactccaagtatgtactctcaggaactattccagctttctcagtatctacaggaggccttacatcgggaacaaatgttggaacagaagttagccacgcttcagcggctactagccatcacccaagaggcttcagataccagttggcaggctttaatagatgaagatagactcttatcacggttagaagttatgggaaaccaattacaggcatgctccaaaaatcaaacagaagatagtttacgaaaggaacttatagcattacaagaggataaacataactatgagacaacagccaaagagtccctgaggcgggttcttcaggagaaaattgaagtggttagaaaactttcagaagttgagcgaagtctgagtaatactgaagatgaatgtacccatctgaaagaaatgaatgaaaggactcaggaagaattaagagaattagccaacaaatataatggagcagttaatgagattaaagatttatctgataaattaaaggtagcagagggaaaacaagaggaaatccaacagaagggacaggctgagaaaaaagaattacaacataaaatagatgaaatggaagaaaaagaacaggagctccaggcaaaaatagaagtttgcaagctgataatatttcaccaatgaaaggctaacagctttacaagtacggttagaacatcttcaggagaaaactcttaaagaatgcagcagcttggagcacttgctttcaaagagtggcggggactgcacttttattcatcaattcatagaatgccagaagaagctgatcgtcgaagggcatctaaccaaagcggtagaagaaacaaagctttcaaaagaaaatcagacaagagcaaaagaatctgatttttcagatactctgagtccaagcaaggaaaaaagcaagtgacgacactacagacgcccaaatggatgagcaagacctaaatgagcctcttgccaaagtgtcccttttaaaagatgacttgcagggtgcacagtcagaaacttgaggcaaagcaagaaatacagcatcttcgaaaggaattgatcgaagcccaggagctagctagaacaagtaacacaacaaatgctttgaacttcaagctcttttcggaagaagaaagacacagcctatcgaaatcaagtcgaggaatccactacacaaataccaggttcttcaagcccaattgcagaggttacacatcgatactgagaatctccgggaggagaaggacagtgaaatcacacagtactagacgatgacttgcgttagtgcccgagatgacatttcgctccttcatccagcagcagcaaaggttgcctctgagcgggacactgacattgcttctttacaagaagagcttaagaaggtgagagctgagcttgagcggtggcggaaagcagcgtctgaatatgagaaagaaatcacaagtctgcaaaacagttttcagcttagatgtcaacagtgtgaggaccagcagagagaagaagcaacaaggttgcaaggtgaactagagaagttgagaaaggaatggaatgcattggaaaccgaatgccattctctaaaaagggaaaatgttttgctatcatcagaactgcaacggcaagaaaaagaattgcacaagtatgcaagaactctctgtttttcagatataaatattttacaggagcaaatgttcagcccatctctgtttggctatttggcaggttaaccatactgaataaatacttcagctnttttttttcctgccaccaccattatcctacatgtnctttccttgtactcatggaatacagattcattaaatgtcccaaagaaacccnn

SEQ ID NO: 10689 - DNA, 1876 bp, Homo sapiens
  misc_feature 1, 1874, 1875, 1876: n = A,T,C or G
ngtgagctcctagaagtcagcttcttcacttttaccccagccacacggttattcgcctaaggttggttataatttaaatgtcggtttgtgcacatggtttgggactctgtgtatgagtacgactaatatcttcaatttactaagaagataaagaggtcgataaataaggaggtcaagcccgctttttgcaaggtcacacaggaaagaagcagaccacgaaatgaacttcggctgtcacctgcggtgggcgcactagaggtcttttgaactccttcggctaccgtcgccgcgttctcgctgtgcactcttattctgcgcctgcgcgcggctacagcacggttcgtttttcctttagtcaggaaggacgttggtgttgaggttagcatacgtatcaaggacagtaactaccatggctcccgaagttttgccaaaacctcggatgcgtggccttctggccaggcgtctgcgaaatcatatggctgtagcattcgtgctatccctgggggttgcagctttgtataagtttcgtgtggctgatcaaagaaagaaggcatacgcagatttctacagaaactacgatgtcatgaaagattttgaggagatgaggaaggctggtatctttcagagtgtaaagtaatcttggaatataaagaatttcttcaggttgaattacctagaagtttgtcactgacttgtgttcctgaactatgacacatgaatatgtgggctaagaaatagttcctcttgataaataaacaattaacaaatagacaaaaaacaaaaacaactaatgaatgccgagaaagagagcggagttggcgactcggcgcagtcgactctagactcgagcaagcgaggatgcggccggagttcgagctcacttggccaattcgccctatagagagcgtattacaattcactggccgcgtttacaacgtcggagggaggtagaggcatgaggagatagatgggagcaaggggctagactaatcgacagagaacagaagaagagagaaagagcgaggaggaatacaacgacgttgtgtgtacagaaacagaataccgcaccacgacacacaggcagacaaaaacacgatgagcagccggagcacacggaaaacacaacacgcgaggccaggcgtagataacaaccgagcggcgcgcgacccccaccgtaacgcacccgcacgccagcacaccaaagcgcacagaaaagaaggcaggaaagcccgaacgacagcggcagacaagagagacgacagaacgccgacagaaccaggccaacagaacgtcatgggcaacaccgaagcaggacgagaagaacgaagagagaagagaagaaaccgaagcacagggcacagcgagacactcaccacgcaagctatgacagaacgaaacagcaacacaacacagagaagagataagcagacacaagaagccaccaacacgaccaccacgtacccagaccagaagacgcgcagacaaaacagagcacaagaaagcgagaccgaccaaaccaacgacgaggaaacagaacagagacacacacacagcggcacacagcgacagaacgaccagcgccagacccaccgcacacaaaccctgcacacgcagccgcgagcaggggcgacagccaacaagcacagcacgcggctaaggacagcctacaaacagcgagagagagcgcggagacagaccgacacgtcggagcagagacgacgaggcggagagagagaggctggcgaagattagaggaggaagggcaagagagaaggaagaggactgaacagaagagagagaagagacagagacgaagggaggagaacacacgcaaggaggcgcagcggagaccagaggagaggagcgagcccgannn

SEQ ID NO: 10690 - DNA, 912 bp, Homo sapiens
  misc_feature 1, 2, 3, 908, 909, 910, 911, 912: n = A,T,C or G
nnnagaccttcccatcagaaaaacaagatgttgcttggcagagctgtctttggaacctgagaagaaagacaagccacaccaaccgttggaattaccaaatgctgggtcagaattttctagtgatttaggtagacaaagtggatccataggtacaaaacaagcaaagtctcccataactgaaacagaggattctgttttagaaaaaggcccagctgagcttaggagcagagaaggaaaagaagaaaatagagagctttgtgcatcttctacgatgcctgcaatttcagagctttcatcattgcttagggaggaatctcagaatgaagaaattaaacctttctctcccaagatcatcagcctagagtcgaaagaaccacctgcctctgtagctgaaggaggcaacccagaagaatttcagccatttactttttctttaaaaggattatcagaggaggttagccatccagccgactttaaaaagggaggaaatcaagaaataggcccattaccaccaactggaaatttgaaggcacaagtcatgggagatattttagataagctaagtgaagaaacaggccacccaaatcatcccggtactccagagtatacagaaccatcaagatggtccttctgactctgtggacacaaacgacggaaagcctcttcgaatcaatgtgattactgtgtagactcttgagataaacagactgcgtagccgtcacttgaaagattgcgttgggaacaatctttgaaccagctggcgtcaaaagggatctttttccacaggaacgtggggccaattgggccaaaaaaatgtggtctcacaggggacggtccgaaaagggttcctctcctcctcttctcgctctaccgcccagctcattccgccttcttctcttaaaggagannnnn

SEQ ID NO: 10691 - DNA, 329 bp, Homo sapiens
  misc_feature 329: n = A,T,C or G
ccgggcaggtacgcggggggggggggattcttgatccatgcacagcgatgtgagctgaggtgcaggcaccagacctaggaattcctagaaaaatagtcaggaagcatttagacacatcaaatgttaaacgagtcctgattatgatgataatgatgatgattttggtggttgcaatagcaaagccttaagtatgaaggagacgtgccagctggaaatacaggtagacaatgaacaactgaatttagaggacgaagacattgaaagcattgatgccaccaaattgagccgtttcattgagatcaacagcctccacatggtgacagagtacn

SEQ ID NO: 10692 - DNA, 904 bp, Homo sapiens
  misc_feature 1: n = A,T,C or G
nagtagctggtattacagatgcttgccaccacgcctggctaatttttgtatttttagtagagacagggttttgccatgttgatcaggctggtcttgaactcctgacctcatgatctgcccttggcctcccaaagtgtcggaattacaggcatgagccactgcgcctggccccatgtttggttattattagtgcttaggaagaggcacttgcttacatagtaggagttgagaagcttggtttgttctttcctacccctagatctattctcacctcctgaccatgctctttctgccacatctattatcattacaagttgccttatctgaaattagtgaatcagaaaataaagcaggggatactttgtgtagtttcaacgttagggaaagttcagaatactgtctgtctaaactatctctctagaaggcctgatgggccacaacctgggccagaagcattcagttcagatatgagaatggtgggtgtaggggcaatggccaatgggccatggccggaaggaaattgttacagagtagtgggaagcctgcaaagactggcttctgtccgttttgccttggtttgcccatgtggatattctttgccaatattttctgcccaagagctgtgcttgctagagttggaaactggatgaaaaggtgaagactttttttcttctcaacagctcacaaagaaagtgaacaacatagagacgggctgggccttgggggccacctttcacctgttgcagtctctgggcatctcccattgaggccacgtacttccttggagacctgcatttgccaacacctttttaaggggaggagagagcacttagtttctgaactagactggggacatcctggacttgagcctagagatttaggtttaattaattctagaagtact

SEQ ID NO: 10693 - DNA, 523 bp, Homo sapiens
acagatagagtctcactatattgcctaggctgacagagtatttttttccttaattattctttattctcaaatgcagtgaacagtcacagtagcccaccatagggggttcattttcagacattacagtaactaggggaattttattaaggaaccagcagctaaaccattattgttattattcttcttctttaaaccaaactacagacttattcagatttcatcagtcttcccatcagtgctgtctttctggtccatgatccaatgtaggattccacatcacagttagtttttatcactctatgtcctctcccactctgtgatggttcctcagtatctctttgtcttccaggacctgacacttttgaagagtattggacagctattttgaagaatgtcctgcaattctgcctaatgtgtttcaatgaataaatgttacacgtgcattgttggccaagagtaccacagaaatgataagcccttcttagtgtatcaaatcaggtagtgtgggatgtcaatcccgcgt

SEQ ID NO: 10694 - DNA, 926 bp, Homo sapiens
  misc_feature 925, 926: n = A,T,C or G
ttttttttttttttttttttgagcctcagttgaactattcattcttgtcttccagaactcacttcaaatgggttttccatctatcatgagtctagtgttctcacctttgtcttacaattaattcttctgcagatcccctcacactgatctcctcccctgagctttggacaattatattctctcatctctttcacataaatcgcacttggaagacaaactcctcaggttaagctgccatctggtgtgtgtatttttcatcaagaactagcaacacccacatcaatagcatccacctttaccatcacctatataagcaacttactttgggaacctatttccttatttcagcattctcatttgaatcaatctagcctaggttagggacactggaaccaaacttggctgtccctggactggcctgggatacctataatataggagggactcggcgaggaactggaggtgtgagagcaaataggaataagatacagtttctgagatgaagaatctaataaaatccaatagaatggggctgtgtcctaagatgaagcaggccaggaagattttagcaggaaatgggtccagttcaaaaaatcaagcaaggcttgggagaggcggtagatcactgaaggtcaaagcacaaaggatcaggatctagtaaacgggctttgggaacggaaaaccttaggagaccctgaacatttcaaaaagacatttgtgctctaccttctttcaaactcttaactctgggcacctacactgtagagatgtaacagaaggcagaagaaatcaggggcatacaggtaggtgtgtcatctttcggttggcacatagatgttctgattacagacagattgtattattttaggagagatggggcatgtgaatatggtgcaagttatttttttttttggcattctatggnn

SEQ ID NO: 10695 - DNA, 473 bp, Homo sapiens
  misc_feature 1, 2, 3, 4, 5, 6, 7, 8, 9, 10, 11, 12, 13, 14, 15, 16, 17,18, 19, 20, 21, 22, 23, 24, 25, 26, 27, 28, 29, 30, 31,469, 470, 471, 472, 473: n = A,T,C or G
nnnnnnnnnnnnnnnnnnnnnnnnnnnnnnntcgtcaattcaaagtaaaccaaatcatcacatcaagaaaatacattgggcaactctcatgtccccttctgacaaagaaggcacatagccaggtgtatgttccctggaagcttaaaatctagttggggacaatcaggcaagagcacaaacggcctcttgcttgggctgtggcaaaaagctggattttatcctaattgcgacaggatgacatcaggagagcaacatgatctcatagagattcttttaaatatatgaatttttaactttagagacagggtctcactgggtcacccaggctggagagcagtggtaagatcatagttcactgcagctttgacctcttaggctgaagcgatcctcctacctcagcctcctgggtagctaggactacagaagtgcttcatcatgacaggctaattttcaaattttttgtacagannnnn

SEQ ID NO: 10696 - DNA, 1780 bp, Homo sapiens
  misc_feature 1: n = A,T,C or G
ncaagcttggataaacagctgccaggccccagtggtggtgaggaagaaaaaccgatgggaaatgggagtccaagcccgcctcctggcacatccctggacaatcctgtacccagcccctccccttctgagatctttcctgtcacacactctttccccagctctgcacattctgacactcaccacaccagcacagcagaatctcaaaaaaaagccacagcagagggctccgctggtagagttgaaaattttggcaagaggaagccactcctccaggcctgggtctcaccctcggagacacatccagtctcagctcagccaggcgctggaactgggtcagccaagcacagacttcatcctgtgaagccaatgaatgccacggccaccaaggttgctaactgcagcttgggaactgccaccatcatcagtgagaacttgaacaatgaggtcatgatgaagaaatacagcccctcggaccctgcatttgcatatgcgcagctgacccacgatgagctgattcagctggtcctcaaacagaaggaaacgataagcaagaaggagttccaggtccgcgagctggaagactacattgacaacctgcttgtcagggtcatggaagaaacccccaatatcctccgcatcccgactcaggttggcaaaaaagcaggaaagatgtaaatcagcagaaaaaaaacaccgagacgtttctgtgacttcactttcacctgctccaggggtcaaggacttgccttgcctgataaccagccagcaggctccgaatcaccatctccctcacatgttatccggcaagagtgaattctaccaatggaagccaggttaatgattacaattaatcttttactgtacattcccaaggctttagttttaaatgccactgtgcctttaacaaggttgtaaatattttatgcccaccagagatgtggtcataagatctgatcctgagccagagattcagatggcacaggaagtattcatgtattttaacactggggttttctttctttcatactgagattttttttcagtatgtatcctccagctcttaaagcttacctgagaaagctttaaatgagaaaaggaccatgcgattggtgctgtgttacatacacatactttcttggcttctgagtagctcaggtgtggcttttggctgcagatgttaaattttgataccatgtaaacctacccagcttctcagacttgggtcttgttttttgatgggaacagaggtgtttagagaaagcctctgagtatgcctttcagattttgaacaagcggccttttctaaacatcgacttctactactctctagccttaaaataccttctgcttagatccagggcccttctactggagataggaaaagtagaattcaggaattaaaagaattactctttattcaatttgaggaacttggtgaaagcccctcctcttatgacagccaggttcctgctggctagaccagcctattcagcgctttgctaggggattgggtggtccacgcactcgctaatacagttctccaggtgtggaatgatgtcaatacgattgcttggccttttccccctgtgcctttgctcggtgctctggtttcctcagcaacactccttgtaaggggcagagacagggtccaccaactccccaagatgaagaagccccttcatgagccactacacccagccgatttttcctttttgattaaagatgctattacaatgtaaatatttcttacacagaaagtcacagcacatgtgcccattga

SEQ ID NO: 10697 - DNA, 914 bp, Homo sapiens
  misc_feature 819, 911, 912, 913, 914: n = A,T,C or G
accaaagtgatcctccatcttaaagaagatcagacagagtacgcggggtgtttttaaaaaagaatttaattaggaaattttgatactcttcattactaggatttatccattgaaattatttattgctattacttttaacagagtctctgtgagactgtttcacagaaggatgtgtgtttacccaaggctgcgcatcaaaaagaaatagataaaataaatggaaaattagaagggtctcctgttaaagatggtcctctgaaggctaactgcggaatgaaagtttctattccaactaaagccttagaattgatggacatgcaaactttcgaagcagagcctcccgagaagccatctgccttcgagcctgccattgaaatgcaaaagtctgtgccaaataaagccttggaattgaagaatgaacaaatacgagcggccgcccgggcaggttctctgttggagtcacaggaaacaaaatgtgcccttctgctgatgaaactttgctgtctgaggaggtattttagcctgctgcctggataattacctgtgttactcacattagcaatacagagtgactggaggcggatgcacccagcaaggccacatgggaccccgtatggatgtgatggccccttgccatcatgggtcactgaagggcagctgcaataaccctcatccagttctgccctctcaataatctctggcactgcctgtgttttctcttattcaagtgagggcaagcaccttctagtccacaggggttgggcacagactgagacacgatgtcatgtgccttagaaaggtcaaggttggttcataggnctcttagagcaaagaagggcaggagagaaagaaaaactagcatttattgaaaacttagaatgtggtcaggcacagtggcccacacctatcannnn

SEQ ID NO: 10698 - DNA, 775 bp, Homo sapiens
  misc_feature 1, 775: n = A,T,C or G
ncgaattggactccacgcggtggcggccgaggtacctgtgtcaggagtccccaagcccactcccaaaatagaaaattcactaaaaggagtcaaaggattcagcatacagtaatattaacaactaagatttattccagcaggatacaaagcaaaataagaaaggaaaagtcgcatggggcaaaatcaggtgaaagcttccaagagtcctctcccaatggagttacacaggatgtgcttaatacctccagcaaccagttgtgacaatacatgcaaagagtgcaaagtcttgtccacgacggatgttctttttttttttttttgagaaagccttgctctgtcacccaggctggagtgtggcacgatctgggtgaagagcaagactccgtctcaaaaaaacaaaagaaaagaaaagtccagtccttgtcttcaaaattacttcagtgtggccgggcgcggtggctcacacctgtaatcccagcactttgggattacaggcatgagccactaggcccagtctcagtttcattcttttttatggttgcatagtattccatggtgtatatacaccacattttctttatccaatcaactactaatggacacttaagttgattccatgactttgctattttgataatttatatttattgtgataaacatacaagtgcagatatcattttgatataataacttcttttcctctaggtagatgtctagtagtaggactgctggatcaaatgataattctatttttagttatttgctaaatctctgn

SEQ ID NO: 10699 - DNA, 573 bp, Homo sapiens
accttatgacccaacattgacctcaaaagctaggaatgacctttgcggggaactgtccccaagacaacctcaaagagacagcacaacatttgcagctgtttctctttcagcccaaggtcgcaaaggatataagaagccaatgcagcttggaggagaaggattcctgtaaatcactcactatgatttcccacagcaggcaagtggatcccctaaagaaagaaggcttatagagttccctcaaaagagctcagaacttcaacaatgattctattcacataggcatttctgtcttccaaattttagctttaagagtctgaggaagtacctcgagcggccgcccgggcaggtactggaaaacctccatcttggctcccagagctctaggaactcttcatcacaactagatttgcctcttctaagtgtctatgagcttgcaccatatttaataaattgggaatgggtttggggtattaatgcaatgtgtggtggttgtattggagcagggggaattgataaaggagagtggttgctgttaatattatcttatctattgggtggtatgtgaaatattgt

SEQ ID NO: 10700 - DNA, 539 bp, Homo sapiens
  misc_feature 539: n = A,T,C or G
actgacctcttagggatctaaggaaaagattctggaccagaatgggcctaggcttgaagtggatctcttccaaaagaatagtgaatagtttttatcttttctaaaagatggattgaatggaattcttccatttgtagtagttcttgtaagtttaattaattttgtaacatcttttgagaatttaccacatgccactccttgagctgggtgcttactatgtgtttattattttaaccctcacaacaacctcaacaccctcatgaagtaggtcctattaggatccctgttttgaagatgaactgaggctcatgtttagcccaagttcactgagctagtaactggcaaagttagaatctgaaatgaaatctgcctgatgtcagaatgatgttgttcattcataggctgatattcttaaggctctaccccaagacaatagtcacggcgtcatggcacaggcagcctgtggagctagctcatttgctccaatccaaaaaaaaaaaaaaaaaaaaaaaaaaagtacctgcccgggcggccgctcn

SEQ ID NO: 10701 - DNA, 1079 bp, Homo sapiens
  misc_feature 1, 1077, 1078, 1079: n = A,T,C or G
ncggtgtgtgtaggtgtgggtggttgcgtctgtctcgttgtgtgttgactggccggagcggtgacggggcaaagcagcacgtgagcgagctgcatgatctggcggcgactcatcgaccttgtcctgtgcgctcttccagtatcaccagcgtttgggtgtccctagagacccagttgtgacccacgactttcttctgggccctatgcccgcgtggccgcttcgatttttaacagttctggggccatagacttctccgcgatcttgatcgaggcgatggtgaaacatctgggacacttcgcccaaggttcgttgttccccggcaaacccagccatcggacggggattttcaaatttgcttttggcaataaattctcatgggaggggaactatggacccatccaaggggcatgaagttccacttttggcaattcagaatagaagtctttcttgcaaggctgtttgctcttctgcctctatcattttagcaggaaaaaaatgattcttctcccactcttattcttagtatgagcacatatgatgtatttcagtcagtaaattgtatggtactgaatttccttcagattgctttacttccacacattttgggaagattagctgtatgtgtagatctgggttcagcttcaccttttttttttttcttttgagacaggatcttactttgttgcccaggctggagtgcagtgtcacgatcacagcttgctgcagtctcaagcttccagactcaagcgatcctcccacttcagcctccagtgagttgtcttctcatttttctgttccttcaacctctccctctccactagctggtttccctcacaggaccaacacgcatgtgcagtatttgcttccacctcttagagatttctcaactacaaggacttaggcaaggtttcccttttgactggaaggcttgtagaaacgtgacaacccgccttccctaacactcatgtcacagcggtagcggaccgtattctgggacaaatggaactcacgacattccccccgaaggtcagccgcaagcgaacttagcactggctacaccctcccggacgcgtgggnnn

SEQ ID NO: 10702 - DNA, 410 bp, Homo sapiens
ctaatttttctatttttagtagagatgcgatttcaccatgttggccaggctagtttcgaactcctgacctcaagtgatccgcctacctcggcctcccaaagtgccgggactacaggcatgagccactgcgcgcagccccacttgcccaattcttgaccatcatttattgagctaaatccaaaaaggaaactctaccactgactcttttctttctcatggcctccaaaatgaatcctaggtttttccagcagggtaaattcaaaaggactcaggttggaaattgacttcttggttaaaaaaaaaaaagtataaacagaaggtcctttttagaaatgaggtttattttcaaggctactcagtcctaaaagcctgcatatttactttttttccttcctccagcccgcgtacct

SEQ ID NO: 10703 - DNA, 3030 bp, Homo sapiens
  misc_feature 2951, 2952, 2953, 2954, 2955, 2956, 2957, 2958, 2959, 2960,2961, 3016, 3017, 3018, 3019, 3020, 3021, 3022, 3023, 3024,3025, 3026, 3027, 3028, 3029, 3030: n = A,T,C or G
gcgtccgcggacgcgtgggctggaggggcgggggagtcacctgcgagcggctgcgctggcggccagcccgcccaccgcgtctggatcgcgccggctgcgcggggctgcggacagcacacaccctggaaggccccggcggggaacgggcagagtccgcgccctgcgtccgcgaccaggaggatcggaccttcgccttcgctgtcgccgccgccgccgcccgcggccgtcggggctattagtgaaagatggtggatcgcttggcaaacagtgaagcaaatactagacgtataagtatagtggaaaactgttttggagcagctggtcaacctttaactatacctggacgagttcttattggagaaggagtattgactaagttgtgcaggaaaaagcccaaagcaaggcagtttttcttgtttaatgatattcttgtatatggcaatattgtcatccagaagaaaaaatataacaaacaacatattattcccctggaaaatgtcactattgattccatcaaagatgagggagacttaaggaatggatggctaatcaagacaccaactaaatcttttgcagtttatgctgccactgctacggagaaatcagaatggatgaatcatataaataaatgtgttactgatttactctccaaaagtgggaagacacccagtaatgaacatgctgctgtctgggttcctgactctgaggcaactgtatgtatgcgttgtcagaaagcaaaattcacacctgttaatcgtcgccaccattgccgcaaatgtggttttgttgtctgtgggccctgctctgaaaagagatttcttcttcccagccagtcctctaagcctgtgcggatttgtgacttctgctatgacctgctttctgctggggacatggccacatgccagcctgctagatcagactcttacagccagtcattgaagtctcctttaaatgatatgtctgatgatgatgacgatgatgatagcagtgactaaggacacatttgggagtatttaatcaggtgtggctatctgagaaatcaactttgggggaaatgtaagattctgagctctctctctgttttgttctagccatgaatttgcctgagaaacttgtaacctatgtgcctcaatatattccatagaaagtaggtccccctgccttctcccactcctcacactcttctacagggataggcttttgcaaatatatcagataaattttttgtttcttgtttatttttaggttattttcttggaaggttgggaaaagatgtttgttttaacaggtcatgtactacgttgttgttttcatttctgttataagtaaaactaaaagcacagaatggtgggaaaggggctataatgtggttcattaataatgttagcagcttttttctaaccatcctgtctaatggttaagacaccagtaacaaaaacacatgatttggaaatactttggctttttcatatacctagtggtgccttatcataatagcactgttacatgaaataagcccctaccttcttactttctggtttgttgaaaaaatacactggtgctctttgaagtgataaaatgagtgtttatgaatgggtgtaattaggaaatacttctcatctgacagctacaaataactaagtttggaggtattttcactctatatgaataaatatttttccataaaatagttgtgattatatttttgttttatataggtcccaaattataattgtcaaatatatattttaaattaataaaagttgtcattcttaggaatttggtttgaaatttatcagttatacagaattgtcatactgcattagcttctacctttagtaagacatattttttaggtataaattcttatgctttaacattatttctggattgaaaatcttataaaacccttgaaaataaacagtctcttttttacaaagcctgtgttagagcacagatttacctaggcttgaagatttggaagaaataatatgtaagaatggcctcaaggcagaccactttaagtttggctagacttcatatcgtggaagtattgtctatttcagtgtgaaactatcttgaatttgcaaatatagtgttatattttataaagttttgtaaaatcccaaacaatatttctatttttgtaaaacaattgtatgtataatctgtatttgaaatcattttgcaatctatggaaatagagtagcaattgctatttctaaattgtgaactttaagtcaatctagatttattttgagaagtaattgttcactctttacttttgaggcagccattaggttgaaagtatatatttatcatataaaacttgatgcgttttgcactactctttccatttatatgctgcaaacaactacagtctttgaaatatggaaaatcagcagtctaaagtttgttttaaattctaaatttaaaaaatcttcaaatctgaatataccgcaaatgtcatgagaagtttgattcagtaacttgtgatggaggattctttggtatcttactgtttggttaaggcactaattttacttacctattagattttgaaagtatctgagatatacaaatctccctgtaggaaatgtgaaagaaaagcacaacaaaactagggttttttgttcatttgcttgcttttatgattttttttggtttgttttaatatcaggtggatttttgtttctaagcaatatatacataaaatcaaccaacatatctgaaaaggatcatgaaacctgagaaatgctaatggagatttgctggtacataggaatctagcaaattcaggaaccaaggggaaatgttgtgagataacatttacattgtcaacctttattgactttgtttttacaataaaaaatattttacaacttaaaaaaaaaaaaaaaaaaaaaaaaaaaaaaaaaaaaaaaaaaaaaaaaattaaaaaaaaaaaaaannnnnnnnnnnggcccgctaaactagtcctaaagaaaaaacctttccacacctttcccttgaaccnnnnnnnnnnnnnnn

SEQ ID NO: 10704 - DNA, 557 bp, Homo sapiens
tatcaatgagttaattttaaaggtaataaactgtaacttgttttcttcaaaactgcttttaaatgttgctaatttctattcctgcacactaactgaacaaggatgctggcaatgataactgtaagacagagaaatgacatgattctgagctgcattttaaaaagattactttggcagccaggcattatactgattagatgacagaaagaccagagaagcacaaaagataacggatgggtcttcggcttaataccggggtgacgaaataatctgtacaacaaacccccgtgacacaagtttacttatgtaatgaaccttcacacgcaccccggaacctaaaataaaagttaaaaaaaaaaaagaagaagatggaaagaccagaggagggaggcaagctaattagcaatattgagaatggagaatatggaaagaatgtgagaaactctgtgagagctgaaccctcagggtctggtcctgactgcatataggagataatgtagatggtgcttcaatgctgactccaagatttaaagctcaagtgagaggaaaactgaagt

SEQ ID NO: 10705 - DNA, 986 bp, Homo sapiens
  misc_feature 986: n = A,T,C or G
cgggagcggggcgccacgcgtccggggcgcttgggcgcctgggctgccggacggtgggaacggaagtcgctgtgggacgctgaggaagccaggatggcgactccgagcaagaagacgtcaactccaagcccccagccttccaagagagctctcccgagagacccttcgtcggaggtcccgagcaagaggaagaattcggccccgcagctgccgctgttgcagtcgtccgggcctttcgtggaaggctctatcgtccgcatctcgatggagaacttcctaacatatgatatttgtgaagtatctcctggaccccacttgaatatgatcgttggagccaatggaacagggaagtcgagcattgtgtgtgccatttgccttggtttagctggaaaacctgctttcatgggacgagcagataaggttgggttttttgtgaagagaggatgttctagaggcatggttgaaattgaattgttcagggcttctggaaatcttgtaatcacccgtgagattgatgtggcaaaaaatcagtccttttggttcatcaacaaaaaatctacaacccagaaaatagtggaagagaaagttgcagccttaaatattcaagtggggaatctttgccagtttctccctcaggacaaagttggagaatttgctaaactcagcaaaattgaactcctcgaagccactgaaaagtcaattggtcccccagaaattgcgcaatatcctgtgtactccaaactgtggagaagaagaacagtcccgacccctgcgcagagaaactgctgtctctcgcgaaatggtgtgcccgcttcgaggattatacccccggtgggagggcttctagcagggccgcacatattcgagctgccacccacagcacgctggacaaaagctcgcgcctcagagacatattgacgcggagcgcatcacaggcactccactcatgcacaggagccctgcggcgcggaacggcgcacacaccn

SEQ ID NO: 10706 - DNA, 1145 bp, Homo sapiens
  misc_feature 1137, 1138, 1139, 1140, 1141, 1142, 1143, 1144, 1145: n = A,T,C or G
cgacccacgcgtccgggaggcttccgaataagtgagtcaaagtgcctgatgcaggatgatactagaggcatgtttatggaaacaactgtgttttgtacttccgaggatgggcttgtatctggtttcggacggactgttaatgacaatttgatcgacgggaattgcacaccccagaatccaccacaaaagaaaaaggttacaaatttaacaatttatagtccttttaatagtttttttttttttttcataatactactgaggggaattgttagatgtattatgtaaggcattcttaatttagttattaaagttacatttttaatatttttaaaccttttgtaaatgctggcttaattagaaaatgtttacagaaaagtaaaaaaattctagtaatatgggaaatccttgtaagcagcatggtttcagaaaaatctcaagatgatttatttcaccaaatgagtattttttaaaactaggaactccccaaccaaaaacacagacttgaataatatttgtgttattacctttattgtacattgagcaagcacccttgtatagaggaaatgcctctttcctcatctataatatctatagtatttaggccatggatgtaagagtgtttttattttactaatagttaatgtattaaatattaagttagttccctgatttcccattatttggttggcagacatactgagataattagaatgccttatttcaaaagaaactatagcacttattttgttagtaggcttattgctttgcaagtccaagaattttcgtgatgtgtgcttttaatttttataacagagtccagttggcaactttgtgggaagcaatgtagtatagtggaaagagcacgggctttcaagtaagacctaggttcgaatcccggctccaacactcaccagctgtgtgaccttgagtgagtgagttactcaatttcctcatctataaaatggggatgataatatacctatttcatagggttgttgtgaggataaatgagataatgtatgtaaatcatctaagtacaatgcctggaatatagtaggcatttggtaattgttaattatttgttcagaatcaattaaaataattttcctaatgtaaatatagtaattctctttagannnnnnnnn

SEQ ID NO: 10707 - DNA, 776 bp, Homo sapiens
acttttttttttttttttttttgttacagatgctttcagtttaatagctgttttaaattttttttttttttttttttaggttttaggctgaagacgtaaagcctgctgctcctgggtatcatttctcagcttctccttacagctatagtactgagtcaaggacgtctttaacgtcatggacggctcctaggacagctttacccacgctttctagatcttcgactgcatcttttcctagttttccgagtccccccacagctttttttgctccgtctaggcctttttccagaaggctggatctctgcttccttggctttggtgcctgtctggctaaccctgggtcttcacctgcattttccttttgagctgctgatgcttcatggcaagggttccccgatcctggggcagaggcggcctctggatcataggcacagaccagggctcctgccagaactgtcaggaagaggagagtcatgaacctcatgcttctgtgtgctggagtgggtatgccaccaaatccttggagatcttgggatctagggtgtccccgcgtacgcggggacctcattcatttctaccggtctctagtagtgcagcttcggctggtgtcatcggtgtccttcctccgctgccgcccccgcaaggcttcgccgtcatcgaggccatttccagcaacttgtcgcacgcttttctatatacttcgttccccgccaaccgcaaccattgacgccatgtcgggttattcgagtgaccgagaccgcggccgctctagaact

SEQ ID NO: 10708 - DNA, 840 bp, Homo sapiens
  misc_feature 1, 2, 3, 4, 5, 6, 7, 8, 9, 10, 11, 12, 13, 14, 15, 16, 17,18, 19, 20, 21, 22, 23: n = A,T,C or G
nnnnnnnnnnnnnnnnnnnnnnngccttctggggaagtgctgggaacgcaacttaaggtgtttgtagacactgcccctcttagagcctgaaatgccacaatttaagctctaagcctttttgttctctgagtgtcctctagaaaagataacatcttcaacccttttggttttcagggattctctgccagtagccctgggggtgaaaggaggtcagcaaagggacttgccggatgtccgagtaggaagaagattgctataaggagtccaatccaaacctcactcatttcacaattttaccggaggctcctcttgctctccccagggccctagaacattatcaaaccttggtgaagaaagctgacacctttgattgtctgctgggtaacttgatgaaagagggcagtccttggtgccagaaaagtctggccaatttgtcacaggtgtgagcctggaggtcttcagctctatagtggagatcgtaaaatccatttcacaagaaaggcatgttctttcttacacgccttctcacagttcaataacacacagaagactcctaacccagtgctagagaaatgtttattgacttgtcctccccttgttgtatcctcattttgtggcagtggagattcttgggtgaatcagggctactgtggtcctgtgtatatgtgtaatttgctcccttggaggtcccagaatttcatactgcattggagtaggtgtctggcagactccgcagatcttaggcagaaggttcgccgagcactcctaaggctgactcagcccccgctgtctctaactgatgttgaatgtctgcctgtgactgtcccagagcactgctcc

SEQ ID NO: 10709 - DNA, 575 bp, Homo sapiens
  misc_feature 571, 572, 573, 574, 575: n = A,T,C or G
acttggaggctatgcagatatattcttttctctttaaagttttgcccaccagttttagaattcatcagtaaatcttgtctacagtaattattactatttgctattctaatgggaattttgtatatctccatcccttctaatatatttaacaactgaattctataaacaagatttgtttcttctccacattatttattttatcaatacagacacatactttgggggttataatccaatactattgttatttattatgttgttcatattgttctagctttggctactgggatcttttataagtgtcttctgtgtccttctgacatgccccatttttttctttttaagcacatctttactttctgagactacaagattgtccaggttctcatcttgtgttttcccttccctagccttggaatgagctgtttttccaatgatctctagttcctttattagaaaatggtggccaacatggtgaaaccccatctactaaaaataccaaaaaaattaaccaggcgtggtggcaggcgcccgtaatcccacctactctgggagctgttgcaaaattgcnnnnn

SEQ ID NO: 10710 - DNA, 1177 bp, Homo sapiens
  misc_feature 1, 2, 3: n = A,T,C or G
nnngtgaatgacttactttttattctataaattaggtcatagccaatatttcagtacacaaacattatttttattcatttgaatcccaatatgttttcttaaattgtaggaaaaaccggtagcatatcagtcagcaaaccagaaattatatcttactgctacatctcataactacatcttactaaaacacaaacattcataatatgtagtatactatctctaaaattacataggttttgtgtacatttcttctaattgatcatatctgcttattttcctctggattaaggatcaaggagatagtatattagatgatttgataaatttccaatgctttgcaaagtagttgaacaactttttctttgtgatgctaggtggcactactagtcaagacttggtatttcatagctggctttcttattctgaaggttgtaaaaagacatatgaagtaatatttaacattgaaaacatgataatcaatttgattatctatgaattgtcctaaacgttcagagtaaagtttcctttaaagttaaaatctttcaagtgaaggaaattataaagtcacatgtaaacaccaaaataagaggaatagagcaataggatatttttggctttataattcaatttaaaaattaaggtgcatttatttttttggcagctggccataaagcttcaatgtccagtaagcagttgctatctatgattcatgagatcatggggttccaacaccactgctgatattactgtcagcaatattaaaaccgcttaactcttggagaccaaattaactagtttatattttgcttcccagttcctgcaccttctgtctgcatactccttgtctcataaggggtttgagtatgcactccagctgaacagatgagccacactcctgtcacatatcctgcaagggggtcagggaactctcccatttcagcatgtgtgattttccagtggtggtgttcagaagtgtgtctcccaatggctattcattatgtgggaaaaggtcattacaaaggtcttcatcctcattatattcacgttgagtaggctgagaggaggaagggcaaagtctggtcttgctatagagcaatggtctccaactcccaggccgcgggcaagtgagggcattaccacctgagctccgcctcctgtcagatcagtggcccccgcg

SEQ ID NO: 10711 - DNA, 300 bp, Homo sapiens
  misc_feature 1, 2: n = A,T,C or G
nnactatgggcaattggagctcaccgcggtggcggccgaggtacgcgggggacaggccatctcgctataggaaaggaaagtggaacagcattcatcctcaacatttttacgaagacaaaatgaagactggagtagaagactgatcagtgcaggtgtagcataaaagtgtaatcctggaagatgtggtgtgagaagcattattagcattatgcctttaccaatcccaaaccatgggggtttctcacagctttacaccaaagggcatcactatccctcaaagagagaaacctggacacatgt

SEQ ID NO: 10712 - DNA, 844 bp, Homo sapiens
acacacttgtgtgcatttctgttgggtatataacaagtatgaaattgctgggtcttaaaatatttatatattaacttcattaaatgctgcctaagaatttttcaagtggttgtgctattttaccttcaccagttctagttgttccatatccttgctgtcacttggcattatctgtattttttattttgaccagactggtctgtgtgtcatagtatcccattgtcattttaagttgcatgcctttgatgaagacattttctgatgcttaattggctctttgaatatattctgtaactgatttgtaggagttttttatatattctggatataagttttttattggacataaatattgcagatatcttctcccactttaacttcccttttctttctcttaatcatgactttcttaatacaaagttcttaattttaatgtagtccaacttagcagactttttctttatagttaatgcttatttagtcttgctcaagaaatttttgtcaactccagtgtcataaagatactctcttatgttatagaagcctgtttttttttttttttttgagatggagtctcactttgtcacccaggctagggtgcagtagcacaatctcggctcactgcaacaagagcaaaactcattctcaagaaaaaaaaagaaaaattatcagaagcattattcaaatagtaattttaaaagcatggtggctcacacctgaaatcccagcactttgggaggctgaggccggtggatcacctgaggtcaggaatttgacaccagcctagccaacacggtgaaacaccgtctctgctaaaaataccaaattagccaggtgtggtggt

SEQ ID NO: 10713 - DNA, 996 bp, Homo sapiens
  misc_feature 996: n = A,T,C or G
ccgcggtggcggcagaggtacgcggggggagcggccaacatggcggaacgcaggagacacaagaagcggatccaggaagttggtgaaccatctaaagaagagaaggctgtggccaagtatcttcgattcaactgtccaacaaagtccaccaatatgatgggtcaccgggttgattattttattgcttcaaaagcagtggactgtcttttggattcaaagtgggcaaaggccaagaaaggagaggaagctttatttacaaccagggagtctgtggttgactactgcaacaggcttttaaagaagcagttttttcaccgagccctaaaagtaatgaaaatgaaatatgataaagacataaagaaagaaaaagataaaggaaaagctgaaagtggaaaagaagaagataaaaagagcaagaaagaaaatataaaggatgagaagacaaaaaaagaaaaagagaaaaaaaaagatggtgaaaaggaagaatccaaaaaggaggaaactccaggaactcctaaaaagaaggaaactaagaaaaaattcaaacttgagccacatgatgatcaggtttttctggatggaaatgaggtgtatgtatggatctatgacccagttcactttaaaacatttgtcatgggattaattcttgtgattgcagtaatagcggccaccctcttccccctttggccagcagaaatgagagtaggtgtttattacctcagtgtgggtgcaggctgttttgtagccagtattcttctccttgctgttgctcgatgcattctatttctcatcatttggctcataactggaggaaggcaccacttttggttcttgccaatctgactggaatggggtatgagtcttagggcttgtgacccttattaaagggcccagggttagaaaggagttgttcccaacagttcgggggaacactcggagaaaacaaggggggtaactacggcacacctttaggaggataataagatagaaatggan

SEQ ID NO: 10714 - DNA, 490 bp, Homo sapiens
  misc_feature 1, 2, 3, 4, 5, 6, 7, 8, 9, 10, 464, 465, 466, 467, 468, 469,470, 471, 472, 473, 474, 475, 476, 477, 478, 479, 480, 481,482, 483, 484, 485, 486, 487, 488, 489, 490: n = A,T,C or G
nnnnnnnnnntcttaatctttttcttcttagtcccaggttgttctcattcgtggctggatcacaccagcaagaaggattttaaaggacaactccttggggccgtccaacactgaaaccgcctgaccgctgctgtctttgtgcttgcagaaaatcacgtggccccggagagggtcagcgaggggcctccactgtctgagtccgctcctggcaacgcctgctctctgcactcagaggcccggtcccggcagctgccacgttgctcagaagttctggcagggggagcctgaaacccctgtctgctggcgacactcccggagcagcaggaaatctctacattttattttttttcttaacagacaaaagtatttgactccagaatgatttccaggaattacagtatgagaacttagtctttgagatttttattttcttcttaaaaaaataaaaatgaaatcaaagcagnnnnnnnnnnnnnnnnnnnnnnnnnnn

SEQ ID NO: 10715 - DNA, 2327 bp, Homo sapiens
  misc_feature 2324, 2325, 2326, 2327: n = A,T,C or G
gtccgcgcccccgcgacctgtagggccttggctggcccctcaccctcctcccgccccgggctgaggctgccgccggtttcgcgcccagtgccgaggcagcggcggagccggggaaggtcggagggagggtggtttcctaccgccccacacccagtctccgagccggatatatagagtgtcacgtttgggagccgaaagactggagccgtttccttgtggctggagcgcttcccgtagcctcggggaaggagcaggatttagaggaccactagttggaccccatcctcgtgctggaggaacaggaacctctttcaggagctataaaagaaagggaggaatcatgtccacaattgcagctttctatggcggcaagtccattctcatcacgggggccacaggctttctgggcaaagtgctgatggagaagctgtttcgcaccagcccagacctgaaagtcatttacatccttgtgaggcccaaggctggccagacactgcagcagagggttttccagatcctagacagtaagctatttgagaaagtcaaagaagtttgtccaaatgtgcatgagaagatcagagctatttatgcagatctcaatcagaatgactttgccatcagcaaagaggacatgcaggagcttctctcctgtacaaacataatatttcactgtgcagccactgtacgctttgacgacactctcagacatgctgtgcaacttaacgtcactgccacccggcagctcttgcttatggctagtcagatgccaaagctggaagcctttatacatatctctactgcctattcaaattgtaacctgaagcacatcgatgaagttatctatccgtgccctgtggagccaaaaaaaatcattgattcccttgagtggttagacgatgctattattgacgagattacacccaagctgatcagagattggcccaatatttatacctacaccaaggccttgggagaaatggtggtgcagcaagagagcaggaacctgaacattgccatcataaggccctccattgtgggagcaacttggcaggagcctttcccaggttgggttgataatataaatggacctaatggaatcattattgcgactgggaaagggtttcttcgggccataaaagctactccaatggctgtggcagacgtaattccagttgatacagtcgtcaatctcatgctagctgtaggatggtatactgcagttcacagacctaagtcaacattagtctaccacattacatctggtaacatgaatccctgcaattggcacaaaatgggagtccaagtcttggcaacctttgaaaaaatcccatttgagagacctttcaggaggccaaatgctaattttaccagcaacagcttcacatcacagtactggaatgcggtcagccaccgggcccctgccattatctatgactgctatctgcggctcactggaaggaagcccaggatgacaaagctcatgaatcggcttttaagaactgtttccatgttggagtatttcatcaaccggagttgggaatggagcacgtacaatacagaaatgctgatgtctgagctgagtcctgaagaccagagagtattcaactttgacgtgcgccagttgaactggttggaatacattgaaaattatgttttgggagttaaaaaatacttattgaaagaggatatggctgggatcccaaaagcaaagcaacgcttaaaaaggctccgaaatattcactacctctttaatactgccctcttccttatcgcctggcgccttctcattgcaagatctcagatggctcggaatgtctggttcttcattgtaagcttctgttataaattcctctcctactttagagcatccagcacgctcaaagtttaagagcatttagccatcgccttttatctggaacctctcagatacctctaaaacagcaaactgtgattctcaagattagaaagtaacaaggaatatgcccaaactgtcaaatgtcacctgttatgtattcgtccctattccttaactatgtatttttatttcagtgagagaaggaaagttgtaaactagcccatagtcacctatattttagggaaaaaaatccaaattgtttcctaacattctattttatgcccttgcgtattaaacgtgaaagtactcccacttttctatatttagtttttcttttctctctgagatgattcatttaaactcagtaaatatggaaagatgcatggcagaagctgaaatgagctcaagcagtactaaccttggaaccattctgggtacccaaaagaaaaatttaaaatcaagatgagtnnnn

SEQ ID NO: 10716 - DNA, 370 bp, Homo sapiens
  misc_feature 1, 2, 3, 4, 5: n = A,T,C or G
nnnnnagatttctatgggacatcgtttaaaaactattgtttacgcgagagccttgctaatttcctaaaaattgtggatacattttttctcccatgtataattttctcaccttctatttaaaaagaaaaaaaaaagtcagtgtagtatttacatattttaccctataaggagctaacataacttttgatttagtgttattcataaaattaggttagcagtttattaaccttttgtatttgctctggcaatgtttaatatctcataagctatacacacctcgaagccatcaatgacaaccttttcttgctgaatagaacagtgattgatgtcatgaagacaattttatctccttttgccttccataatttgt

SEQ ID NO: 10717 - DNA, 436 bp, Homo sapiens
  misc_feature 1, 2, 3, 4, 5, 6, 7, 8, 9, 10, 25: n = A,T,C or G
nnnnnnnnnncatgttagtcttttntgtttctgggaatctaaaccaaacaaatcatgataatttcagaagagattaacttgatttttttccttcatcggcagcagactctgacttacccacctttcccactatttctttgagtaaggatttgaacaatttaagccttcacatttggaattttatctcttttaatctttgtaaatattatgagtaaaaatcaggaaatgcctcactggtacccttggtttctcagacaactcactgatttatggtcttgagaccataaactcattttccttatatgaatgacatttccacatccacaacaataccaccaaatatatgtatctagttcttactaactgcaaatcctcaaagtgaactgcgtgcattttaatgttgcgtagtttgctgatttatgatttcccttaatgt

SEQ ID NO: 10718 - DNA, 1197 bp, Homo sapiens
  misc_feature 1, 1197: n = A,T,C or G
ngcgtccgccccgcgtccgcccaagtgctgggattacagatgtgagctactacgcccagcctaatacgcataatattactatcgcaggagaatcgattgaacctggaaggcagaagttgcagtgagccgagatcacaccattgcactccagcctgggcaacaagagcgaaactctgtctcaaaaataaataaataaataaataaataataaaaataattaaataagtacatggcacatagtgtttgcaattattattatcataggaagttacctcagataccaaatgctattggattaagggataggtgaaattattatgtcatattaataataaaaaacatgatagccactatttagagaaagctgatgtttaatatttctgtgacatcaattcaccactaaaacccttgatctttctctaaataatagatgttaatttgagtttaatgcatggctttgaacatcttaagtttatgaactggtacctaaaatatcaaactgtcctgcttttgaaaaatcacttttatcactatttaaatctctacacagattcaccaggcatgtaaactcatctgcagaaaatgtaaacgtcatgtgacagatctaacagggcaagtggtacaggagggaaccaggcgctacagactgtgtaatgagtgtcttgcagaatttggcatagacagcctccccattgacttggaagctgaacaacatcttatgtccccatcagatggagataaggattccagatggcacttgagtgaagatgagaatagatcctatgtggagattgtagaagatgggtctgctgatctggtcatccaacaggttgatgatagtgaagaagaagaagaaaaagaaattaagcccaacattaggtagctgtaatgtgaaccaacagagctggcatgtctgcaatttacattgacttcctgtatctctctctttctatggtcggagtctagttaacaaatttatcacactgactgtaaagaaatgatctgatataacttgcatgctttctgaacaggccattgtatccattctgaactttgctgccctaaaatgtgttgctgcactggaaagaaagaactagcttcagttggctgtgatggatgaacacattatcctcttactttcattacaatcctcttactttattgacagagataccttttcttttaatattggaggan

SEQ ID NO: 10719 - DNA, 795 bp, Homo sapiens
  misc_feature 767, 768, 769, 770, 771, 772, 773, 774, 775, 776, 777, 778,779, 780, 781, 782, 783, 784, 785, 786, 787, 788, 789, 790,791, 792, 793, 794, 795: n = A,T,C or G
acgcgggattgacattgcaagaagcaaatgttacctctaatagcgtggtccaaaataatgtctatttacattctcagagcactttgtcaaggttattcagttgaaggctgtaacactctcaggagttaatcaagagcaatggcatctatgtttattagtgaagggaagacttacttgcacctactgcatatctgagtttactgagctcaaactggaatttaggaagccaaaaaaaaaaaaaaagaaaaagaaagacagtgtagacagaggcaagaaagtagagtgattgcatttgggcatctgaatgacccatcttggaatcacagctcagtcactggctgtatgccttgagaatgtttcttctctgttctgagccgctggttccttatttatgagataaatgaggaactgtgctgcacgcagttggttggagcctgaaatgagataatggatgttgtcctagttagaagatgagtaattttagggccggatgtgttggctcacgcctgtaatcccagcagtttgggaggccaaggtgggctgatcacaaggtcaggagatcaagaccgtcctgtctaacacggtgaaacccatctctacaaaaaatacaaaattagccaggcatggtggcgggtgcctgtagtcccagctacttaggaggctgaggcaggagaatggtgtgaacctgggaggcggagcttgcagtgagctgagattgcaccactgccctccagcctgggcgacagagcgagactctgtctccaaannnnnnnnnnnnnnnnnnnnnnnnnnnnn

SEQ ID NO: 10720 - DNA, 243 bp, Homo sapiens
  misc_feature 218, 219, 220, 221, 222, 223, 224, 225, 226, 227, 228, 229,230, 231, 232, 233, 234, 235, 236, 237, 238, 239, 240, 241,242, 243: n = A,T,C or G
aggtacgcgggggagcggtgagtgatcctttcagcaaagtcagtcctgggcaggagacggcttcaggaatactgtcagctttactggattccaccatcgctttccaggactgtttaggccctgggcccttgaagggtttgcgtgcctcttgtctccattcatacctcaagaactttgttcatgttaattttttttcactctatcatatggaattgagnnnnnnnnnnnnnnnnnnnnnnnnnn

SEQ ID NO: 10721 - DNA, 1794 bp, Homo sapiens
  misc_feature 1, 2, 3, 4, 5, 6, 7, 1766, 1767, 1768, 1769, 1770, 1771,1772, 1773, 1774, 1775, 1776, 1777, 1778, 1779, 1780, 1781,1782, 1783, 1784, 1785, 1786, 1787, 1788, 1789, 1790, 1791,1792, 1793, 1794: n = A,T,C or G
nnnnnnnagaggagaggagcgggccgaggactccagcgtgcccaggtctggcatcctgcacttgctgccctctgacacctgggaagatggccggcccgtggaccttcacccttctctgtggtttgctggcagccaccttgatccaagccaccctcagtcccactgcagttctcatcctcggcccaaaagtcatcaaagaaaagctgacacaggagctgaaggaccacaacgccaccagcatcctgcagcagctgccgctgctcagtgccatgcgggaaaagccagccggaggcatccctgtgctgggcagcctggtgaacaccgtcctgaagcacatcatctggctgaaggtcatcacagctaacatcctccagctgcaggtgaagccctcggccaatgaccaggagctgctagtcaagatccccctggacatggtggctggattcaacacgcccctggtcaagaccatcgtggagttccacatgacgactgaggcccaagccaccatccgcatggacaccagtgcaagtggccccacccgcctggtcctcagtgactgtgccaccagccatgggagcctgcgcatccaactgctgcataagctctccttcctggtgaacgccttagctaagcaggtcatgaacctcctagtgccatccctgcccaatctagtgaaaaaccagctgtgtcccgtgatcgaggcttccttcaatggcatgtatgcagacctcccgtgtccttgagcagtgcccatttccctcagcattgaccgtctggagtttgaccttctgtatcctgccatcaagggtgacaccattcagctctacctgggggccaagttgttggactcacagggaaaggtgaccaagtggttcaataactctgcagcttccctgacaatgcccaccctggacaacatcccgttcagcctcatcgtgagtcaggacgtggtgaaagctgcagtggctgctgtgctctctccagaagaattcatggtcctgttggactctgtgcttcctgagagtgcccatcggctgaagtcaagcatcgggctgatcaatgaaaaggctgcagataagctgggatctacccagatcgtgaagatcctaactcaggacactcccgagttttttatagaccaaggccatgccaaggtggcccaactgatcgtgctggaagtgtttccctccagtgaagccctccgccctttgttcaccctgggcatcgaagccagctcggaagctcagttttacaccaaaggtgaccaacttatactcaacttgaataacatcagctctgatcggatccagctgatgaactctgggattggctggttccaacctgatgttctgaaaaacatcatcactgagatcatccactccatcctgctgccgaaccagaatggcaaattaagatctggggtcccagtgtcattggtgaaggccttgggattcgaggcagctgagtcctcactgaccaaggatgcccttgtgcttactccagcctccttgtggaaacccacctctcctgtctcccagtgaagacttggatggcagccatcagggaaggctgggtcccagctgggagtatgggtgtgagctctatagaccatccctctctgcaatcaataaacacttgcctgtgaacaaaaaaaaaaaaaaaaaaaaaaaaaatccgtctgcccctctttgggttttttttccctaattttaagggtttcctttaaaaaaaaaccaaaaacaaaaacaaaacacgacacacaaaannnnnnnnnnnnnnnnnnnnnnnnnnnnn

SEQ ID NO: 10722 - DNA, 253 bp, Homo sapiens
tccaccgcggtggcggccgaggtacgcgggggcattgttggaagtttactctggttaaaggatagagaaaaaaatggaaaggggagggtaatcacaacagtctaggcaagagatgatggtagtttggagacagaaggtgtggcagtggacatgaagataagtggatggatttgagagaaacttggagagtgaaactgcatggatagtgatggatcaatgacagtagactgggatgaatggaagtacctgcccg

SEQ ID NO: 10723 - DNA, 387 bp, Homo sapiens
  misc_feature 1, 2, 3, 4, 5, 6, 7, 8, 385, 386, 387: n = A,T,C or G
nnnnnnnntgttaaaaattttaaaatttaataacttgaatatacatctgctttgaaataggacataaagtcatacagtatttttacataattttcttgcttttcaataatagtatgcaactcataaagaaataaagatctaaggagcacaaagatacatgtatgtgatttaaaagaagcatttcaaataaacaggaaaaaaattactctcttatttcataccgtatctattgtcttcatcataacagaaatctataataataagaactagagctatcacagcacctctcatctgctgacactgtgttaaacactatacatccatcacctcctctaatcttcacaattctgtgaggtggatactgtgattgactttatctccatannn

SEQ ID NO: 10724 - DNA, 416 bp, Homo sapiens
  misc_feature 416: n = A,T,C or G
tattttaaatgtgtcatgatatctattactttgtgtaaaaattacctgtttgttttttcaggttatataatagtataacactgccaaggagcggattatctcatcttcatcctgtaattccagtgtttgtcacgtggttgttgaataaatgaataaagaatgagaaaaccagaagctctgatacataatcataatgataattatttcaatgcacaactacgggtggtgctgaactagaatctatattttctgaaactggctcctctaggatctactaatgatttaaatctaaaagatgaagttagtaaagcatcagaaaaaaaaggtaaacaaattgctcctgtggagatgattggcatcacatggtgttttgagccgatacacccaacacttgagctcactgcaacagtacaagn

SEQ ID NO: 10725 - DNA, 330 bp, Homo sapiens
  misc_feature 330: n = A,T,C or G
atgagagacaaagctgagaagtgtggtggaaaaggaagagagagctgaggcagacgatgtaagatctgctgttacttcttgctgtgtgaccttggggtgaagcagcaagaaggcccttgctagatgaggctcctcaactgtagactccccagcctccagaactgtgaagtgaagtgggtgtgcctgggatcgcacacagctgctaaaagaaggtctcaagagccacagatgtcttggatatttctgtatttcagactctactacccagacaccaaaagaagaaatgatttaccctggaggctgccttggtcttggtgaaaaaatatatgn

SEQ ID NO: 10726 - DNA, 726 bp, Homo sapiens
  misc_feature 1, 2, 3, 4, 5, 6, 7, 8, 9, 10, 11, 12, 13, 14, 15, 16, 17,18, 19, 20, 21, 22, 23, 24, 25, 26, 27, 28, 29, 697, 698,699, 700, 701, 702, 703, 704, 705, 706, 707, 708, 709, 710,711, 712, 713, 714, 715, 716, 717, 718, 719, 720, 721: n = A,T,C or G
  misc_feature 722, 723, 724, 725, 726: n = A,T,C or G
nnnnnnnnnnnnnnnnnnnnnnnnnnnnncagagacagggtctcgctctgtccaggctggagtgcagtggcaccatcatgtctcaccgcagtgaggtagcttctaagtgactcatggagagggagtgtctacagcatggagatgccagacaaagagaggatccacgtaccaggcaggatggagcaggatggtgtgagatttcatcacactactcaggatagtgcacaatctaacacttatgaattgtttatttctaaagttttccatttaatatatttgaaatgaagtagaccctgtgtgtagctgaaactttggaaaggaaaactatggataagggggactactagaatacacttcaataaaatagcattttaacaaaatcctagtgtccgtagagtagttctccatctagctgtccatctttcaaacgtggagagaggtgagatgagggagaagtatggtcagagaggggagacaggtgtgtgtggtgtgggtgtgcaggtagatacatagctcagtgttcactgtgagaggtgaacagagaacattccaagcaatgggagtggcatgatacaaggcacaaagaagtcaaactgaaaggcaccttcaggaaaaagaaaggagtctcttgcaattcatacacagagatcggcactggcaagaaacaggactctgggggaaaaatcagggctacaannnnnnnnnnnnnnnnnnnnnnnnnnnnnn

SEQ ID NO: 10727 - DNA, 3118 bp, Homo sapiens
  misc_feature 3115, 3116, 3117, 3118: n = A,T,C or G
cggccgcccggccaggtacttaaacagttatagtcaccatcacctgcttcagaatggtcttttagatttgtgtttgttttgttaaagttgttggcaccaggatgcagagaatcagactggcctgaggtgaaggagcacacagccctgagggcttggaaccctgggtccagttcctcttcacacccccttccactctgagtagcacatctccccaggtgcccatggaacacctgctttcatcccaaatatccgtccacctaggcggggtggtatgttcttacgtctctctgactttgatgccactcattctatagtttagctggttttcgttcaagatattcttggtagtaactgacaagtatgttgcacatgtattgggggaggcgcttcatttttattttaatacacatgtatttcctccttgcacaggattttgatggtgtgggaatatcctaagtggtagccttccaagtagcagtgagttgacattcagctgcttttaactattcaggctaccttttatactaaaccttgaaaactagaatctaatgtctaccccaaaaaagtagttctttgatattttatactttttatgtaccatgtcagaaagagtatgttggcgtttgtcatgggactcatttcacataatagaatgcctagtctcattgaccaatcgttaaaaaatcatatttgtgtgtcttaagattcatatttatatgttctctcaaatgtatgtctcttacgtaacatactctaagaatgaaactgtcaccacaggtaaatccttgttagcaaggaatctgtctgctccagtctactcctagtttgatccttggatgtaagaaccaagtcattacatgtcaaattcaatttttctgccttaagaatgaatgtccttcataaaatattggatgcagtgtaacactatccaaggcagtgacttcagctttatatacatataaaatatagttagttttaaaattattgacatttatttaaacttttagattggattgtttgctattgctctgtgtgaggatacataatctttcagtaaactgtatttttaacttttccataagctgattttggttcattttatcaacgtaagcacaccctgttcatagggaaaataaaccttgggttataagcattagcctgaggacaatgaagccacttaacctaatttatgctttcgactgttctgtttccagagaggaaagcctttacaaattactctcagttctttaggggcagaaggcttgtttcaagaggtttgacagaagaaaggaatatatgaacttaatgagatgtcgacttggttcaggtctaaaaatgagggcaaaacactaaggctctagcagtgacttgttcactaaaaagagagagtcctgtccccagacggttagtacaaagccttggatacagtttgcttgtaatatttttaataatgtgaggagtacagtgttttctaattcattcaagtatatatgatttaaacctgggctactgacacacacacagtagccattagttagactcttcttagtgaatatcaggaacatcccatctgtgcttaaccagaatccagcaagtcagcacacaagtgattttattgttattttgttgtatttacttgcatttgttgtatttactttcatctgcagcatttggagtttaaaaataatgtaaagggttctagtagaaatagtgtcctaaggccaattacctaccatactaacaatcagcagataaaattctggacgtgagattccttataatctaattatacctgaggttgagcaagaaatgtcttcctttagaaaatctcattcaagtcaggttcttctctacagttcaaaattgagaatggatttaattaactagcatttagccagctttttcttgcccttggagaaaaagaatcattctcaacctgataatctgttaagaaaaatcccatatgaacaatctggtcattaacatacatatgatacggagtctctttgttgtcaccaagtgaacatacttctcatggtgggttggacagtaatacatgttagagggtcagaagcttctggtttctgctgtttgctttaaatacccttggggtttttttttaaacccttacaaggggagcatcagctttggaaagtgtgactctgtaggagtgtagaaggcagtggtgtatgatcttagcctcgtcctgatgcctgaatccagccagctgttgctctgacccacagcaatagagcaagttacccatcaccagcatttgtacagagcagggaattctggttttagtccattggtagcattgtgtgtatgaggagattcaacaccacagacagctgcaggactcgatatccatggcttctttccatcacaaaacgggtagaaacacattcactgcttcagggttctaatctgtgtgtctccttatgactccatttctgtaagctactctgtaactttgatatatgctgtattttctttctttaaaagatttagatgttttttcagcaagctagccatacaaccattgtatctctttctcttcagtatggtttagagcccagatcagttagtaggctttcgttgtcttctctttcaatacatgtacatctttactgtttgaaaagtgttacagctgtcaaagaatcttcatggacctgaagataatttcttgtgaagttgaatgcaagtgtactgtcattcatagtgtttatatcaaaataccaggaatcttcacttttgctaccttgatatagcattgggctatcatgttacaacattgaaatacattgatttattaaaaaatacttttatacctttttagtacagcaaacacacacgcacacaaacacagcaactacgtcagacggctgccagcaacacagcaacccgccaatacgcacgcacccgacaaacaccgaccacaacagaaaaaaacggggggcggcgcgcctgaaaaaaaaaccccggggggggccacgaaacacggcccccgcctttgtacaaacgagcggccccacggagagcggcttatataaagacgggggggcgcgtacaaacgcgggggcaacacgggggcggtctgaggagaccccccgcnnnn

SEQ ID NO: 10728 - DNA, 1205 bp, Homo sapiens
  misc_feature 1, 2, 1205: n = A,T,C or G
nncgtttctaggcacatttacaaagctgcattcagattgatgaggagcttcatcattcagtttaatgtggccaactcctccctctttttggaaaagagcaggtgcactaaaccagcaaacacagccagcactgggctgtgcctgagagcagccacataggggtctctacagacagaagcccgagaaagaccgggaaagaaaccaggacccagactccagtatgaaaactctctgggctgtgtcctatgatcttcccatgagtaactcatagtcttgatccagtggaatctggccttcattagtctcagtggcaagttggttatgtggaaagtctctgttcactcacttgggtgaataacagtaaagacctttctattgttttcactttacattaggccatgagtatttgtgcctgtagctgcagtttgtgttagtttcctaccccaggtatctcctgcagcatgcagcttcagtcctaccagaccctcaaaacttaaaagcgaacactatttctagggaggattttgcaggaaaatggagaaagggttacacacaaaaaaggttaaactactctatgcatgtttctgcaatgtgttatctcaagaattcatctctgtagcccatcagggcaggagctggtctctcacctgttgataatattccataagggaggttcttccccacagtgtttagtcttccgacgctggtatagcctgacatgatgacattctactttcatgttggtcgtgctgcagggagaattctgtgagtgtcctaataggctggaatcacttgctaaggtgaaccccatctttggtgctcacttttctgttatcttataattagctttattctaagcaaatccatgtctattttatttatctgtttattaacttatttttatgtatggaaaaacacatttttttatttgcttatttatttagagacagggtctccctctgtcatccaggctggaatacagtggtagattggagtgatcatggctcattgcagcctcaaactcttgagctcaaatgattctctcacctcagcctcctgtgccaccatgccctgctagttgattttaatttgttataaagaaagtgtctcattatgctgcccaggctggtctcaaactcctgggcccaagcaattctctcatctcagcctcccaaagcactaggattaaaaacatgagccactgn

SEQ ID NO: 10729 - DNA, 488 bp, Homo sapiens
acttttagtagagatggagtttcaccatgtagtccaggctggtttcaaacttctgacctcaggtgatccacctgccttggcctcccaaagtgctaggattacaggtgtgagccactgtgcccagccagaatatatcatttcactggactctgcaggtgctttggatgatcaaggaataggacatggctgtagaagtacgcgggtgttgaggaggcatatttttaaaagaatcaaatataatttagataggaaatgacaaactcagcagacatattatgaaggaaatgagacatacaggagaagagaattaatgaattggttggaggctagaacttaataccctcattgtagccaagaagagagagagagaaaaaaaaggaaaacatgaagggaataaagaaacatgttagtgggatgagagtctcacatatgtattctgtaagtagaaactgaaggaagggacaatattcaaagtgagatgaccaagt

SEQ ID NO: 10730 - DNA, 417 bp, Homo sapiens
tttttagctgatgaaatatggtcccatttatcatcagttctaacttcgtgttactactgttgttcttaaggtccttaaagtaaattttaagactcaatctaagtgtgtcagtgttgattaccattctatttagaaaggcagaatttgtcttaaaagatatttgtctaaagtgtgtgttagtatttgtcaaaataaatggagggagggagtgggtgagctgggatagaggcaggcagaaagcaacaggacagagagttggagagagagaaagaaaaaaaactttttgtatcctaccatacatcttctggggagttataagttggacactgactcatcccaggaagccaactggtaaatattcagaaatcctgtgggccagtcgttaaaccaatagtagtttgaaatcagtctaggtgt

SEQ ID NO: 10731 - DNA, 795 bp, Homo sapiens
acactgatttccgatcaaaagaatcatcatctttaccttgacttttcagggaattactgaactttcttctcagaagatagggcacagccattgccttggcctcacttgaagggtctgcatttgggtcctctggtctcttgccaagtttcccagccactcgagggagaaatatcgggaggtttgacttccccgcgtactttggagtcccctggtttctcaagaattgccgttgactctttctttggcttctgctggcacggtaaccagactccctacaactgcactctttgtctttgtcatggaagccgcgagcgtagaggttccgcgtgctctgccggactgtgagcaggtcactgggtcctttacacttgtgaattcgaagcttgccagatgtatcctcaatgcattgccacttctgccccggttgttcacaggctgtctggtacgagatctccgaccagtctgggggcgctggcggcctgcgcagccacctcaagatcacagattctgctggccatattctctactccaaagaggatgcaaccaaggggaaatttgcctttaccactgaagattatgacatgtttgaagtgtgttttgagagcaagggaacagggcggatacctgaccaactcgtgatcctagacatgaagcatggagtggaggcgaaaaattacgaagagattgcaaaagttgagaagctcaaaccattagaggtagagctgcgacgcctagaagacctttcagaatctattgttaatgatcttgcctacatgaagaagagagaagaggaga

SEQ ID NO: 10732 - DNA, 1463 bp, Homo sapiens
  misc_feature 1463: n = A,T,C or G
acgtggggaggccatctggctgctgctgctgctgccagcttccagacggaagctgagatttgctattgatgttccagcattgattgagctcctgcctcgtctgcatcaggcatggtcctcgcagcttcacgcagttagagtccacatcacgtctctctgaagaacagttaaagtgtcttctggatgaatgcatacttaaacaaaaatccatcattaaactttcttcagaaagaaaaaaggaagacattgaggacgtaacacctgtgttcccccagctttccaggtccatcatctctaaattgctaaatgaatcagaaacaaaggtccagaaaactgaggtagaagatgcagatatgcttgagagtgaagaatgtgaagcttctaaaggctactatctcactaaagccttgactggacataacatgtcagaagctcttgtcactgaagcagagaatatgaaatgccttcaattttccaaggacgttattattagtgacacaaaagactattttatgtcgaagactcttggcattgggagactgaaaaggccctccttcttagatgatccactgtatggtatcagtgtgagcctttcatcagaagaccaacatctgaaactcagttctccagagaatacaatagcagatgagcaggagactaaagatgcagcagaagaatgtaaagaaccctaatcaaggacttgctgggtgtgcttttcagaaagttggtaatgaagttaaattaaatttcttattgaattatttgaattcaatgaatgcactgcagagactattctttattgattttgacatttggagtcgctctttgtggattatatttccttgatatttttgagacttggggtgtaattgttcagtggtttttgctcattaaaatttctgggaccattgtttataaatttattgctaatcttacagtattaggattcattataaaaaccaacattttaatgtatacgtgttagggtaaaactcgttgaagtgctgtgattgtcctgtattcaattttgtatgtttcacctctactgtgattcagacagatcatggtggtcactgggaatttttgctgtggccctgcttttccttcttcccacttgtctcatgtctgtgaaactggtacaacctgccataagatgaaatgaattgtctcaacaaagcaatattagaagagcctttactatcttattggtgatgacacgtttcttaagtaggagtttgagtgaattatttgatatattactttgttaataatagttaacaatagtttcttattttctttcagagtttgggccttttagattgcatcaaataaagatgagctactttaaaagacagtctgcggtactatttgaagagagatggtttagttacaagtttatttctgaatcaaaaaatgagcgggctattgtgctgcctttaataaaatttgagtgatgtatgcan

SEQ ID NO: 10733 - DNA, 874 bp, Homo sapiens
  misc_feature 802, 806, 872, 873, 874: n = A,T,C or G
accggagcttaagcgttgcagcaggaaaacttccatctcgctctcctggctttgatcctcactggacatcagaccagaggcaccgaagggagggaggatgcgagatgaccggccctttggcaacctgaccatcgacttagcagagccttcaaaagcaagccaggggctggctgcacgaccaaagaggcgccgcgcctctcgtggatgtgtgtgtgtgagtgatccagcgagtgtgtgtgcgtgtgagggtgtgtgtgtgtatgcctgtgtgcacagcacaactgtgtgcgtgtcccggtgagtgtgcctgtgcatgcgtgagtgtgtgtacgtgtgcatgtgtgtgtgagtgcgcttggttattactattattattatttttggaagaaaaatctttgaaaatctggggcaggttactgtgctcctagggtgattcttcttttgcaagaggagctgaccagggcaagctactagagccatttctcggcaagtaaagagatttttccttccagaaggagaaggatttttctccctgctctgcagccaagtgaaagagattagtccctaaacctgtgaaatcgaccagagctgtgtgattaccagggcttgagagaggactcgaaaagaaaaggagaaataaatcaaacagcctgtcagttcctttggccacgtcagaagatgtcatctcaaactaagttcaagaaagacaaagagatcattgctgaatatgaagcccaaataaaagttccagttcagacatcataagagatcttttagaagaagaggaagcctggggagcatnacanaaaaaagatcttcaagacacagaaataagtccaagacaggatcgccgcacaagagccgctggaagnnn

SEQ ID NO: 10734 - DNA, 2756 bp, Homo sapiens
  misc_feature 1, 2, 3: n = A,T,C or G
nnncttgcggccgcggccacagtcgtcgcctctcgccctggcgctcttcatcctttaccaaagagacaagcacttgaaaaaagcaatggtaccagcgcggtctttaaccccagcgtcttgcactaccagcaggctctcaccagcgcacagttgcagcaacacgccgcgttcattccaacaggtatgtgcccttactgccctacgtcctgtgcccttctggtcatgtgctttcttctcatttctctaagctgtttggtggcatctagtttgcttttgaaggtataatacagtttgaaattcatcgttgtcctagctatctaaatgtatttaccttactttgaatgatagctaaagactgttaggattctaaagccaaatatttgatagattgaagagacagatttaacccatgagaaacagcagttagggcttttggtttcttgtatttgcacaagccctgtaaaattgtttatgtaaataagaccttttatgtgtgacaattgaaatttgtccttaactctgaatgacctaaaaatagcaattccagtaaatactaaccatttttttctatttctattcagagcactaaaacaatgaggctattcaaattaaagcaattctctactcatatttttatattcattctatctctttctccatccttctcaactttcaccaagttcacaagtatatagagctcttatcctcagtgtctaagccaatgcctgatactattacgtacgatgtgcattaactatgattccactaaaagatccattgtaatagtcatagaatcttagagtttaaaggactcttagtgatctcctcatccagctgattgttttacagatgagaaaactgaggccccctaaatgagaagtgactttccaaggtgccacaactaatgagaaaaagaactgagtttccctgtgaccaaacccatttacatcacattctaccacctgggcccgcctatatatacacattccacagagttctcctgaaaaaagaaaaaagcagataaaagtgaatttttaaataactgaccccaaaaagtcagataaaagtaaaaaaacaaaagtataaatcatgtcatccctcccccatttgcaccgacatctctaaccacagacacacacacgcacaccatacgcaaagatagtcaccataattgaccatgtttttcaccttttagtcaatgttagaagcaaggggtaacttaagtcctggtgggaagaccatccattgagttctttgaaagtcaacatttttcagcccacgatagtgacaatggaaagtaaatattaaatgaataacaattctaacaaaaagagttttttgatttcaaatccattagtttgaacttttcgagcttattatccatttccttaaatcccatagcttatcagagttaacatcagagggaggtaaaatatttctgtgatattctttgtataaaatctacactttgaaatggattagtaacctgtgaacaatacatattttagttaacatataaattatgtgagcaaagtggttttcagtgtttttttcttattttagttttgaacctgtcttaaactcacagacttgtagaagaaatctctaattcagtatttattaggagttcacttttgccctattacagccttaattagtgacatcccagtgctgttacagcatagcagtgtcttaatatgtaatctaattgaaataacacatttgtaaaataattactagaaggtaaacttacgttaatgtcctgtgtggtttctacaaagtgtgtcattgtagacctcttggccactagatattttaagataaaaaaaaaaaaaagtcgacgcggccgcccgaatattatgtgtaattgtttcaaacatccattttctttgtgaacatattagtgattgaagtattttgacttttgagattgaatgtaaaatattttaaatttgggatcatcgcctgttctgaaaactagatgcaccaaccgtatcattatttgtttgaggaaaaaaagaaatctgcattttaattcatgttggtcaaagtcgaattactatctatttatcttatatcgtagatctgataaccctatctaaaagaaagtcacacgctaaatgtattcttacatagtgcttgtatcgttgcattgttttaatttgtggaaaagtattgtatctaacttgtattactttggtagtttcatctttatgtattattgatatttgtaattttctcaactataacaatgtagttacgctacaacttgcctaaaacattcaaacttgttttcttttttctgtttttttctttgttaattcatttaaactcattgaaaacatagtatacattactaaaaggtaaattatgggaatcactgaaatattttgtagattaattcgttgtaacattgtctttcttttttttcttttgttctcatgatttcgatttttaaaatttattagcacacaactatttcagccctttaataatggaggcatcaaaaaaacatcagctggtaaaccccaagcaatattagaaggattggatttactaggatatccattttccgaatggacccaatatgcaggagtctttatatcccttctcatacggggggcagcgctgcttgagttccatttggtcacaatcggggatattatagcatccaaaattggaggaaacaaaacatcggaatttgcacagttttcaaggacaggaccatggtcgtaacaccgtcagaaatcgagtgt

SEQ ID NO: 10735 - DNA, 1330 bp, Homo sapiens
  misc_feature 1, 1300, 1312, 1329, 1330: n = A,T,C or G
nagatcatgtgtaaaggaatgggtgtggctgttcaataaactatacagttgacccttgaacaatatgggtttgaactgcatggctgcacttatatatggatttttttcaaccatacaggttgaaaataacaggtattggcaggggggcgaaaaccttgcgtacatggagggctgatttatcacatacgtgggttctgtagggcccactgtgggacttgagtatgcattgggtttttgtatactcaggcgttctggaactatcctccatgtataccaaaggatggttatttctacaaaagcaggaggtaagcccaatgcacagcttgcagattcccctcaggcgagagacagaggttaagggtagatggcagatgacctaagtggcttgttttaggaggccactcccagggccacagctttcatgtgtttgccaccagggtagaaggtctgctgacaagggcaatgactactaacagccccagctgcatggaacagaaagggcatatgctgtggccaccaggctcaggctctatccctcagcagctttgggatcccatgcagctcacctattttctgtgctctagcatcatccaaatcagaatgtctcaggtaagtggtagacaacgtgactcctcccctcccgctgtgaagtgtagacggctgccacggtggcagcggccagaactgaagttcccgatttctctgtttctgcagtcttgccatgctttctctgtatagtcaccccaaacctacttttaccgagggcctgggaaaatgccaaaggtgctgctcacataagcactggcccatcctcatcagcatcaggccctggctctgggctcacaggctgtcgcacatgctgcaagagttccctaggtatgcgtggccgtcgggctgtgcactcgcattcctctttaaagctgtcttgcatagggcctgaaactttcctgctccccttgtcttgacatgtgacacaacaggctgtgaatccttgtccttgacaggcagggcaggtcaaaacgagctggcggcactggggagtagagcagagtttatactggtcccagcgggctccacagtatgaacactctgacaccacatcactgttgtaggacagagcatagcgttcatcaaaaacaaacaacttccctttgtaaaagccatcaggaaactcttccaggtacttgtggatgccacccttgagctggaacacctccttgcacactcccttggctttgaggtaggctgaaccccgctcacagcggatgcccccggtacagtacatcagcactctcttctntttgaaaagttntagatttttgtcggacnn

SEQ ID NO: 10736 - DNA, 282 bp, Homo sapiens
  misc_feature 280, 281, 282: n = A,T,C or G
acactgagatgattattccctctttttttaaaatttgaagtttcctttgattccccttttcttttacaaaatggagtcatgacacgatccccgtgtcccgtgttgagaactgaaaggtttctgtagctttcctttgacatgaaatttcaaaaatatactactctgtttcactctggcctgtaattgttgcactctggcctttaattgttgcaactgattagacatttttccttccagcattatggtagactcgatgccctgaccaagcaccctttaacannn

SEQ ID NO: 10737 - DNA, 445 bp, Homo sapiens
  misc_feature 1, 2, 3, 4, 5, 6, 7, 8, 9, 10, 11, 12, 13, 14, 440, 441,442, 443, 444, 445: n = A,T,C or G
nnnnnnnnnnnnnnccgagggttgttttcactttttttttttttttttttgcatttgagctaagattttaacaatcctgtgaaaataggtaatatagtcacgtatttgttgaatacattatttcaaagaaccacaaacacacagaaaaaatatttaaaaagtccatggtgggggaaatgatccagaaacaacagctcttctacttccagccctaaccgtctgggatgctagatggttgtgggcaaaccgtggaaaaagataagcttctgtttttcaagattttattttgttagagagtgcagaaaatctaagtgatgtctctgtttttgctttctagcaattaatatatgacagcagtctttgtgatttattttaactttctgcaagacctttggctcacagaactgcagggtatggtgagaaaccaactacggattgcnnnnnn

SEQ ID NO: 10738 - DNA, 414 bp, Homo sapiens
  misc_feature 414: n = A,T,C or G
acgcggggatgctgccacctacgttacttgtaggaccctatacggaaacctcctttgccaggaactatttataaacatcctgcaggaaaatgagtcaaggaagcttttcttttgagctatttacagcttttagcaattgagtaaagtatactcctgtgaacaaaatttgaaacatatttgcttctctctaactgatttcttcagaatttggaactagttcagtgaagtagaagagacagggatatcccagaaggttatgcaaaacatcaagagaagatgagaggagtctatatgtcagaatacacatttaccaccttgcccaacagtggaaaaacataagaagagaaaaacattaaaaaatgacaaggaagttaatggaagtcagcaatgtgattgggtttggagggggagccn

SEQ ID NO: 10739 - DNA, 327 bp, Homo sapiens
  misc_feature 300, 301, 302, 303, 304, 305, 306, 307, 308, 309, 310, 311,312, 313, 314, 315, 316, 317, 318, 319, 320, 321, 322, 323,324, 325, 326, 327: n = A,T,C or G
acgcgggagaatttgttgcattgagttattaaagtagattatacacatttagcatggttagaaactagatgttaccactgagtgttttctccttaataagttagtttaagaggctggggataatttcacggtaaaatggcagcttaaccccagtttcaaacattgaaacttgaaaattttcctttttgaaaaattacatatacacctggcactctctatctgtgggtttcacatcccaggagtcaaccaacctcagaaacaaccaatcgtggattgaaaatactttgggggggaaaaaannnnnnnnnnnnnnnnnnnnnnnnnnnn

SEQ ID NO: 10740 - DNA, 422 bp, Homo sapiens
acgcggggtcctgcgtttgtagatggaaggaagaacttgtgtgcttagacctgacgctgggaggagatgctgccacctaggttacttgtaggaccctatacggcaacctcctttgccaggaactatttataaacatcctgcaggaaaatgagtcaaggaagcttttcttttgagctatttacagcttttagcaattgagtaaagtatactcctgtgaacaaaatttggaacatatttgtttctctctaactgatttctccagaatttggaactagttagtctatatgtcagaatacacatttcccaccttgcccaacagtagaaaaacataagaagagaaaaacattaaaaaatgacaaggaagttaatggaagcaatgtgatggtgtttggaggtggagccttcagaaggtaattaatgcc

SEQ ID NO: 10741 - DNA, 592 bp, Homo sapiens
  misc_feature 1, 2: n = A,T,C or G
nnctaatgatttggtattgatagtagagccaggagaaatattccttcacacgcctcaaatccatggttggctccttcaagctgcagtaagtttgtccatgtggctccttctgaatattaatggcttcggaaagactttattctcaaaggcatcacagtcaggagatgctcttccaggaagcagcaaactggaccatgtaacaaacatgcagtgatcgagggcccaggaatgagcactaagaaagtccaggtctggttcttcagccttgctccttcgcgaaatgatcctgtgtgggttagttctcctctctgggttgctgtttcctcatctcccagttgggtgtatctccctgcggcttaggtgagcgccgaggctttggctcctccccagctgctgcgagcttcccactgcgccgggcgcctgggagcctcccggagttaggtgttcggccccgccctcaggactcttgctaaaactcaaattctacctggctaattccggtgattaattattgacaaaaggaaaacactcctacgcaaacttgtgtccaaccgcactgctcccagcgactccttccagaagagaatgcctc

SEQ ID NO: 10742 - DNA, 788 bp, Homo sapiens
  misc_feature 1, 2, 777, 778, 779, 780, 781, 782, 783, 784, 785, 786, 787,788: n = A,T,C or G
nncagaagtagtgatggagtaaatcatataataaaatcttcaagaaatgaataaggctggtctggggattagttagatgactacaacaaactgggttagtgggtaatctgttgacataaacttcaaaagaaatcaggggcttggaaggaggaaggaagaagaaacaaaggtctgaaggtagcaagaagaatcaggaaagacaattatcctaactccagaccaagtagtaagagagacatgtgagagaaaaccaccactgtctgagaagactctaagtgtccttaatggagagccagattttgttagagaaacagtgaaggaaatcctctgaggagaggttgagtaaaaaggggatttttttttttaatgactgactgtgctccagagagtggagaagaatgaattgggagctgaggaggaatggtagatggaggctaattacaggatattccaagatgcttgaaaatcaacatccacatgatgagatgacctgggtatcttgggtttcttgtgtgactggcagaaattcatatatagaatataagggggttaatattggcattctctagggtggtggaagtgtctgttgtatcgtgtggggaagaaatcaccttgacaggaaaacatggagctcaacacatcacttattcagtcacaaatgacattgaggtcattgaggagcaccaggagcacataaggatcttttgaatgttccctgtcaactccctcatgatgatgagccagaaaaactcaatcttcctaggagattgggagccnnnnnnnnnnnn

SEQ ID NO: 10743 - DNA, 1728 bp, Homo sapiens
  misc_feature 1725, 1726, 1727, 1728: n = A,T,C or G
ggctgctcagcgccaggcatcagctgggaagctggcgtgggcaggccagctgtacctggcctggagctccagattagaagaggagccatgtcagaagaaacagtaagtgaatcacagttttccttgaagacagcagcgctaagagtgtttgatcttcctctgacttggtactattctctctcccagatcaaattttctccggtggctaaaaagttgtttgtggtaactgcagtgagtgctatatctgtaatttttctggctcatcactttaaaagaaaacgtggaaagaagaaaggaaaaatattaccatgggaaccagagcacctcatacttgaatacactaaaagagcagcatcagacaaaggttcaagttgttccagtagcagacagaatttgacattatctttaagttctaccaaagacaaaggatctcaagtttgtaactatgctaatggaggacttttcagtaaatattcaggttctgcacagagtttggcctctgtccagagtgtcaattcttgtcatagctgcgcttgtggcaattctaattcctgggacaaagcagatgaagatgatattaaacttgttaatattcctgtgactactccagagaacttatacttaatgggtatggaattgtttgaagaggcattgcgtcgatgggaacaagctctgacctttcgcaatagacaggctgaagatgaagcctgtggttccattaaactgggtgcaggagatgccattgctgaagaaaatgtagatgatattattagtactgaatttatccataaactcgaagctctgctgcaaagagcctatcgtctccaagaggagtttgaagctacccttggggcatctgatcctaattcccttgctgatgatattgataaagatacagatatcaccatgaagggtaatgtggaagactttggcctgcgagacaccttgagcatcgcatccacggattcctttgcttccgcagcagagcttgcagaacacagagaagtacggcatacctacagcctggagtccctttgtcactgcccattttacgaggaagccatgcatttagttgaagaaggaaaaatttactccagagtactgagaactgaaatgttggagtgcctaggagacagtgattttcttgccaaacttcactgtattcgacaggcttttcaggtaattctttcagaatcagctaacaggatattcctcgctgagagcggaaggaaaatcttatcagctttaattgtgaaagcacgaaagaatccaaagaagtttgaagatgttgtcgatgaagtgatctattttttagagcagaccgatcactggggtagtactgaaatggaacttgctgctagaggggtgaaaaatctaaatttttatgatgttgttctggattttatattaatggactcctttgaagatttggaaaacccacccacatccatacagaatgtagtaaataatcgatggctaaactcatccttcaaagaaacagctgtggcttcaagttgttggtcggtgctgaaacagaaaagacaacagatgaagatcccagatggattttttgcccatttttatgccatttgtgaacacatcagtcctgtcctagcctggggctttttgggtcctagaaattctctgtatgatttatggtgcttttttaagaatcaagttcttttatttctcaaagacatttttgactttgagaaagtgcgctannnn

SEQ ID NO: 10744 - DNA, 1669 bp, Homo sapiens
  misc_feature 1, 1668, 1669: n = A,T,C or G
ncgacccacgcgtccggcagcgcggcagaatgagggttgattcctcggctgaccccacaatgtcgcaggagcaagggccggggtcctccacgcctcccagttctccgacacttcttgacgctctgctccagaacctttacgactttggaggtacagaaggtgaaacagaacagaagaagatcataaagaaaagggaaaacaagaagagagatgtgatggcttcagcggccttggcagcagagccatctcccctacctggttctctcataagaggccagaggaagagcgcttcgagcttcttcaaggaacttagagaagagcggcattgtgctccttctgggacccccacaggaccagagatccttgctgctgcagttcctccctcttccctaaagaacaatagggaacaagtagaagtggtagaatttcacagcaataaaaaaagaaaattgacgccagatcataacaagaacacaaaggctaatcctagtgttttggagagagatgtggatacacaagaatttaacctagaaaaagctcgtttagaagtgcaccggtttggtatcacgggttatggaaaaggaaaggagagaatcctggaacaggaacgtgccattatgctgggcgctaagcctcctaaaaagagttatgtgaattacaaggttttacaggagcaaattaaagaaaaaaaggcagcaaaggaagaagaaaagagactggcccaagaaacagatattttcaagaaaaagaagaggaaaggacaggaggacaggaaatccaaaaagaagtccgctcccagtattttgtcaaatggacggattggacaggttggaaaattcaaaaatggaacactgattctgagcccagttgatatcaagaaaataaattcttccagagtggccaaatgaagtactttgtcaaataaaacgaggatgggaacaactgagtcaactgcagcggccctggaccctgtgcgactctagatagatcgttcttaacacgcatttcacagactgctttttcattttagaaaaaaagtcaaacagaagtaacatttctagttgccgaagtgtctgcttcatggtgctgaacgtgtcaggcccagtgcagcatgaatgtgaagtgaacccactgaaaagtgatttttaatgttctccagcaaacttcactcctgtttcatgttcactggtatttggtgcatttgcttgtaatacagttttttataactttactgttttgtaaatgctagtagtttacattaaattgccttatatttttaatgatttaatgttatgatatcatgaaagaaccaagaatctagtaatttatcagttttgtggaaaagcagttttaatttttagcctaccatgtgtacaaaatctacttcataagaagttatataaataaaataggtttgtagtaaaaaaaaaaaaaggggggcgaataaaatatcctcgaggggcaaaattagggaaccaggtttttgtacaaacgggcccaatggaagccgactacaagacagcacgcgcgagggttacacagtcgtgacgggaaacacgcagacgggacctggaggagaccacctgggggcaactggaacacaccagaatagagccaagacaaacacaaggcggagaaagccacacgcggaaggcacacagaaatgann

SEQ ID NO: 10745 - DNA, 398 bp, Homo sapiens
accatgtagaagatgctggctcctggaccacatttaggttcatcttatttgcaagaatcaatattcttatagaaggaagaaatctgggcttgggcagtctcgggtgagtggcagccaagttgtgaatcacctgaagtcctaactccagacattcccttggcctttcactgcttatctccttgttccattgtacgcgggggtggtcaaccatgatgcctccagcatacccaggctccagatagatgtggacggcaggaaagagatcctcttctatgatcgaattttatgtgatgtcccttgcaggtatttatcttattggccaaaaagcccaaatccactaaagaaatcaagtcaaatagagactaaaatgaagttgtgcatgaatatgacacaattgt

SEQ ID NO: 10746 - DNA, 1332 bp, Homo sapiens
gacggtcatcttctatttgcttattcaactcttcaatccattttctctgcagttcttgtttcacagcactgaaagggtgctccagcagtactgtttcctctaaagtctgactagctctaagcttgtgaatgccccatcagcttggaccaccataacctggctacgagcactgtgatagaatgcttgaagagcctagattggtcaagaatttgatgtttttcccatattattttatcactttcagattttttccaaggatcattccatttttcagaaacttcttttctttcttctttaaagcaacctgcttcatctagctctttcctccactgggctttttttgcttccaacgaacttctatcacattccctttcccccagagtactgaatatatcagctggtttccattcattctctatggcaattttttgctcacactgtttagatgtctcctgatgttcatttaagacagatttattttcagctgggacagatgaaaccatttcagtttttttgaataatcccataatgttctcatcctttggctgattagaaatactgtttaaatatagactatattgactttttgcctcctttccattctcagtcagggaaagagatctatttccttggtttacagtcatcaaaatctgttgtagttggtcttgtgttagacacaccaaactgctcttcatgttttcagctgtgatgtgttttttgtgaggcttctgtttacctactagagatgtatttacggtgtttctagtcttctgcatattaggagttgcaggtgaaatctctttctggatatgaagacagtctttatctatacattgtttacataaatccttagtggatgaaaaagtcattccatttttttcaccttttgcctgtgatgtttctgaaccaactggcttcttttgcaaaagtttttcactcccaatacaagtatcttgtgttgattttagaatgtgcccagtttttgttcttaaaggacattttgcaatcttggccttatttcccatctatttattgagtgatatttcgggtactccagcaacttcttcaccttaattaaacctgcaagtaaagccatcaagggcttagagttgaaggataaagtggtacatcatccaaactgggttctatccacagacaagcaaagactttaagacacttcacagaaatttttgatttatgttcatatggagacaatattagcttggtttttccatccagtaattcagtttcaagctttaaaccatctcccaagttcatggcctgacctcgcactctctccacagaacgctcaagccccttgtgtccccgcgt

SEQ ID NO: 10747 - DNA, 1867 bp, Homo sapiens
  misc_feature 1, 1866, 1867: n = A,T,C or G
naattccgcgtagaggatttagaattatgaattttctttaaaaatagattacaataaccctacttgcttattttgagccccaacctgtctccccctactccttccctcccatggaacacctttattttttacagtatgagagatacatgttttttactactaagaaaaccttaagtttgctgtgtgttttgctgtacttacagaattagccttaaaagctgttttgatgacttaggatgtatttggtaatgccatggtgttatagcttgttcaggccctggtacaccagagtccaaagacgtaaacgtgccttcagcagggaagttcggaggtcttggattctgatggtaatattcttttcataaaaaggaaataagtaatatttttgtcggcaagatcacagtccctagctatgccttaaatatcatctcagctgaattctgtgttccactccacagccttctttgcaacactggaaggttaacggatttgaagtaaatgaattgtaactgtaatttcaacctaattagaattggtttaaaatgccagtttggaccgtgaacaggctagccaagaacagtattgggaggtccatgtaatatagaagagagttgatatttggcccaacttcctgatactttaaaaacagagaagtaaaacaaaatatgagatatctttggccagcaagtcccttcttgcctgtttggtctgtgttaaaatgtaaatgtttgtgtttccttacccattgtttatagcttttcattccagttgtttcttttttctgtttgaagttagatatttttacattctctccatattgcccatcagtgacaaaacctgtatcaaattagcacgcatgttagttttgaattaaaaagaaactttttaaacctggcttaagtatgcttgttaacaattggacgatatacagtattaatgaattgccctggatttactagttcccctttacccacccgcctccaccaaaaaaaaaccctcagagatcaatacaaggccaagtgaatgatatgtaggtgcccaaatatggttgattctgctgcatttaaaaaaaaagaggagtgggagttaaacttctaatttttttcttcttaagttccaacatcaacagccttttcttatttagcctccatgataattttattctatgtttgtttcgacttggcgaaggtctcctgaatttaccaaattaccaatgaggatagtattggaaagatgagagaggcacaggcttggagcactgtgaggggaacagcagtaggaggcagataattcagaatacattcctgtagttataaaagaagatttatttattttcacctttttacagatccagacccaacaatgagttattcagtttgaaacccacgtagtggaggcagtctctgtatacctgctgaatgttgagttacaatagagaagcctgggttaccacagggagaggaggatgaggaagtaaaaatatgtgttcaaagagggcatttcaacactgtgagctaactttacaacgggaagtgaaaatcatgaaaaaaaggggaaaatttgttgtgagagactaaaaagagcaaaataaagcaagcccatttttcgggaatagaaaaaaaaaaaaaacagtagcaataaccaaataactgatcagggagatttatttccgtgatatctttttaaaacaaaaagggaattgtcgtatcactgctcttaattaaatggcaacaaacacacttataatgggaactaaatagctaattagagggtgcttggggaataaatagcagagttttaaaatctcctatatggaaaacatgtccaacaattggaatgaaaggattagaaatgagatgttggaann

SEQ ID NO: 10748 - DNA, 1850 bp, Homo sapiens
acgcggggtaattgacattgtggacttcctggggtaagtcctgagtaaaaagcacttaagcacctgtggtacatcaaagagtctctttgagagttctgcaaagattcaagggtggatacctgagtctatatatcaaaaagtaatggagataaatagagaagtagaagagcctcctaagaagccatctgccttcaagcctgccattgaaatgcaaaactctgttccaaataaagcctttgaattgaagaatgaacaaacattgagagcagatccgatgttcccaccagaatccaaacaaaaggactatgaagaaaattcttgggattctgagagtctctgtgagactgtttcacagaaggatgtgtgtttacccaaggctacacatcaaaaagaaatagataaaataaatggaaaattagaagagtctcctaataaagatggtcttctgaaggctacctgcggaatgaaagtttctattccaactaaagccttagaattgaaggacatgcaaactttcaaagcagagcctccggggaagccatctgccttcgagcctgccactgaaatgcaaaagtctgtcccaaataaagccttggaattgaaaaatgaacaaacattgagagcagatgagatactcccatcagaatccaaacaaaaggactatgaagaaaattcttgggatactgagagtctctgtgagactgtttcacagaaggatgtgtgtttacccaaggctacacatcaaaaagaaatagataaaataaatggaaaattagaagagtctcctgataatgatggttttctgaaggctccctgcagaatgaaagtttctattccaactaaagccttagaattgatggacatgcaaactttcaaagcagagcctcccgagaagccatctgccttcgagcctgccattgaaatgcaaaagtctgttccaaataaagccttggaattgaagaatgaacaaacattgagagcagatcagatgttcccttcagaatcaaaacaaaagaacgttgaagaaaattcttgggattctgagagtctccgtgagactgtttcacagaaggatgtgtgtgtacccaaggctacacatcaaaaagaaatggataaaataagtggaaaattagaaggtaagaaccatcttttatttaaaaggtcatttgaccaagtatttctctaaaatgatgaggaaggatatgctctaatagctgaagaaaattacctcctaaatgcaaaccatggaaaaaaagagaagtgcaatggtcataagttatatgtctcatcaggtgttggcaaaagactatattgagagtgctgagaaggaggtgaattattagtttgaattcaagatattccaagacctgaggcagatgagatactcccatcagaatccaaacaaaaggactatgaagaaaattcttgggatactgagagtctctgtgagactgtttcacagaaggatgtgtgtttacccaaggctgcgcatcaaaaagaaatagataaaataaatggaaaattagaagggtctcctgttaaagatggtcttctgaaggctaactgcggaatgaaagtttctattccaactaaagccttagaattgatggacatgcaaactttcaaagcagagcctcccgagaagccatctgccttcgagcctgccattgaaatgcaaaagtctgttccaaataaagccttggaattgaagaatgaacaaacattgagagcagatgagatactcccatcagaatccaaacaaaaggactatgaagaaagttcttgggattctgagagtctctgtgagactgtttcacagaaggatgtgtgtttacccaaggctacacatc

SEQ ID NO: 10749 - DNA, 406 bp, Homo sapiens
  misc_feature 399, 400, 401, 402, 403, 404, 405, 406: n = A,T,C or G
gagttcactagtccgagttactgattttcttaggattctcaaagtgacaacaccggaaacaaggtaattcatgttaaaacacaaggggtatatcaattaagaaatgggatcccccaaataaaaccgtggaatttgaatcaaagtttcaaagagctaaaaaaaagaaaattggagttttcaacaattcaccctttctttgaatcctttaagaaaatacaggaagttccaaaattggaaaacctttacagttttcaggaatcccaaagtttgaaaaccttttgaagaattaaagccttcctttttttaaaaaaaaagaatttttgaaaaattaccttggcctttgtaaatccccactttttttaaaacattttaatatccccgtattgtggggtttcaccnnnnnnnn

SEQ ID NO: 10750 - DNA, 521 bp, Homo sapiens
acgtaaggtgaatactgattgttgtttcagttctctctcttaaccttaaatatactactttttccttcaattgccagaactgcctgttactaaatccccatcgctggtctcctctctcccttgcaggcttctctctgggctccacggtgcagtctcacactaaaggaatctggatgtggtgtgtgccccaccccaagaagccaggccacatcctagttctgctggacaccgagggtctgggagatgtagagaaggtgagactcaaggatccagttgtggagtaagcccctcctctctgaatattttatgcagcagttaattctttattaactattaactacaggctgtaatatgtgtgggttaacacagatgcataaagggagcacaaataatcccagtgtcataagtcttatcctgcacagaactttagttaagaatttgggtgctaaagccacgtgactttgtatttaaatttaaattctgtcactaattcagtagcctgagaaaattgacttattttc

SEQ ID NO: 10751 - DNA, 599 bp, Homo sapiens
  misc_feature 1: n = A,T,C or G
nactaaaaaaaaaagaagtgtttatttgaaattcaaatataatttgacatcatcccttattatcatttgcttaatctagtaatcctaactaggaagaaagcaaaaaaaaaggcttctgtatattcatattagatgctaaaatgtattcaaattagatgctaaaattcatgcacttaccttgcagaaggctcactctctcaggacctacaaactggcaactctcacgccaaatttacctcactgatatattttatttgctaagcaaaatattttaatttcaattagttaccatcattaaaatgaatagagtagacataaaaaaatgatttcatattctggcttaaaaaaatttgccagcctgggtaacatagcaagatcctgtctctacaaagaaaaaaatgttagccaggcctggtggtgtgtcctgcagtcctacctacttggaaggctaaggctggatgatcacttgagcctaggagttcggggttgctgtgagttacgaatgggccactgcacccccagcctgggcaacagagcaagaccctgactctaaaaaaattaaataaagtaaaataaaataatataaattaaaaattaaa

SEQ ID NO: 10752 - DNA, 458 bp, Homo sapiens
  misc_feature 456, 457, 458: n = A,T,C or G
tatagggcgaattggagctccccgcggtggcggccgaggtacagtaggagtgcccagactcggggagaggcaagctggcgcgtctccaaggtgcttgtcactcaccactagaacgtggtcctttaccactagacaagatctcctggtttgacaatgcaggtgacacagctgaaactttatctcaacacggcctgaagaataccactgtctaaatatgaggtgctaaaatactatgacctactctaatattctctcccaactctgtccatcctcgtgactggcacccatgctggcccaaatgatgacaacctcctgttctaagtgcacaagccgcacatttaataaacctttcacccagttccttcactggtgttcatctctcggcttcacttacaaccactccctgtggcttttgcagtgaagcctacttagacccaaaatcttccactccccaannn

SEQ ID NO: 10753 - DNA, 377 bp, Homo sapiens
acatgaaggagggcactagggggagttaagaatttgtgagttaggtagccaagattgttgaggttggaagaatgaggaaagaaaggggatctgtggcaaaaatatgctattggatccacagttctagtttaaggacatgtctagtcccttttccagcccccagttaattacaatcccctgctgcccaaatggagagggaggttgttcaccagtagagggagccaggggctgggtgtctcaatagaaactgatctggtcccagaaggggcctttagatttaagtttttcggatcgaaggcagagcaaagtgtcccttacaaccaatggctaaaatgtatgccattgtagtagatcacattgttagttttcttttcaaa

SEQ ID NO: 10754 - DNA, 437 bp, Homo sapiens
  misc_feature 416, 417, 418, 419, 420, 421, 422, 423, 424, 425, 426, 427,428, 429, 430, 431, 432, 433, 434, 435, 436, 437: n = A,T,C or G
actaaaaattagccaagcgtcgtggcacgcacctgtagtcttagatactcgggaggatctcttgagcccaggagttaaggctgcagtgagccatgattgtgccattgtattccagcctaggtgacagacagcaagaccctgtctcaaaaacaacaacactgctttattccattttccaaataattatttctataagctgtatgtttaatagattgaacttcaaaaaaaaattctttcttaatttctggattaaaaagtatgcctgtgtcttctagacctttaccagaagatgatagtattgaagcagatatactagctataactggaccagaggaccagcctggtaagagcttgacacttactttcattgaaattatggactttgtgttattttttaaaacacgtttctttgtccnnnnnnnnnnnnnnnnnnnnnn

SEQ ID NO: 10755 - DNA, 579 bp, Homo sapiens
  misc_feature 579: n = A,T,C or G
acgcggggacttccccggggaccttggatgtgggaggattgcattcagtctagttcctggttgccggctgaaataacctgaattcaagccaggaagaagcagcaatctgtcttctggattaaaactgaagatcaacctactttcaacttactaagaaaggtattaagcgcctttctgagagctctcagtgggcttcctaagcacgttcactctgcctcctttaagtcttatatttatgatcaagatgaaagggagggatgtatcactgcacagagattctacaagtggatatataaagctaataatgttttcagtgagctcttctctggcaactactttccaagtgctttcagcattccaccttgaagcacaacgttaataatgcacaatttcttatgttcagccacagaatgttcacgtgtgatttggttacaacatattgctctatccaggcctctaacaaaactgacttctttcaaatggacttgcagttgctgaattccaaatcaacactttatcttaaaaacagaaaaggaggggaagggtggagggaggggaacaaaaagggtacctggtccn

SEQ ID NO: 10756 - DNA, 264 bp, Homo sapiens
  misc_feature 102, 103, 104, 105, 106, 107, 108, 109, 110, 111, 112, 113,114, 115, 116, 117, 118, 119, 120, 121, 122, 123, 124, 125,126, 127, 128, 129: n = A,T,C or G
accttgctgtgtgggacaaggctgacgactcagggggaagaatgactacagcctgcagtcctcataatcctcagtgcacagctgacttgggtgctcaggacnnnnnnnnnnnnnnnnnnnnnnnnnnnncagatgctttcagtttaatagctgttttaaatttttttttcttttttttttttaggttttaggctgaagacgtaaagcctactgctcctgggtatcatttctcagcttctccttacagctatagtacctgcccgg

SEQ ID NO: 10757 - DNA, 239 bp, Homo sapiens
tcgagcggccgcccgggcaggtacccgggaggctcgcatgtgtgggtgcatgccgtggcaggagaaggcacgtttatccagagagttgattctccttaataccaggaaactaggcaacagcagggaggggacaatcatgagtcctaggcaggaaaggtcctctggagagaggaaatggcacacgcgcaagcacggaggcatgaggggccagggtcctggaggacactccccgcgtacct

SEQ ID NO: 10758 - DNA, 422 bp, Homo sapiens
actgtgtctcatagacatgcgccacctccacgtgagaacaagggtgaaggtgagggaagcccctcaccttgggtcttttgctgtgcctcctatgtatgtctggtttgctggcttgaaattcccgctgttagaataactctggtagttagttagaccatcaaggaggcagcactgtttccagaaacccactgttaaattgtcaacaactgagttgtgggaagtgggacaggagcagggttggtgggagaatgcagtggtgaggatgggaggagacccctttttctttcttccattgacataaatgggcattccagatgacctggtctccacagcttggaagggctgctgcagatgtcaaggataacagcctacagcctcagcctcccggtctcaggtctccgccgtttcttctcaccccgcgt

SEQ ID NO: 10759 - DNA, 558 bp, Homo sapiens
  misc_feature 1, 220, 221, 222, 223, 224, 225, 226, 227, 228, 229, 230,231, 232, 233, 234, 235, 236, 237, 238, 239, 240, 241, 242,558: n = A,T,C or G
nttcttccttccttctgtcttttcttccttccttctttttcttttcttccttccttctttttcttttcttccttccttctttttctttttttttctggagtaaccagtgtgacataagatctgtttgtgttcccccattttacaaaagaaaatttaagtctgcaacttcccctaggcatctgcagcagagagtggatttgtcaacatgcaaagctgctgnnnnnnnnnnnnnnnnnnnnnnngcgtggtcgcggccgaggtacgcgggagtctcggtctccaaaaagggatactactagggaaagcagaagatctgaatcactgtccccaagaagagaaacttctagagagaacaaaagatctcaaccaagagtgaaagattcttccccagggagaaaaatccaggtcccagagcagagaacgagaaagtgatagagatgggcagaggagagagagagaaaggagaaccagaaagtggtctaggtccagatctcattctaggtccccctcaagatgtagaacaaaaagtaagagttcatcatttggtagaattgacan

SEQ ID NO: 10760 - DNA, 1395 bp, Homo sapiens
  misc_feature 1, 2, 3, 4, 1395: n = A,T,C or G
nnnncgcggccgcgtcgacacggctgcgagaagacgacagaacggggcccgccgatatctctgccgggtgactagctgcttcctttctctctcgcgcgcggtgtggtggcagcaggcgcagcccagcctcgaaatgcagaacgacgccggcgagttcgtggacctgtacgtgccgcggaaatgctccgctagcaatcgcatcatcggtgccaaggaccacgcatccatccagatgaacgtggccgaggttgacaaggtcacaggcaggtttaatggccagtttaaaacttatgctatctgcggggccattcgtaggatgggtgagtcagatgattccattctccgattggccaaggccgatggcatcgtctcaaagaacttttgactggagagaatcacagatgtggaatatttgtcataaataaataatgaaaacctaaaaaaaaaaaaaaaaaaaacaaaaaaaaaaaaacaaaaaaaatacaaaagaaaaaaaaaaaaacaaaagagagacgacaacagcacagaaacaaaaataagaacgacagagacagagacagacactcagatcagcagccagacccaaaacacagccacaaatacgattagagacgagaacacgagaggcgcagcacaccaaacacgcgcgcacaaggcacgaaaagagagaaggagcgacgaagactgcatggcgaggaggagtggggtccgtcgggtgctccgatgtagagggcaatgatctcctcgcccacaccgcagcgctagcgcgggagcggtgacatgattgatgtgatgtcgagacgagcaggagcaagcaaaacaaagacaaaaaaacaaacaaacaaactcaaaaaacaaagaataaaaaaaaacacaaacatcatataataaaaaccatacacaaacaaacctatacatacctacccaaaaaatcacctacagcataagaaaatagactagaataatccacaagcaccaaccaaaatataaatcacctaaaagatacagccattacctaactcaactacaataaaacactaagaactactaccctaactataataatcacaagttcaacatcaaactaccctcactaacactatcataataaaaacaataattaagaaacactcataccacaccaaccacatctacaaccaccagcgtgcgcactagccggcgcaccgagtgacggacaagcgagcagaccgcagagggacgaacgaccggcgggcctaacgcgcgaacagcgagccacccgcacgccggccagcgcagcagccagacgaagggacccaggcacgaaagatacgagagaggaagccagcagcaggcagtggacggggagagccgatagaacacgacgtagcgatgcacagagcgatcaagaaggcn

SEQ ID NO: 10761 - DNA, 1704 bp, Homo sapiens
  misc_feature 1610, 1702, 1703, 1704: n = A,T,C or G
actcattgtttactacagtgggggacatcaagggttggaaggattataaagctttaaggctgggcgtggtggctcacgcctgtaatcccagcactttgggaggcgaggtgggcggatcacctgaggtcaggagttcaagaccagcctagccaacatagtgaaactctgtctctactaaaaaatacaaaaattagctgggcgtggtggcgggcgcctgtaatcccagatactcgggaggctaaggcaggagaatcacttgaacccgggaggtgaaggttgcagagagccaagatcacaccactgcactccagcctgggtgaccgagcgagactccgtctcaaaaaaaaaaaaaaaagctttaaaaagctgaattttagaaatatttctagcagtgtcagtgagttcctcttttaatagtgttttaaagtataaatctggtaacatactgttcttgtagttttttgttagttttgtttttcaggttaattacccaaagcctcatccatcctcaaggtttttaaattttatttttttaaaataaattgtgcattgtatttgtgaatttttaaaatattactgttttatttaaatgccatgctgagcaattgttctctgtacatggtaaccaaaacttagagatttcgatcaattttgatcaatgtttagtaaaccaaaacatgtactgtgtacaacggaaataatatggcatattagccaggcatgatggttgcccaagacagttaaattaagctcaattctgtattttattagggctctgttatgtccttcatctgaaatgtacacatttttggtgtatgcttggtactggagattcatatatgcaaatattctcatgcaagaagttccacagtaacaacagcaaaaagaaaaaattagttgtccagccagtgctggaggaaaatgtttctggggaagatgactcagtcattttgtggcgagacaccctttggtaactcccactgaccagtcttgggagccttcctggaatgatcgtgggctgagcggagatgttttttgcaaaatgaaactgaagctgaaagaaaggagaattcgagtgaaccaagagaaatccaaagacctggggaaggaggacttaagatgaaagtgaagcaagagagggaaggggaaatgaagtgaaaatggcgtgagggtgtgagagaggtttgggttaggaaacatgtttttagtgctatttccaaccaggggtcgcaaactcagcagcctgtagaaacaggggtgggaggtgggggggaagctgtgcccacctttaaagagggggccattgctcagccatgcagaaaaaaatggggcaacaagctggaaatcaggttttttttttttaaagtgaaacttgatgatttttaaacaagtaattaaaaaaatgtccaaaacaccatgtgggccaaacatttgtttgagcctgggggccaccagtttgcgaccactgccttacgtagttaacaccctgagtatgtatacagtcatattttttgttttggatatggtagtgttatatatacttgggggcgtgatatttgaagtcatctttatctctcagagttaagctttattgtagaagaaaaaatttntaaaaaaaaaaaaaaaaaaggtacctgcccgggcgggccgctctagaactagttggattcccccgggcttgcaggaatttcgatatcaagcnnn

SEQ ID NO: 10762 - DNA, 394 bp, Homo sapiens
  misc_feature 1, 2, 3, 4, 5, 6: n = A,T,C or G
nnnnnnagctccagcacacctgtgacacagtatgtacacaaccaccctcatgcctcctacccccgaggttcctagagctaggctctcctgaggcaatgctttccttctcaattcatattcttccaggaggggcaccaacgttttttaaaatgatgttggcgacgaggacggtaaattttctagatgactgaaggctgactttcccctttctgtgactctctaggcaacaccgtgacaggagagacgactcccttttctcctcttgtgaccacttctgaatctgtgaccgaaatcacagccagtagctttgtggtctcctgggtctcagcttccgacaccgtgtcgggattccgggtggaatatgagctgagtgaggagggagatgagccacagt

SEQ ID NO: 10763 - DNA, 923 bp, Homo sapiens
acttttttttttttttttttgttctgaaaccataattgcttggcccttcagttgaataggttgaatgttcatctataccatgccctttttccactgtttctccattaatctctcacttgtctttaattggcacaggagttttcccctgaaaatcctttgaactcttattctaaggatgagattttttttttttgctaatccatagaaaaatggtcactatttctatttgatttatgaaaactgtttttttaatgaatgttcttaatttgttgtttctattatcccttttctccttcgtaggttcctttttttgtaattcatcttgttaataaagttcttcctcacctagttaatttcagaaaattaatgtcaagtaggataaggcattaattcaggctagcaaggattctttctggttaacataaattccttatgagatggtttatgaaatgactatatttaattcaaattttagattcctttttcagaaataaaacaggctactcgctgttcacaaggttatttctgaggtgcaaaattatcttcttctctctgtctatgtttttatacatcctgaattcccccatgcaaccttggctgacacactcagacagaaaaaacgtgcaagggcacttttttcttgcatctgtagtggaaacctaaatgggtttagttttttgttgttgctgttgttttgctttgttttttcaatgtttatttcttcttcagtgtcaaaattcagcaaatatattctggctccttcagaatcttctcttcctcatcaaaatggtgtcactgtgtgtttccttttcagtctcagaaacttgattttcaatgggccaaagatggttctagccaagagcccatgcaaccatttctacttcataaaacaaaaatcagttttgggtttggacctatatggt

SEQ ID NO: 10764 - DNA, 1151 bp, Homo sapiens
gccgcccgggcaggtacgcggggtccctgaattccatctgactctaattttatgagaattgcagaactctgatggcaataaatatatgtattatgaaaaaataaagttgtaatttctgatgactctaagtccctttctttggttaataataaaatgcctttgtatatattgatgttgaagagttcaattatttgatgtcgccaacaaaattctcagagggcaaaaatctggaagacttttggaagcacactctgatcaactcttctctgccgacagtcattttgctgaatttcagccaaaaatattatgcattttgatgctttattcaaggctatacctcaaactttttcttctcagaatccaggatttcacaggatacttgtatatatggaaaacaagcaagtttatatttttggacagggaaatgtgtgtaagaaagtatattaacaaatcaatgcctccgtcaagcaaacaatcatatgtatactttttttctacgttatctcatctccttgttttcagtgtgcttcaataatgcaggttaatattaaagatggaaattaagcaattatttatgaatttgtgcaatgttagattttcttatcaatcaagttcttgaatttgattctaagttgcatattataacagtctcgaaaattattttacttgcccaacaaatattacttttttcctttcaagataattttataaatcatttgacctacctaattgctaaatgaataacatatggtggactgttattaagagtatttgttttaagtcattcaggaaaatctaaacttttttttccactaaggtatttactttaaggtagcttgaaatagcaatacaatttaaaaattaaaaactgaattttgtatctattttaagtaatatatgtaagacttgaaaataaatgttttatttcttatataaagtgttaaattaattgataccagatttcactggaacagtttcaactgataatttatgacaaaagaacatacctgtaatattgaaattaaaaagtgaaatttgtcataaagaatttcttttatttttgaaatcgagtttgtaaatgtccttttaagaagggagatatgaatccaataaataaactcaagtcttggctacctggaaaaaaaaaaaaa

SEQ ID NO: 10765 - DNA, 722 bp, Homo sapiens
tcaccctggagtggtaaactgtcccagcatttgcaatggcgcaccgatcttttttttttttttcttttttgcccttattgttcttgctttgtcccaagtagatgcaaatgttgtgcaaaccaacttgatcttaagatgttgttgagaacactggagtcacgtgtccatgggtccttcaggctggcttttgatgggagctgggatgcagatgatttacggagggttataatctgtgatgctggtctgaagtctgaatattccaagttgctgactgcaggcagagcctcatgtcctgccctcagttctacaggaaaatccagacaaacttcccctccactttgtagttcaaagctagagggacaggcaacaggtcctctttttttcttaactaaccggtaaggcccatctttttctgcctctctgccgtgtcgccttaaagactgctccttgctatcttggtcacacgtctgggcgggaagccacgaagatcacgggaaggggccccgtgactgagctcattgccgttttatgccgccctggctatcatctctttcctcatcaaacaatgagtaaccaggtctcacctggtgaaaatgcaaatcagtcttccacctctaccatcacagctgcacctatggcctctgtctactgagtccgcgacgatgaaggcctaactcaggtcccaagttgtgcatttccttcttcctaagccctaactcctc

SEQ ID NO: 10766 - DNA, 541 bp, Homo sapiens
  misc_feature 1, 2, 3, 4, 5, 6, 7, 8, 9, 10, 11, 12, 13, 14, 15, 16, 17,18, 19, 20, 21, 22, 23, 24, 25, 26, 27, 28, 29, 30: n = A,T,C or G
nnnnnnnnnnnnnnnnnnnnnnnnnnnnnnaatttgggtttgtttaggagtacacgtccctagaagcacatagctccagcaacaaagctaatctgagagtaatacccaagatgcctcctaccttgcaaatttcaaggaatttctcactggtgtatttcataggatgctcagtgaaagtagcataaggaacttcagtggaccatgggttccagcgggacagaagagactgctcctccggactcccccagtagatcctaaggccttctccttgtctcttgtccagggacatcccagggaaggtgaacttgcccaggcagatgcgatagacagcgctcagaggaatccgctgcagctgcacacaactcagcatgatgaagtcgtatttgcagatcaagagagtcttgtctgtgaccagtagaattctctccttctcattgttccagtggtctatctttgtcaagagccagaagccttgaacggtctctccagaagtctcagctacgtgacctttcaagtcttccatggcagtctcaatggcccc

SEQ ID NO: 10767 - DNA, 788 bp, Homo sapiens
  misc_feature 779, 780, 781, 782, 783, 784, 785, 786, 787, 788: n = A,T,C or G
accatttaatcctcacccctgactgtcagtagactgccatggaaaccccaaggatgcctgtcctgttggacatgtggtcagagactggctccaaagatatctcccaaagagcaaaagccaccatcttcctgttggtgcccagacacaggtgcatgagctccaaggactccttcctaggccacctctctgctgcctgatctaaactcacctcatttctgggagctggtctgagagtctgccttggagatgtgttggatgggaactaggggtttgtaggctccattgtgagcaatactgatgggaaatgaccccaactggtatggatattttgcataaagcccctgaaatctgacatgctcagggtcagagccatgaaccactgtcttgacaaaccccatgtacatggactaataaggaaggtgtgggcaccatggcgttagtgttcaactggagagtgggaaagagatttgcatgtgccaccagccctgatagagacagtgacagaacacactgattctcaacattgcagacacctgctgtctttgtccctatgtaggtttcccccaatatttaggggatcaggtcagataaaggccttcctctgaaatggaaattatttaaaatcgatgaggaagtcatccaggaatgacttcctctggggatctgtggatgatggtgctagggtttgtaccagaccaaatcaaggtaactagagcctccccaggtgattgtaacccatctcctaaataaaacttgcatcgactcggttgcattacaannnnnnnnnn

SEQ ID NO: 10768 - DNA, 2543 bp, Homo sapiens
agggagtcgacccacgcgtccgcttaaaggtaacgttaaaggtaaggagaaaaatgtcataatagctgtgaagtctgagctgaatttagaacttagcatttcgatgactaatattttaaatgattttataaaattttctgcatacgtgtttgaaaaccagtttaggatcggaatcagtgtgctaatccgaaataagttacacatactactaccatattttcagtattatttaagtcacctaccactcctgagtttattctgatttacatcatatagatctcttcctataaggaaatattcattcataaggaagacctttaaaacagggaaatgcatgcatctgtagaaaagcagcttttacgattctagtatttcagtgacggttctattatcactactattattagatgtatatgtgtatgtgtgtacagacatacaacccacaatatgtgattaatgatgtgtacatttttattaagaaagcaaccaaagactgtagatttttataaacgcttgtcttaccttctttgttgtaaataaacattactgaaagtttccagaggacttgcagcaaattgtttttgaactagaactttattccaaatttgaaattggaataaatgctgataactgacctttaaacatttttcataacatgaatattttagaataattatattttaacttcagttcttcttttgatagcaacaataatgtaacaacactatgctattacgtgtacaacaacacagactttaagaaagttatgggcaggtgtctataattgatttaaaggaaagattatttttgtaataagtgatgaacttaaaatgactggcttacattaaaacatattcttattaagatttctctggtgtgtaaaatgaagccattcattcaacaggctgacaactttccacttggtatttgcctttccttaatttagtttccgcaggacagctagtgtggtagtctgcatctgtttttagcaggcatagaaaactataaactcagacagttctgtcccaaatattgcagctcacaagttacaatcaatttgataaaaacccgcaagttttatgggctcgtattttgttgttcatccttgctaggtcaagctttcaggtaataggtttctttttctccctcttttgctgatgataactgctaataccattgataactaattctgagtcttgtttactcatttatcatccttatttaccatttgttgaagttttgggaaattaatgacagcatacgtagacttgcgtttactttgatggcttatctgtgaaaatgacatttatcttttgttattatacagaaataagtaaattctttgttaccataatagttatgatttatggaatttttgagtcccccttagatatagcataaagatggtcttctagcctttgccaagtagacatttaatctaattgtttaagagtgcttgtcatgtatagaaaagactaacatactttgcaattatttacattaaaaattatgtagaggtttgttttagtgtaattttaaaaataatttgtctcccaaaagctgtaaccagtggattaaagtaaataagctaaaataccaaatcttgttttataccattgttctatagcaaacagtgctgcagaggatgtaactactttttaaaatttatcctccgatgtaagtagggccaaagtcatttgtttgtataaaatattctattaattatatatgacctttataaataatatcttcgattttattattatgatcactttttgagctatcacagtgctcagttgttctcctattcctgagaactgaatttggcctttagtttggttttctgatggacacaataatgtagaacttgactttggttagaaagagatctttgagcttcaggaatctctgaaggtgcagtaggatctacaggtgaaaaccatttgaattgttaagcattagttaggtgaagaaactctactggtccctgcagcatatagcagctattatcgtagcggtctactttttgctatcccagttttttttttttttttttttttccttttccaagagcacaaatccaaatagcaaaaatgaaggtgaaattatctatgtacttcaaatttggagcatcatttgaaatcattttctgattctaagctataactgaaatacaaatataacattaagacaccccaaagaagacattaaggatacacttgtcgttcttaagtgtgtttcactaaaaataataacaaaaaacttttaatttttaaaatgtttctagcttttaaaaacctgcagtaaatactttacaagtggctagacaccttccctggtggtttagtttatacaagcaggaaactttctctcctactctttctctctctctttcttgttttctttaaaccaactgacgtaatgccaaactttgctttaaaagaacagacagaagtaattggtagcttttaacttttaataatgttctggattggttttagtggccaaaatgccatttaaaaaaaaaaaaagttcaagtaaga

SEQ ID NO: 10769 - DNA, 4452 bp, Homo sapiens
  misc_feature 1, 4450, 4451, 4452: n = A,T,C or G
nagggagtcgacccacgcgtccgctgaaggcgatccgcaagatggagtttcaccgtgttgcccaggctggtgtcgaactcctgagctcgggcgatccgcccgcctcagcttcccaaagtgttgggattataggcgtgagccactgcacctggcacagaaatttccaaggaaactatatttcttacattgatggaaatgtatggaaagcatacagttggaccgagaaactaattctcagagaaaataacttgactgaattacacaaggattcatttgaaggcctgctatccctccagtatttagatttatcctgcaataaaatacagtctattgaaagacatacatttgaaccactaccatttttgaagtttataaatcttagttgcaatgtaattacagaactcagctttggaacatttcaggcctggcacggaatgcagtttttacataagttaattctcaatcacaatcctctgacaactgttgaagatccgtatctctttaaattgccagcattaaaatatctagacatgggaacaacgctagtcccacttacaacacttaagaacattctcatgatgactgttgaactggaaaaactgatcgtacctagccatatggcctgctgcctctgccaatttaaaaacagcattgaggctgtctgcaagacagtcaagctgcattgcaacagtgcatgtctgacaaacaccacacattgtcctgaagaagcatctgtagggaatccagaaggagcgttcatgaaggtgttacaagcccggaagaattacacaagcactgagctgattattgagcccgaggagccctcagacagcagtggcatcaacttgtcaggctttgggagtgagcagctagacaccaatgacgagagtgatgttaccagtacactaagttacatcttaccttatttctcagccgttaacctagatgtgaaatcactgttactaccgttcattaaactgccaaccacaggaaacagcctggcaaagattcaaactgtaggcaaaaaccggcagagactgaatagagtcctcatgggcccaaggagcatccagaaaaggcacttcaaagaggtaggaaggcagagcatcaggagggaacagggtgcccaggcatctgtggagaacactgccgaagaaaaaaggctcgggagtccagccccaagggagctggaacagcctcacacacagcaggggcctgagaagttagcgggaaacgccgtctacaccaagccttcgttcacccaagagcataaggcagcagtctctgtgctgaaacccttctccaagggcgcgccttctacctccagccctgcaaaagccctaccacaggtgagagacagatggaaagacttaacccacgctatttccattttagaaagtgcaaaggctagagttacaaatacgaagacgtctaaaccaatcgtcacattccagaaaaaaataccgctttcacaaaactcgctccgcatgacccacagaacacccaaggtcaaaaagagtccaaaggtcagaaagaaaagttatctgagtagactgatgctcgcaaacaggcttccattctctgcagcgaagagcctcataaattccccttcacaaggggctttttcatccttaggagacctgagtcctcaagaaaacccttttctggaagtatctgctccttcagaacattttatagaaaagaataatacaaaacacacaactgcaagaaatgcctttgaagaaaatgattttatggaaaacactaacatgccagaagtcaccatctctgaaaacacaaactacaatcatcctcctgaggcagattccgctgggactgcattcaacttagggccaactgttaaacaaactgagacaaaatgggaatacaacaacgtgggcactgacctgtcccccgagcccaaaagcttcaattacccattgctcagtttgaaattcagctaacccagcagctacagtcccttatccccaacaacaatgtgagaaggctcatttctcatgttatccggaccttgaagatggactgctctggggcccatgtgcaagtgacctgtgccaagctcatctccaggacaggccacctgatgaagcttctcagtgggcagcaggaagtaaaggcatctgagatagaatgggatacggaccaatggaagactgagaactacattaatgagagcacggaagcccagagtgaacagaaagagaagtcgcttgagctcacaaaagaagttccaggatacggctatactgacaaactcatcttggcattaattgtgactgaaatactaatgattttgattatacttttctgcctcattgtggtttaggattgggtgtgtgtgtctcctctctgaatggcactcaaatgtttgctgactcctactctgcgtgactggggtgtacagctatggactgatgcatcccatcccatcatctttcacgagcaaagcagtctcttttttgacagctgaagaagaatctgtagggaatccagaaggagcattcatgaagatgttacaagcccggaagaattacacaagcactgagctgactgttgagccggaggagccctcagacagcagtggcatcaacttgtcaggctttgggagtgagcagctagacaccaatgacgagagtgatgttatcagtgcactaagttacatttgccatatttctcagcagtaaacctagatgtggaatcaatgttactaccgttcattaaactgccaaccacaggaaacagcctggcaaagattcaaactgtaggccaaaaccggcaaaaagtgaatagagtcctcatgggcccaatgagcatccagaaaaggcacttcaaagaggtgggaaggcagagcatcaggagggaacagggtgcccaggcatctgtggagaacgctgccgaagaaaaaaggctcgggagtccagccccaagggagctggaacagcctcacacacagcaggggcctgagaagttagcgggaaacgccatctacaccaagccttcgttcagccaagagcataaggcagcagtctctgtgctgacacccttctccaagggcgcgccttctacctccagccctgcaaaagccctaccacaggtgagagacagattgaaagacaacacacactatttccattttagaaagtgcaaaggctagagttacaaatatgaaggcttctaaaccaatttcacattccagaaaaaaataccgctttcacaaaactcgctccgcatgacccacagaacacccaaggtcaaaaagagtccaaagttcagaaagaaaagttatctgagtagactgatgctcgcaaagaggccgctgttctctgcagcaaagagcctcatacattcgcaagggattttttcatccttaggagacctgagtcctcaagaaaaccctcttctggaagtagttgctccttcagaacgttttacagaaaacactaatgtaaaagacacaactaatgtaaaagacacaaaagagatgtgttcaaagacacatctctgaaaacacaaactacaatcatcctcctgaggcagtttccgctgggactgcattcaacttagaaccaactgttaaacaaactgagacaaaatgggaatacaacaatgtgggcattgacttgtcccctgagcccaaaagcttcaattacccattgctctcgtccccaggtgatcagcttgaaattcagctaaccgagcagctacggtccctcatccccaacgaggatgtgagaaagttcatgtctcatgttatctggaccttgaaaatggaatgttcagaaacacatgtgcaagggagctgtgccaagctcatgtcgcgaacaggcctcctgatgaagcttctcagcgagcagcaggaagcaaaggcattgaatgtagaatggggatacggaccaacaaaaaacaaattatattaatgagaacatggaacagaatgaacagaaagagcagaagtcagtgaggtgaggagcacacagaaacatgagaccagatttcccatcatttaggcatatgccaggaaagtgccacataggagaacctgggactccaaggcatagcttgtctggcatgtaactttggcatgacagtgatctccatttgtcatggtgacgtgaaatagatcaggccacgagaatgtatgcagggggaactcagcgtgataacccagacttatggaaagcccaagggggggaccaatagaaacagagagattaaaaacgctggccagatatgagaccgctttcgaaaaaaatacattatgcggtggttaaagaacgagaccccaaccagaggagaggggagccacacacgggcgatatgaaggaagctacactccacgtggagagactgctataaagacatcaaccaaagctgcgcgactggatgtcatgcactatcatacatataatgacacatcgacacacgcgannn

SEQ ID NO: 10770 - DNA, 3461 bp, Homo sapiens
  misc_feature 3457, 3458, 3459, 3460, 3461: n = A,T,C or G
ggactatgcagcgtttaaagttagtgggttttgtgatttttgtattgaatattgctgtctgttacaaagtcagttaaaggtacagacattacaggtgttgtagacagaggcacttgtctcgtgcagagggattaaatttgacctgtgagattatatttggaaaaattcatgtctgtaactaacccattagtgcagtatttaatttgttactattccttcccgccaattctgtccactcctcacctcgcatcagctataaatttggaagtacttgtccaggcactcaagtgacttcatatttctctctgcccatgggaaaagagataggctttatatttccacagagtgaaaaatcctctgtcatggagcctgtcctgccaagtggcaagagtgtggggactgtctggtgatgatgtctttcatggcatctgagtgaagagtgacaggttggctcaacttttttctttttttttttttaattgccttgtattgtaagtattcttccctgcagtccaagtgacttttcattttttgttttaacttcaggcaaaatctttaaccactctggcctctgtttcccccaccaacggggagcagtgacatttacctccctcacagagtcactgtgaggattctatactgatttgaagtggagctgttcagaactgaaccttgtaggaaattccaagggcctttctactgaatctggtgatggggtggggccgtggcactttctctgccacagctgttcttcacagtgttggtgctaatgaggccagggtgcagggttcgattcacacgtaggccagttaacttagagaaaatctatttccttacctctagccagtcacttcctttttccgcagttgtgatgggttttgctgagccatccactctgactgatttcctctgaagtaaacatatttacaatccaaagcaattctactgacagaagtgttgccttcataatcaaacagcttgtttttccatctcctctgcaaccctaattaaatgagtacaggtctacaaaatgttttcaaggagaaaagcagcatatccttaagtgaagtattatatttttcaataaccctgtagtggcttgatgcagggaaccctgggggactttcagcgaagagctgtgctcttttctgactagattagagcgtttggagtggaagacgtcaaatgtgtagtgagatggaggttttacattgttcttctactggctgtgatgaagtgccagaatgtctctttagaacaagagttagattccccctttctccttattgccccttccgttttgacttcccctttatttatttgctgtctaattaggggccaagtctgtaaagttttgtcaaagtgagttagaagttgttttctcttactatttgtgtttaccagagttgggagataagatagtttccatgaaggtgtgtatgttttatacgatgtttgttatagggccatgcattggtaacttgaaaatagaccagcttaatgtcttcaggatgtaaaactctgaatacacggcgtctctttttcatacattgcatgtaagttgttagtacctcacaagctacagaagttcagccatgagattttgtttggcaacatgaacagatttgtgtataactgcaatggccttttttccagatttccttattgactttttgtttgccttacctggggctagttttttatgctttgtacctagaaaacaaaaaattacattcgttgggctttttttcaaggttgggattaccacaccacctggaatatcatactgtggtttctgcctaaaattggcacatgtaagtattgaagaaaatggttatataattcagttgaaactcttggttattagatgttaggcatctcctgtatgtaagacacaaggccaaccacaacacagaacgatgttgacctgttaagtattctctgaaacatggccaaaatgcattttatgagcttttttttttttgctattgtaaatattagtggtttacaatgcgctttagacatatttctttaaaatgcaagcagtgagaaataagacctctctgaattagtagctctaaactgttaacatagaatgttacttggaaaaagtctggaatatgtggtgtacacaagcagtgcttcgtgaatgagtttcttagcttttatagtgcgccatgtttctcaaagtttgtttttgttgacaaaacattttataatatatatcttatgtttattttttttctcaactaattgtgtactgcactgtaaggtgaaaattagccatccattatttatcttctgtggcaatgcatttatatggttgattgggtggggaattttttgcagaaagatgcaaagtgattgggttttcgacttcctatcgcagggagcttttaagaaatattaatttcctatacatttttccaatccccatgcaaactgttcctgtttacataccttctctgttgtatcagtactttgagtgagaagacagtttatttaaaacttgagcaggctgttcagcattttttctgcttctgaaatctgtatagtacactggtttgtaatcattatgtcttcattgaaatccttgctacttctcttcctcctcaatgaaatacattatatattatctttatgtactcttaagaaaaacgagcaaggaagagtatcttcattattctcattttctctgagttggaaacaaaaacatgaaggactccaactagaagacagatatttacatttaaatagattagtgggaaaactttaagagtttccacatattagttttcattttttgagtcaagagactgctccttgtactgggagacactagtagtatatgtttgtaatgttactttaaaattatctttttattttataaggcccataaatactggttaaactctgttaaaagtgggccttctatcttggatggtttcactgccatcagccatgctgatatattagaaatggcatccctatctacttactttaatgcttaaaattatacataaaatgctttatttagaaaacctacatgatacagtggtgtcagccttgccatgtatcagtttcacttgaaatttgagaccaattaaatttcaactgtttagggtggagaaagaggtactggaaaacatgcagatgaggatatcttttatgtgcaacagtatcctttgcatgggaggagagttactcttgaaaggcaggcagcttaagtggacaatgttttggatatagttgagaattttacgtgacatgtaaacattgtgaaatgtgcacggtaagtagcacagtgaggacaaaactaagaatcggttacgggccctagaccaaacaggactgggagcaacaggtcagataaatatcggatcagcgtaacacaaatggacaccagttctagcgccacggccgatcaacaaaaactatagggcaagaagatagatannnnn

SEQ ID NO: 10771 - DNA, 801 bp, Homo sapiens
  misc_feature 781, 782, 783, 784, 785, 786, 787, 788, 789, 790, 791, 792,793, 794, 795, 796, 797, 798, 799, 800, 801: n = A,T,C or G
actctcccagtgacatgcttcttgaccacaatggatgaactgtgcccagcatgcccactttccaatgctccactgatccccatgttttgtttctgaaggacaaccagccttggaataatggcaaataccttcttaagttcctacaaagtatggtccctgggaagtttatgtctgtaagtcaaaccttgggaagtaactgagttttgatgcctcttccagcatcatcagcatcatgctattacaatcccaaaccatgggggtttctcacagctttacaccaaagggcatcactatccctcaaagagagaaacctggacacatgtaccaaaacgaagattacctgcagaacgggctgccaacagaaaccaccgttcttgggtttggcattactggatccctctcaattatctctggaaaacaatcaactaagccctttgacctgagcagcttgacctcaaatgcagtgagttctgttactgcaggagcaggcctcttcctccttgctgacagcatggtagccctgaggactgcctctcaacattgtggctcagaaatggattatctatcctcattgccttattcggagtactattatccaatatatgaaatcaaagattgtctcctgaccagtgtcagtttaacagtgagtagtttcagactgaatatcctgtcatgtgaaagctctgtgtctcccctttgcatactctctgcttttctggcagtctctggttggtcggtctgaatgcctggagacagacagaaataaacaaaaacttgtggnnnnnnnnnnnnnnnnnnnnn

SEQ ID NO: 10772 - DNA, 660 bp, Homo sapiens
  misc_feature 1, 658, 659, 660: n = A,T,C or G
ngtgtcgaatcatcaattggtgtgagaatgcagaccaggctcactttgatcttgccttggcacgttctgctaaacttcgaaaccctacaaatgacctcttggtacttcatctctctgacctcattcgcatggcattcatggctgcaactgatcatagcaaccagctgcgaatggctgggctccaggcgcttgaagacattatcaagaagtttgcgtctgtgcctgagccagaatttccaggtcatgcgatactggagcagtatcaggctaatgtgggagctgctctaagaccagccttttcacaagatacaccatcagatataatagcgaaagcttgccaggtatgtagtacatggataggaagtggagttgtcagtgatctcaatgatctccgtcgagtacacaatcttcttgtttcttctctggacaaagttcaggctggaaaaggatcttccagccagctgtaccgagagagtgccacgaccatggaaaaactggctgttctcaaagcttgggcagaggtatatgtggtcgctatgaatattaaaaaggaagcagagtcaaaaccaaaaagagcaattaaaaatactgacgatgatgatgacgactgtggtacgcggggatcaggaattatggttccccgttctgaaattgacannn

SEQ ID NO: 10773 - DNA, 3246 bp, Homo sapiens
  misc_feature 3237, 3238, 3239, 3240, 3241, 3242, 3243, 3244, 3245, 3246: n = A,T,C or G
acaacatggggctgttcatccttcgtcttgctgaagatggtcctgccaccaaagatggcagaattcatgttggtgaccagattgttgaaatcaatggggaacctacacaaggaatcacacatactcgagcaattgagctcattcaggctggtggaaataaagttcttcttcttttgaggccaggaactggcttgatacctgaccatggtgattgggatattaataatccttcgtcttcaaatgtgatttatgatgaacagtcaccattacccccatcttcacattttgcttccatatttgaagagtctcacgtgccagtaattgaagaatctttgagagttcagatatgtgaaaaggcagaagaattaaaggacattgtgcctgaaaagaaaagcactttaaatgaaaatcagcctgagataaagcatcagtctcttctccagaaaaatgtgagtaagagggatccacccagcagtcatgggcacagtaacaagaaaaatctattaaaagtagaaaatggtgttacacgaagaggtagatcggttagtcccaaaaagccagccagtcaacattcagaggaacatttggataagattcctagtcctctaaaaaataaccccaaaagaagacccagagatcaatccctcagccccagcaaaggggaaaataaaagttgtcaggtcagcaccagggcaggctctggacaagatcagtgcagaaaaagcagaggtcggtcggccagcccaaaaaaagcagcaaaaaattgaaggaagcaaagctccatcaaatgctgaggccaaattattagagggtaagagtcgaagaatagcaggctatacgggcagtaatgctgagcagatcccagatgggaaggaaaaatcagacgtcatcaggaaagatgcaaagcagaatcagttggaaaaaagcagaacaaggtctccagagaaaaaaatcaaaagaatggttgagaaatctcttccatccaaaatgactaataagactacaagtaaagaagtatctgaaaatgaaaaaggaaagaaagtaaccacaggagaaacaagttctagtaacgataaaataggagaaaatgtccagctatcagaaaagaggctgaagcaagaacctgaagagaaggtagtttcaaacaaaacagaagatcacaaagggaaagaactagaggcagctgacaaaaacaaagagactggaaggttcaaaccggaaagcagttctccagttaagaaaacactgataactccagggccctggaaggttccaagtggaaataaagtcacaggcactattggtatggctgagaaacggcagtaacctttagtataaaacaaagaaaaacaagttgtaatcttttcttacagcagcatttttccagaaaaagcctttttttttttttcagatattctgaaacagataagtacatgttaatgtgagcctcaagttacctaggctgcatgaagggcctttaggattgctaagaaccaactgtccccctggccggctgccctccctcgctctcaggaaggagctgcatccacatgctcatctgacccgccctgctcaggctgcccagctcgtcttcatgagtgtctgaacaaatgacatatgttgatattaacaatgtggtcacaactcactttgtatttgtgccaagttatctactgtatcatgtctgtttttatcctttttgttcagctgtttccacagtaatgaaaaagttaggtttggcttggaagttgatgatctcaatagcatgttgcatgtttacagagagaaatatgtgagtccttgcagaagaagagactgttaactcatcgttaaagatggccgttgtctcttctaacagctactgatgatgtcccactttaaaaataaaacccccaaacatcactactttaaggaaaaaaaaaatgtagtccaatattgatgctttcttatggctttttattttaatttggctggataagttgtttcaaataactgttaaagatattacttacaattgaatgtttgaaataagaaagtactttaagcaatagagttcatctcctgctgtgttatccaacctcgatgtatacttacagcatctcaggtcaccctttttatttcagttatttaattatgaaaccataaagaagcatgtggaaatagtgtttattgctctttgaagaaaaaccaccaactatttctggatattttggctgtacctactactaaagtcattagtctttaatacataatacatatttgaaaagtaaacatattatatagattatgtgagggacttaatcatgaaaccagtttcacagtccaagtaccaactcttctggtagcaggtgcacaagcttgggtgtttaaaaacaacctgtgtagggtatgcccagcaaatgaggacaaatgtgtagacagtacttactggatcttatttaacttttagctacattaactaactttcttatttaaaaacaagaaagggagactaaacatctgcttaacttgtacacattttcagaattctttttaaaagtctagttaaagatgtttcttagaagttggagactgttaacaacttccataaaatagatccaggtttttcagttccctgaagcagcattcagtagcatctatataaataaaggcaccttctgagaataaaactattttatggagtgtgtgaacacacttgttctgtcacctgggttcatcttgttgtgaagcacattaggtccaggtccttccctctgggagtctgactgtgaaactctttaacccaacaactcaattagcccctgtagataagacatgcttcccagagtgagatttttgaaatccccttttcatccagaactatatttacccacctattgtaactattcagatagagcaaaattaggaggcttgataaatactaagaatttagtaccacagaaattatttattattttccctgtagtccacaattagtgataacgaatcctatttttgttaactgtgacataactttgatgtcatatgttgtcctatgtggttcttcctaagtaaactctgtactgattatatactgacttagcaatgtggccttggaatgctgagcaaaatgtggatgtactggttgtaaatgtttatatattgtacagtacctttatatatacacttgaggttctgattagagaaagatctgtaaattgctcattattttttatatagatatttaaaaaaaacagnnnnnnnnnn

SEQ ID NO: 10774 - DNA, 452 bp, Homo sapiens
  misc_feature 184, 185, 186, 187, 188, 189, 190, 191, 192, 193, 194, 195,196, 197, 198, 199, 200, 201, 202, 203, 204, 205, 206, 452: n = A,T,C or G
tggcctcttctaggcagatccgtctacaactggtaacagcaaccatatcgagtttctctttatcacaataccacgaggcttatcatcattgccatgcctttagtaacatcacttttttaaatgggcattttcacaatgtaatctgcaacctacatataacatgcactctttattgaaggccgtnnnnnnnnnnnnnnnnnnnnnnnagacacattacctgaatgagcaggtgaaagccatcaaagaattgggtgaccacgtgaccaacttgcgcaagatgggagcgcccgaatctggcttggcggaatatctctttgacaagcacaccctgggagacagtgataatgaaagctaagcctcgggctaatttccccatagccgtggggtgacttccctggtcaccaaggcagtgcatgcatgttggggtttcctttaccttttctataagttgn

SEQ ID NO: 10775 - DNA, 515 bp, Homo sapiens
  misc_feature 1, 2: n = A,T,C or G
nngattacacaatctaaaagccccaaggatattcatcaattctattcttttctctttatgactatttccttctttatcctaaattgtcaaaaatacatcaaggggcattctgatacagaagcactctgatacagaaacacgcatttaacatgaaaattaacggttaacaaaaaaggaaagttacagaggataaaataccttttagccttgacccattttacttctttcttgggcatacagatacatgctaatatccataccttgctaaatataaaaatacctgagagtagctggatggagcccaattttgtatagacagcctgttagtttctccatctctatatgcattgtcatataaaaagtaagagaaaactaaacaagttctttttaaatgtaacttcctttttgaaaatatgcatataagactatgcattttaattttcatgaatactgaccttctgtaaatgcaaatacgcattttctacattacaatattacccaagggggaaaaaaaa

SEQ ID NO: 10776 - DNA, 530 bp, Homo sapiens
  misc_feature 1, 2, 3, 4: n = A,T,C or G
nnnncatgtgttctttcttataccttgatagtcatccattgctgtgtcttcacatggcagaaggagcaaacgatctctctgatgcctcttttataagggcactaatcccattcatgagggctccaccctcatgacctaatcacctcccagagcccctcgtaatgccctcaggctgggagtcaggatttcaacatatgaaatagtttgactttgagtcagctcagcattctaaatcaaacgcaaacagcagaatcatatggcatagacacttagcaaatccaatgccttccaggcatctgtttcctgttgatgaaatcctccctatggagagcaaactggttcatatcttcagatagtgtcattcaaccccttggcagctttctgggctactaaatatcacaccgtctggtgggacatttcacccaagttgttcatttattagttttctggcttcgtggagaattatctgccttctctgagtattgatttcattgtgcgcatggtgaagatatcgcctgttctccccgcgt

SEQ ID NO: 10777 - DNA, 949 bp, Homo sapiens
  misc_feature 947, 948, 949: n = A,T,C or G
actactttttactgcatcctgcaacaaatatcactgaaatgattcatttctggaagcattctactggagcatcccgtggcctggaacagagctctggggactggcatccttccactgactttgatgctgatgacagccctgatcgtgtgattcagctggccttaacccgacccacgtgcacgtattcctcagcacatctagagctgaagtcgagagcctctgtgggaacgcttggcagcccatgctgttctaaggctggagcagaatttcttagtctattccaggtagacaggcctgcagggggtccaacccctacaagcccctctgtctggaatagactgctttcatctctgatgttagaaagcagacctgtttcagggtttggggaaggttgttcgatatgaactgggtcctctctaattatttttactgtatgtgtgacttcttcctagaaagaatggaagaatgtttatgttagaacattttatctattctttgtcaattgttgtttgtctgcaattttaaagtagataaaggatagctcaatgtaaatatattcttaataattaactatggttgatgtccactgccatgagatcatattcacttctacatatgatctattacttaggaattatcctgctcctgatgagaaaacagactcagaaagattacaaaattacctaggccacaagtctagtggggagaagaataagaattagaaactagtttcttttggccttcaaagctaacctcataccattagattgaactgaatgacaatactttcgctataataagtctcagagtttgtggttctgcattgtgtttccaaggaaacagggtgtcactttaatattatttcaaacttttaaatgtcaaactctttttttaaataaaacttttttgtgtttgttccaaaaaaaaaaaaaaaaaaaaaaaaagtnnn

SEQ ID NO: 10778 - DNA, 1533 bp, Homo sapiens
  misc_feature 1, 2, 1518, 1519, 1520, 1521, 1522, 1523, 1524, 1525, 1526,1527, 1528, 1529, 1530, 1531, 1532, 1533: n = A,T,C or G
nngctccgagcgcggcgcccccgacgcggcgctcggctcggctcgggcatttccgcctctttgttttaaactccggacgggcttttttctcctcctcttgggggggacccagagggagcggcgccccctcccccctccggcgcggaccccgcgtgcgccttgctcgcccgcagccccgagaccgcaggcgtcacaatgtagcagggaccccaggcgtcgtgctcagaaaatggaaaaagagccagggccggaaggagggtgcagaagcgagtccgcgtgcggagccaggaggcagcgtcgcgtgggagtgctggcctgaagcctccatgccccggcagagggacggacacgcggacgtctagcggagaagccaaagatgttgaccaggaagatcaagctgtgggacatcaacgcccacatcacctgccgcctgtgcagcgggtacctcatcgacgccaccacggtgaccgagtgtctgcacaccttctgcaggagctgcctggtgaagtacctggaggagaacaacacctgccccacctgcaggattgtgatccaccagagccaccccctgcagtacatcggtcatgacagaaccatgcaagatattgtttacaaattggtaccaggcctccaagaagcggaaatgagaaagcagagggagttctatcacaaattgggcatggaggtgccgggagacatcaagggggagacctgctctgcaaaacagcacttagattcccatcggaatggtgaaaccaaagcagacgacagttcaaacaaagaggccgcggaggagaagccggaggaggacaacgactaccaccgcagcgacgagcaggtgagcatctgcctggagtgtaacagcagcaaactgcgcgggctgaagcggaagtggatccgctgctcagcccaggcgaccgtcttgcatctgaagaagttcatcgccaaaaaactcaacctttcatcctttaacgagctggacattttatgcaacgaggagatcctgggcaaggaccacacactcaagttcgtggttgtcactaggtggagattcaagaaggcgccgctcctgctgcactacagacccaagatggacttgctgtgaatggtgccacacagcgcccacagactgggccctcgcacccttgggtgctcccggccgccgcgcttaagaacattgcctctgggtgtcatgtggaccagacttctgaatagagaatatttataacttttgtatgagagagaattcacactcaacaagacactaccagcaccacgtttacagaggatgaaaacacttcacagtctcccagagccgatcgtcctctcccccgccccaccccgtgataacctgacgacaaatagtctcccaaaagggtgggacaattgtcaaaacccctgggttcgcctgagatgattcacaatgatcatcatgataacacataggataatatctcaaaagtgccaaatgtctagttcctcgttctgtcttcgtccgtctcgctcttcttatactannnnnnnnnnnnnnnn

SEQ ID NO: 10779 - DNA, 771 bp, Homo sapiens
  misc_feature 1, 2, 3, 4, 5, 6, 7, 8, 9: n = A,T,C or G
nnnnnnnnncccaagagccaatttattttaggcacaattggggaaagccctggtatgccccagcctcttccatgacatccagaaacaaccgcacccaccaccggcaccatgcaaggtgtctgttcacattgctgagctgggcgagatcgtctgtcagtcattacataaaacaggagccagtgacctttgcgaagtacacaaggtacgctggcagggccagtggcaggaagggagggacaagtggacagtggtgtgtctgaattgtagagtgttagattccaggtcattcccatctgctcaattccatcagccgcagagttcaagctgtcatctaagcccagggaggtgtaaggaacaggccacatctggttcttggaagtatatgcccaggcatttaaagcggatctttcctctttgggccatgggtggatttcctgctcaagcaaccttcatctcttaagctgtgttgctggaatctggactttccattcaagctggggcccatcaatcactcggcggctcctccacatgacatcgaaacgcttcctgcagctcatctgggacggagtggccattcactgtcccggcacagccagaaccctggcaggactggctacttcttggcagcgggctcaggcctccgcagcagcacttcccaccacacacacacaccatttccaggctgctagtcactttttgttttcaaaagacctctaagccctcttacagggagcttctcaatgtagcctctcattattggatcccccgcgt

SEQ ID NO: 10780 - DNA, 564 bp, Homo sapiens
  misc_feature 43, 44, 45, 46, 47, 48, 49, 50, 51, 52, 53, 54, 55, 56, 57,58, 59, 60, 61, 62, 63, 64, 65, 66, 67, 68, 69, 70, 71,72, 73, 74, 75, 76, 77, 78, 79, 80: n = A,T,C or G
gaggagggtgccagggggaagaccgatgggcccttggtggagnnnnnnnnnnnnnnnnnnnnnnnnnnnnnnnnnnnnnngccacggccccaataataagtgtccggaccacccgaccgatctgttgcacagtaatagacggccgtgtcctcagatctcaggctgctcagctccatgtaggctgtgtctgtagatgtgtcctcggtcatggtgactctgccctggaacttctgtgcgttgattgtttcaccatcttcaggatcaaaacctcccttccactcaagcccttttccaggagcctgtcgcacccagtgcatggataattcagtgagggtgtatccggaaaccttgcaggagaccttcactgaggccccaggcttcttcacctcagccccagactgtaccagctggacctgggcgtgggtgcctgtagctgctgccaccaagaagaggatcctccaggtgcagtccatggtgaggtgctgcgctctgggggcttctgtaggggagggatgtggctgttgtgtgatggtccccgggcgttaaggaaagatctgcgaacgc

SEQ ID NO: 10781 - DNA, 3065 bp, Homo sapiens
  misc_feature 2997, 3062, 3063, 3064, 3065: n = A,T,C or G
ccacgcgttcgcgccagcagcgcccgcgtgccgctcgcccagtcccgggggagcccctgcaagtttcccgggccgcgcgccgcgctcgctcgcctcccagcccgcggcccgagccgccgccgcgcccgccatgccctcggccaaacaaaggggctccaagggcggccacggcgccgcgagcccctcggagaagggtgcccacccgtcgggcggcgcggatgacgtggcgaagaagccgccgccggcgccgcagcagccgccgccgccgcccgcgccgcacccgcagcagcacccgcagcagcacccgcagaaccaggcgcacggcaagggcggccaccgcggcggcggcggcggcggcggcaagtcctcctcctcctcctccgcctccgccgccgctgccgccgccgccgcctcgtcctcggcgtcctgctcgcgcaggctcggcagggcgctcaactttctcttctacctcgccctggtggcggcggccgctttctcgggctggtgcgtccaccacgtcctggaggaggtccagcaggtccggcgcagccaccaggacttctcccggcagagggaggagctgggccagggcttgcagggcgtcgagcagaaggtgcagtctttgcaagccacatttggaacttttgagtccatcttgagaagctcccaacataaacaagacctcacagagaaagctgtgaagcaaggggagagtgaggtcagccggatcagcgaagtgctgcagaaactccagaatgagattctcaaagacctctcggatgggatccatgtggtgaaggacgcccgggagcgggacttcacgtccctggagaacacggtggaggagcggctgacggagctcaccaaatccatcaacgacaacatcgccatcttcacagaagtccagaagaggagccagaaggagatcaatgacatgaaggcaaaggttgcctccctggaagaatctgaggggaacaagcaggatttgaaagccttaaaggaagctgtgaaggagatacagacctcagccaagtccagagagtgggacatggaggccctgagaagtacccttcagactatggagtctgacatctacaccgaggtccgcgagctggtgagcctcaagcaggagcagcaggctttcaaggaggcggccgacacggagcggctcgccctgcaggccctcacggagaagcttctcaggtctgaggagtccgtctcccgcctcccggaggagatccggagactggaggaagagctccgccagctgaagtccgattcccacgggccgaaggaggacggaggcttcagacactcggaagcctttgaggcactccagcaaaagagtcagggactggactccaggctccagcacgtggaggatggggtgctctccatgcaggtggcttctgcgcgccagaccgagagcctggagtccctcctgtccaagagccaggagcacgagcagcgcctggccgccctgcaggggcgcctggaaggcctcgggtcctcagaggcagaccaggatggcctggccagcacggtgaggagcctgggcgagacccagctggtgctctacggtgacgtggaggagctgaagaggagtgtgggcgagctccccagcaccgtggaatcactccagaaggtgcaggagcaggtgcacacgctgctcagtcaggaccaagcccaggccgcccgtctgcctcctcaggacttcctggacagactttcttctctagacaacctgaaagcctcagtcagccaagtggaggcggacttgaaaatgctcaggactgctgtggacagtttggttgcatactcggtcaaaatagaaaccaacgagaacaatctggaatcagccaagggtttactagatgacctgaggaatgatctggataggttgtttgtgaaagtggagaagattcacgaaaaggtctaaatgaattgcgtgtgcagggcgcggatttaaagtccaatttctcatgaccaaaaaatgtgtggttttttcccatgtgtcccctaccccccaatttcttgtcccctcttaaagagcagttgtcaccacctgaacaccaaggcattgtattttcatgcccagttaacttatttacaatatttaagttctctgcttctgcatttggttggtttcctgaagcgcagcccctgtgaataacaggtggcttttcatggatgtctctagtcagagaaaaatgataaaggcttaaattgaggattaacagaagcagattaacctcagaaatcctgtctggctggcagatttcaagtaaaaaaaaaaaaaaaggtgggttggggggacccttttctttctagttgtctttaaggaaaattaattttacttttttttttgttctggccgaaatttttatgagatatctctcacttgtcttccactttgaaccggttaaagctcatagctgtcagctctgaatgaggaggggagaagcccctgggtctttctttgaaaggaatccgctgcttgagggctgcctccctcatggtgtgcgtgtcgtttctcttcctgacgcatcttgtgatatcagaggtaactatgcaaagcatccaggcggttctgaatgtgaagcactacacccagcagagtcccggtgccctctgtccccactgccggcccatgttctctctccggaggtcaccaaggaatgcacaggtttcgactaccagaaaggggagtccttgggttctttcaaaaaattcgtgaggagagctgtctacagtggaatagggggtctccctggggaatgcaggccaagtccttttattttaacatgatgtccatgaagaggtttgccgtctgggcagccctgtcggcaaggagcgtgcatactgcgtttgtgtaattgtttgctgtatctcccttccctctgagctgtattgttctttaatggctgtcttgcccttccaaaaaaaattgaaaaaaaaaaaaaaaaaaaacaaagaggggcggcaaaagaaaaaaanaaaaaattgaccactggcattcgcttaggagcgatacatatggcgggttacacgggatggaaccnnnn

SEQ ID NO: 10782 - DNA, 546 bp, Homo sapiens
  misc_feature 539, 540, 541, 542, 543, 544, 545, 546: n = A,T,C or G
gaataatggattgtcaacagtagttataaaatagtgcatggcttaatgtgttaattatcataagtagaatccacaattaaagtttgatatttgctgaatactttctctgcaaggatataaaaattaatcatccacaacctaattaacttaaatttcaaattaaattcacatatgtgggtgttttactatcttttgcttttcggtaatgttggtgacattttagtaatgcattatgaacagttattatacaatgtgaattaattgtgtaataactttagtgtcacatgtttaagaactatttagtttatacttctgtctcattctaaaaaatgatttatcttaattaggaattaaacttatataaatatatcatttatggaaaatataggttgttagaaggataggttttgcaagggaaaagacttcattaattccacatatatttatttagggccaattatatactagctgctttaataggcattagggactataggaaaatgttagacatagtttttgtccttagagaattacaagcnnnnnnnn

SEQ ID NO: 10783 - DNA, 449 bp, Homo sapiens
  misc_feature 449: n = A,T,C or G
actattctttccttttgtgtatgtttgaaattttctcattataaaaaggacaaaaaaaaaaagagagagaaaactaaaaaagaaaaaatagtgttgcgcttgttagtaaaaccaatcttaaggccagttactaaaaagtaaactcctacaattttgaatagctatttgctaatacagtgatttgctgccttcttggggttagtttagcctgtccattccttatttaacttgctcccttccttcccttttaataaagtcctgcctaagctccaggctctattttccacctctcccctaagatttaggattgttccgttttaagtcagtggccatatgtcttcctgttctcctagtgtaactcttaccttacccagcagcaggccctttgtttagggcagcctataatattgcttttatgattaatcttcccttatccacaaacttaactn

SEQ ID NO: 10784 - DNA, 1299 bp, Homo sapiens
  misc_feature 1, 1079, 1295, 1296, 1297, 1298, 1299: n = A,T,C or G
ncgaatggagctccccgcggtggcggccgaggtaccctggactcatacctgaaagcagtgttcaaccttagcaaaatctccaaccagcgcatgaacaattttctacatcacaacgacctggttttcaaattcagctctcaaggccaaatcttttctaaatttaaccaagaacttcatcagttcacagagaaagtaatccaggaccggaaggagtctcttaaggataagctaaaacaagatactactcagaaaaggcgctgggattttctggacatacttttgagtgccaaaagcgaaaacaccaaagatttctctgaagcagatctccaggctgaagtgaaaacgttcatgtttgcaggacatgacaccacatccagtgctatctcctggatcctttactgcttggcaaagtacctgcccgggcggccgcccgggcacgtacgcgggactcttatttaatgggctttgattctaatgataatgtacctttatctttcaaaagctgacatttcctacctaagcatctcccgagaaaaatatctcattaaaaagcccataaataataggggagaagaaagccttaggtatcaattccaaaacagtgattgaaatttcccaaaataattatggcttctgtcatctccagagataatctggcttggtttaccccataatctaatttcagaaaagaaagctttattttaacactcatctgaatcaacattaaagccttttctctcaaagcgtttatgagaaactcaaatgaatatactttttgaattactgtcatcaaaagtgtacggcttcctgtgctgcttgtgtcaaatggaacctgccccctaaagcactttctttcctttacttgcgtggtttcatgtaagctgtgctgtttagaaacaacatctcagactttacaaagaaatgaccaaagaaggcaattgcactttttaagggatatcgacaagcagtttctgttttctaaaggacaaaatacagagtgtgtgtcatttttaattagattctttcccctgctgagtgggaattccagtgcagcactgattgaccacagtgcaatctanagcacaagaccgaattaagttatggtatttattcatatgattgaaattatctggtgtcttttagataatccgagaacgtatgctgtttggaagtgaaagaattttttatcaagggtgaactaggaaaattttttttggtgggaaataaggggtaaaggaaaacttggtttaaattgaaaaaaggggcaaacgggagagtgtagtggcagatatgannnnn

SEQ ID NO: 10785 - DNA, 270 bp, Homo sapiens
  misc_feature 1, 2: n = A,T,C or G
nngtacgcggggctctcactgctcccaaaaatggcggacgcattcggagatgagctgttcagcgtgttcgagggcgactcgaccactgcggcgggaaccaaaaaagacaaggaaaaggacaaggggaaatggaaggggcctccagggtctgcagacaaggcagggtaaggaagaagttccagttgttgcttttattttttttctcggtggggaggaagaaaacactactctcttaggaagagcacgagaaagtgaagtgtacctgcccgg

SEQ ID NO: 10786 - DNA, 594 bp, Homo sapiens
  misc_feature 594: n = A,T,C or G
acatagttcacattttttggaagaattccacaaaagaagaagaaaaggaaatctaatctaaaaatactattttggaggggatagcagattgaaaatgagaattttgaaagtttcaataccagtggggaaagcatttgctagagtttagaaggacagcatatggtacaccagatcacgagacatcgtttcatacttcccaaatagttttatattttagctttgaaggtcagttaccagagccaaacttgttcttaacaagcagaattttatgtccattcaaagagtctcttacacctttctgggcctattcacttgcagagaggagtcgaaactgtaaccaggctcttcatatcgtgcattcatatgtgatgtcctgtcttcatatgctgtccaatttctttaagataaatggagtgactcgcaggagggccacgtagatgagaaagttccgtatggaggagatcacatcctcgcgcatcttccgtttcatctcctccgggtccagcttcggcgcgaggccctcaatccggaacatcgcggctctgacttagcagcttccagccgccgcgctctactctccacggtgccccgcgn

SEQ ID NO: 10787 - DNA, 634 bp, Homo sapiens
acgcggggggagtcgtgttcagcaacatatctacgccttgcagcacggtgcctggcctgcaactggtgttccgtaaacagctgctgactgacgggatgcatcgatgtgtttcccaagacatccaggagaggatattggcgcaaacagtgagtcatcactctccacccaccttccagactccctcctccatgcatatccagctcttctcaacctggggctcccttagaaaatccagacaaaacaattgccacagagccaacatcttccttttccctttgtcttatggtaaaaacatatttgtagaagcaaatccaataataaaagattagcacataaatacactgaaaagtaagatcactgacaaatacaccaagtgtcggcaaacagttttcagtgtcttggcacatgcggagcccatgttgcaggtggcatcaggcagacatggggcctaatcagaactcccactgaagctggacggccttgagtcagcaatgttctagttaatatctctcctccatttgtccccccgctctgcatttcctggttttttcaacagagtcatctggggaaaacccacacattttatgatattttgtcttccccttcctctctgttaaaataaatgcctgtcaca

SEQ ID NO: 10788 - DNA, 525 bp, Homo sapiens
ggtggcggccgaggtactcagagtgcacaatgtaagaagtcactcactcttgggcatgcgctagttcagggttggcagcgacagtgagtgccttcttacattttgcaccctggataccttccttgcctcaccctagactggcccagatgtctagtctacagttcaccttatcacttgcaatttctatttcaatgactacacttttcacttccaaggtttctatattttaatccctatctattcttaagaattctttgttccccttccctcttttacttatttgatgattcaagaatccttattttaacatttaatattgcaccattatgtctggttcttcatgaatggactccacagattcttgggtctgttgactatcctcatgccagaaaatattcttgtgtgctttgtaatttttcttcaaagcttaccttgtttgggagggaatttgtttgttttgtttctttttggtagactcctctccctgtcaagtagtttttgggttggttgccttactctggtagt

SEQ ID NO: 10789 - DNA, 755 bp, Homo sapiens
  misc_feature 744, 745, 746, 747, 748, 749, 750, 751, 752, 753, 754, 755: n = A,T,C or G
acactgagtagcgaaggtatagagttttcattgaaataatttggaagaagagcaattggatagaatgtcaagacataacagagtcaagggaaagcattattttgattttatatctgagtatgtttttagccagaagaggagaagaaagaggttaaaaagcaaaaacagaatttatagatgcacgatattacttctgaacaagagaaagaaactggtaggaaaatttattttaaaaagtgttgaagggaaagaatcaagaccacagatccagatccggagattattttgctaaagaatagcaattgtgaggcatgaggtgggaggggggaagaagctatgaacttaattttgaggtttctgagaaggaaacttgagtgaattcacttcagatgcatttggaatgtttgcactccagaagatgagattgtgtgtgctctggagagtattggaagaaggaggtattactagatttggcgactcccacagtgactcattactcttctctgttactttcaggattcatagagatatgttctgttgatattatttatttaagtgagataaatttgaatatgaatccattggcttttttttgtaaaatttctgctttataaaatctgttagaaggctgggcccggtggctcatgcctgtaatcccagcacttgggaggccaaggcgggcagatcactggggtcagcagttcgagaccagcctggccaacatggtgaaacccatgttctacnnnnnnnnnnnn

SEQ ID NO: 10790 - DNA, 3252 bp, Homo sapiens
ggagtcgacccacgcgtccgcggacgcgtgggcgcggtcccccaggtgagagtggtgctgtcggtcctactggtcctattggaagccgaggtccttctggacccccagggcctgatggaaacaagggtgaacctggtgtggttggtgctgtgggcactgctggtccatctggtcctagtggactcccaggagagaggggtgctgctggcatacctggaggcaagggagaaaagggtgaacctggtctcagaggtgaaattggtaaccctggcagagatggtgctcgtggtgctcctggtgctgtaggtgcccctggtcctgctggagccacaggtgaccggggcgaagctggggctgctggtcctgctggtcctgctggtcctcggggaagccctggtgaacgtggtgaggtcggtcctgctggccccaatggatttgctggtcctgctggtgctgctggtcaacctggtgctaaaggagaaagaggagccaaagggcctaagggtgaaaacggtgttgttggtccgcacaggccccgttggagctgctggcccagctggtccaaatggtccccccggtcctgctggaagtcgtggtgatggaggcccccctggtatgactggtttccctggtgctgctggacggactggtcccccaggaccctctggtatttctggccctcctggtccccctggtcctgctgggaaagaagggcttcgtggtcctcgtggtgaccaaggtccagttggccgaactggagaagtaggtgcagttggtccccctggcttcgctggtgagaagggtccctctggagaggctggtactgctggacctcctggcactccaggtcctcagggtcttcttggtgctcctggtattctgggtctccctggctcgagaggtgaacgtggtctaccaggtgttgctggtgctgtgggtgaacctggtcctcttggcattgccggccctcctggggcccgtggtcctcctggtgctgtgggtagtcctggagtcaacggtgctcctggtgaagctggtcgtgatggcaaccctgggaacgatggtcccccaggtcgcgatggtcaacccggacacaagggagagcgcggttaccctggcaatattggtcccgttggtgctgcaggtgcacctggtcctaggggccctgctggtccttctggccctgctggaaaagatggtcgcactggacatcctggtacagttggacctgctggcattcgaggccctcagggtcaccaaggccctgctggcccccctggtccccctggccctcctggacctccaggtgtaagcggtggtggttatgactttggttacgatggagacttctacagggctgaccagcctcgctcagcaccttctctcagacccaaggactatgaagttgatgctactctgaagtctctcaacaaccagattgagacccttcttactcctgaaggctctagaaagaacccagctcgcacatgccgtgacttgagactcagccacccagagtggagcagtggttactactggattgaccctaaccaaggatgcactatggatgctatcaaagtatactgtgatttctctactggcgaaacctgtatccgggcccaacctgaaaaacatcccagccaaggaactgggtattagggaggttccaagggacaaggaaacacgtctggctaggagaaactatcaatgctggcagccagtttgaatataatgtagaaggagtgacttccaaggaaatggctacccaacttgccttcatgcgcctgctggccaactatgcctctcagaacatcacctaccactgcaagaacagcattgcatacatggatgaggagactggcaacctgaaaaaggctgtcattctacagggctctaatgatgttgaacttgttgctgagggcaacagcaggttcacttacactgttcttgtagatggctgctctgtaagtaatagtgaaatatgggaatagctttgggaagtgggatggagggggttctaacttagactgcccccaagggggggtctaaaggggggttaaaagaacagaagaatgagagaactaacttatttcataagtaaattcagtttttgtatgtattttatatttatttatttatacgtattaatttcgtacttaaattcagatgataaattcagagtattcttatcagatagtgccttctgaaatgctgaaatgtatactatgtccatgcattgttttttctttagcatgttttttaaatggtaatgtgtgcccagaacttaaaatttcttgagacttcagtggcctaaactataatttatagttatgtgtattttattttacttattagtatggcctacatttaacttttaatgctttttctacaatatgctataaatataagaaaaattaaaattcactaacagcaagactacatacccacccaggtcccgctcccaaagacacacatagagggacatacacacaacaatcctaaaaatgactttgtagagataggtcacttggaatgtgtgttgaaatgttgttggtttttttggtttgtttgtttgtttgttttttgttagactgatagggagcccctcccactaaagacacccttgatactgttatttcaaggatgaacttatttatctgggacagacatcttcagaatgacacatgccaaacagtggttcttattaaatcaaaggttcagatattatcagattcagaaatagtgatgctttgtgtatctattttcttctctttaaacagaaaaagacaaatgaatggggaaagacaatcattgaatacaaaacaaataagccatcacgcctgcccttccttgatattgcacctttggacatcggtggtgctgaccaggaattctttgtggacattggcccagtctgtttcaaataaatgaactcaatctaaattaaaaaagaaagaaatttgaaaaaactttctctttgccatttcttcttcttcttttttaactgaaagctgaatccttccatttcttctgcacatctacttgcttaaattgtgggcaaaagagaaaaagaaggattgatcagagcattgtgcaatacagtttcattaactccttccctcgctcccccaaaaatttgaatttttttttcaacactcttacacctgttatggaaaatgtcaacctttgtaagaaaaccaaaataaaaattgaaaaataaaaaccataaacatttgcaccaaaaaaaaaaaa

SEQ ID NO: 10791 - DNA, 894 bp, Homo sapiens
  misc_feature 893, 894: n = A,T,C or G
tcattgataaatcatcttttttgaaaaactgtgaaaagagattgctgagtcaatcaacgtaagtaatactaccaaataaaaatttccaaagaaatgagagatggtaggtaattaaagttctctgaatgaacaggaaatataggatataccttgtttcagagtagaagagtatgtgactgctttgtgaagaaataattcatagaagttagtcaaatttatatttttgtgcattctaatgaaataatgttaattttcagacttttcagatttcaattctaacggattgactataggaagtagtcattgtaatcaacaaaaagaatatacgggctacagaggaggaaccacagattcgtgaatgaaagtagatttgtatatgtttttaaaatgtatagtggagaaatgttctcatgaatgtatctgtgattaaccttttatagatcacgatgttcccttcagaatcaaaacaaaagaacgttgaagaaaattcttgggattctgagagtctctgtgagactgtttcacagaaggatgtgtgtttacccaaggctacacatcccctagaaatagatcaagtaaatggaaaatcagaaggtggatctgctggtggaatcaggaccattctctgcggtgataagggctactgttaaagatggtcttccgaaggctaactgcggaatgaaagtttctattccaactaaagccttataattgatggacatgcagactttcaaagcccagcctcccgagaagccatctgccttcgagcctgccattgaaacgcacaagtctgttcccaataaagccttggaattgaagaatgaacaaatcgagcggccgcccgggcaggtactctgttggagtcacaggaaacaaaatgtgccctttctgcnn

SEQ ID NO: 10792 - DNA, 1003 bp, Homo sapiens
  misc_feature 985, 986, 987, 988, 989, 990, 991, 992, 993, 994, 995, 996,997, 998, 999, 1000, 1001, 1002, 1003: n = A,T,C or G
actatattagtgtagcaattttccaaaagccattcatcttagagggctaaatgattttaccttatcaattcccctgtgaaaaaatatctctaaagaggttttctgctggaaaatattgttgctgtcacattgatatgccaacaaaagctaagcagggaagtcaggccaagaaatatctccctgcaagagaaggcatcgcacatgtatctctccatgctatttaaaattgcattctgcaacatagaaaggataggccatgctgcagaagccaggtccaggaaaactgctttctttggcctttacacactccttttggagagatgctggtgaaagcagcaactaccatctgccttctgttgacttattgtcagcaggtggagggaggaaggagggcatcgcagacatcattctattatctcaaccttgctttctcggatccaaaggccaagaagttgctgctccatgccctcagagctctaatttggcacctcttcctgaaatgagagcttgaaagggcttctgctctgggtgaaaccggctcgtggcccgggccaattctgctggcttcgcgtctggcagtgtgtcctaatcactgttataagtgtggttctgcggaacatcttgtaaaatattttcctattgctccagcaacatctcctgtctagacaatctaattatgaacacagagcaaatagctgaagtgtatgccgcccccaagggttgcataactccaggaatggggctaggaagacaggggagggaggtgtgtgtggtgttcattacttttttgttgacctgaccagaaaattgagtgctccaaaagaatctggctaacttttaattaagaagaaatgatctggtggaagctggcattttgttgtttttccaaagtcagtggaggattaaaggtactgatgtgtttccctctaatcacgtctttttcttggcttcaaaggtggtttgtggtctttgcggtaaaataagnnnnnnnnnnnnnnnnnnn

SEQ ID NO: 10793 - DNA, 930 bp, Homo sapiens
  misc_feature 1: n = A,T,C or G
nacgcgtgtccgcggacgcattattttctttttatttagatgatattaaaactcagaagaattaattttgacattttgtatttacagtttatcagttaattttctctgttcaagtagtacagtaggcacagattaacatttaaatttttcacatatggtatatttcagaaatttgaagttaagcaaaaattttaatgagtagagaaagtaagtagccttcaggaaatcttcatagaggaccaggcccttttggaattgtgaataggtttattgccttacatcctggtacacatgtccaaggtcaggtcctgggtggtaaaggtaaatacaaattggaagggcactgtgtgagccaaaatgagtcagattagtcatgattcatttccagtttgggttttgggtggtcttggagaatgttgtaagcactgcttcattgataggttgattgagccagactttactcagcagcctggaaaaggagagatgggctctgggttctacctttgctcactggtaagttgctaagatttcagctttgccctcaaaccctgaagtagtccttcattcacacagtgggatcactcgaaaatgtcagatggggaagtccataggttgttactttaaagaaaatagaaaaaatgctggaaaaggtttcttcaattttaatacccatgaaggcccatgttttagctttcctccgatgggcaaaccatacactaacttgggccttgtaatcaacaagcaaggctaaaagctctctaagtgcttgctgtttaaactattttgtgttggaagaagagttggaaaagaggcagtgtggaggtgagggagaagttccctccctccaatcatttccaataaatggaaatttaaggagaaatttgtgtttatccttaatatctaagataatcactgtgcagtgccattggt

SEQ ID NO: 10794 - DNA, 642 bp, Homo sapiens
  misc_feature 1, 2, 3, 639, 640, 641, 642: n = A,T,C or G
nnngacccacgcgtccgagcagacaatgataaagggctctgaaaggctagaagaaaaggtgtacttgcaagaaacctcaggacttgagtaacagcaacatggttcttctgagctatgaaggggcccagatttaagggctatttttgacaccctaaatgtgctgagacaagtcattaaggtggtcctgccaggacacagccatctaaagcagcaatctgcttcttgccagaaaatctcgtgcctctgcagagccttttccagaatgaaccacaccatgctgaggaaaggagaaagagaccacctactgcatttctgtcactcgctgaaaaggacactctgtcagaaaatcttctagcaaacttcaaagggcaaaatcaccccttgttactgataaagcccagagagcttcagcagctaacattccctggacagggcacagcaaggatttgaacctaggtcagtctggccagaacacccacaagctttccttaactcagtgtgctatctccccacgactaggtcactactgctttataatcacctttgtagccaccagtggattttgctcatcagtatttttcaggcaattgatactttagatattcagctgcaagacgtatgcagttttcattgacatcnnnn

SEQ ID NO: 10795 - DNA, 520 bp, Homo sapiens
tgctccgtgggtttcattagcttacttcttgtgtaggaggcaaaaggtatctgcagggctctgggcttgctaaccaaaccgttaatcgcttagaaacagcaagaggttcactagtgagatgtttatcacatacctggaacacgagttgactttctgtgagacatcattctggaatgaaagccaaaatctctctgctattcagttgaggctgaaaaaacaatcacatcagaattagtaaggcacatgaccacgagagagaaatgaaaacaagccagtattcaatggggctagggggaaaattacctgggcttcaggaattacaggagagttggggttttgagaaggtaaaaaagtgggccaagtgcggtggctcaagcttgtaatcccagcactttggaacgccaaggcaggtggatcacgagctcaagagattgagaccagcctggccaacatggtgaaaccctgtctctactaaaaacacaaaaattagccgggcgtggtggcgggcgcctgtagtccc

SEQ ID NO: 10796 - DNA, 327 bp, Homo sapiens
acgcgggggccttgaaaaataaactgaagaagcagtctacagctacgggtgatggagtagctagggcctttcttagagcacaggctgctttgtttggatcctacagagatgcactgagatacaaacctgtaagcgttttgtttcatcactgttttaatttgcttttttatggttctttggaatgagacagaaaaaaagagacatcattttaatattacaccttcaaaaaatatcatggaaatcttttaagatccaaaataatgtgtttcaaaacatacatttcatctccaatttttgactttttatttttagttttgtttagtacct

SEQ ID NO: 10797 - DNA, 484 bp, Homo sapiens
  misc_feature 483, 484: n = A,T,C or G
acttacctacacaagttttactatcttggaatgttctagaattccagttaataaggtgaaagtgataaacatggctccatttagttgttatctctaaatgatttagagaagtgtttgccaaattataatgtgcatatgaatcacccggagatgttgttaaaattcaggttctgattcaaaaggcctagggtggggtctgagattctgtgttactaacaagttgctaactgaggctgatgttgctggttcccagatcacactttgtttagtaaggataagggcaggtttccaatcttggctgcaattagaatcacttgggaaaattaaaaacatctatatctgggtcccatcctaccccccagagatttgtctttaattaagtggaatgtggccgggtatcaggattttaaagaagctctccagctgattttggcgttcagctcacgttgaacatgactgagtagagaatggacccttgaagann

SEQ ID NO: 10798 - DNA, 1043 bp, Homo sapiens
  misc_feature 1, 2, 3, 4, 5, 6, 7, 8: n = A,T,C or G
nnnnnnnnccgccccgggcaggtacatgtgtccttcttctcagtttggtttgtttggttttgaaaaagtaggttttttttttagtatgtgatgagcttattcttaagtgaattaataaatactttttagtatctgttttaatttctaacagtatgagtgttggtagttatattccaaataaacaaaaactcttagagtcctcagtaatttttaagactgtaaaggggtcctgaaaatgattaaatgtttgagaataactgcctcagaacattgttcttcaaccctaatcaaacccagcacggcatttatataaaaaatgattttataatgtcccatttgctaatcctgaaataaaatacataggtaatagaatgacttagcaatttcaaaatatcaatggaggaatactagtgtttggagacctaactatacaggagaaataaaaggaaagtcattttttataacattatgcatgcatgtataaagcactcagatctgatgacattgggagacacggtggcatagccagatccttacacctgtttgtggactcaccatgaatacagcagtgacaaagcagacccccacggctataactgataggaatttcattggtcttggtgatgtcattttctagaatggtaagaaaatcttggtaaagtttaaatgaaacaaaataaaattgcccatcagtatacacagtagttgctgttctggaaagttcagtgcctcataaactatacaaaatatctatacaaactatacaaaatatataaagcagaattcattctgtgttcaagtgacagggattttattgttgctgttgttttacttacataaaattgagagaaacagcagaaagtcctgcgggggccgggcatggtggctcacgcctgtaaccccagcactttgggcagccaagatgagctgatcacttgaggccagtagttcgagaccagcctgggcaacatggcgaaaccctgtctttactaaaaatacaaaaaattagctgggtgaggtggtgcctgcctgtagccccaggt

SEQ ID NO: 10799 - DNA, 440 bp, Homo sapiens
acgccacaaggcatttaatgcccacagtaacagggctgtttgacagtggcagaagaggacgggactaaagttactttgtgctgagagggggaaagaagcacaaagtttggtctgttgcgtaattgaatttttaacactcttatccacaacaaacactttttcgtgtcctgctgtgtaaaagacatcagatatattacagattttcaaacaggcaggtatcaacatttacattgtaattcaatagacgctactactacaaaggagctttattcttccaacttaatatggttgctgcgggaacactgcaggatgaaactgactttttttgtggtaatgtttctcctggttgggaacaacgcaaattagcaaaggcgtaatttataaccgctgctaccaaagagtgaagtatttgtggaagttctgactggaatctagctcgt

SEQ ID NO: 10800 - DNA, 2594 bp, Homo sapiens
  misc_feature 2590, 2591, 2592, 2593, 2594: n = A,T,C or G
gtccgcggacgcgtgggcggggcgatctggagtaggaggtgtgaccggagggcgaaattggggcttcctctgctctggtgacccagaaccgtcaactgaaatgaccctgtctgtgtagtactccggcaggatgggcctcggagcgtaaaggcggcaaaaacaaaaatattaaaaaaaaggagagagggacaaaaaaaagaaaacccgaaagtttcagctgcattgctgcggaacgttttttagccagaaggcgaaagaagaaatcggaagtgacgtcgcggccaaaacaagcccgggcttggaggcctgtactgaagctggcctcagatgggaaggcccgactcgctgtctgctgtcgtcggtggtcgcgagaccttgcactctcaccgggtcggcctccagcccctgtgcccgggatccgctcgccgcggatgagcgagagtttcttcctgggacttttcgggcacagctggccggtggcgacagaacggactttctttcctgcaagagtctcccctccagcgggagacagcgggctcctgtctcgggacgctgggacacctgtcgcctatttttaaatatccagattccaagaacacactggatactgctcttacaaaaccaagaggaaatcatgaagaaatgttttagttattgaaactacagttgaaatcatggatacatcaacaaatctggatattggagcccagcttatcgtggaagagtgtcccagcacttatagcctaactggcatgccagacattaaaatagaacatccactggacccaaattcagaagaagggtcagctcagggtgttgccatgggaatgaaattcatattgcctaaccgatttgatatgaatgtgtgttctcgatttgtgaagtccttaaatgaagaagatagtaaaaatattcaagatcaggttaactctgacctggaggtggcatctgtcctatttaaagctgaatgcaatatccatacatctccttctccgggaattcaagtaaggcatgtctacaccccctctacaacaaagcatttctcacccataaaacagtcaaccactttaaccaacaaacacagaggaaatgaggtctctaccacacctctgttagcaaattctttgtctgttcaccagttggctgctcagggagagatgctctatctggctactcgtatcgaacaagaaaatgttatcaatcacacggatgaagaaggatttactcctctgatgtgggctgcagcacacgggcaaatagctgtggtagagttcctacttcagaatggtgctgatccccaacttttaggaaaaggtcgagaaagtgcactgtcgttggcctgtagtaaaggctacacagatattgtcaaaatgctgcttgattgtggagttgatgtaaatgaatatgattggaatggaggaacacctctgctttatgctgtacatggaaatcatgtgaaatgtgtaaagatgctcttagaaagtggggctgatccaacaattgaaactgactctggatataattctatggatctagctgtagccctaggctatagaagtgttcaacaggttattgagtcacatttgttgaagctgcttcaaaatatcaaggagtagacacagtcatcagaaaatgtctgcccttttgtttacttcttggtccttataaatgatagttttgtttacttataaatttttacctcagttgcaatatttactggtttttagtaggttttaataaatatttctctgagtaattcactggtttataataaatgtaatactctttttataactatgttttactgtatatttaaaattataaattaatgttttcgtggcatgtaaatttttatggtacagatagttatcatcagtctttgtatcaagtgctgtaatttgacattttcagaaattattctaccctagtcatcttcactcgtgtattaagtcattcactttatatagggtttgctataaatccctagaaaaaaattgttcttattgttgaattaaaaagtgcacagtgtgattgtttacaaaatgatattataaataaataaaatacttcttctgtcaaaaaaaaaaaaaaaaaactcgagagatctatgaatcgtagatactgaaaaaccccgcaagttcacttcaactgtgcatcgtgcaccatctcaatttctttcatttatacatcgttttgccttcttttatgtaactatactcctctaagtttcaatcttggccatgtaacctctgatctatagaattttttaaatgactagaattaatgcccatcttttttttggacctaaattcttcatgaaaatatattacgagggcttattcagaagctttggacttcttcgccagaggtttggtcaagtctccaatcaagggtgtcggctttgtctaccttgccagaaatttacgaaaagatggaaaagggtcaaatcgttggtagatacgttgttgacacttctaaataagcgaatttcttatgattatgattttattatttaaataaggtttttaaaaaaaaattaagtggtttcaaaattttaaaagtggccttttaaggtttaaaaaccaaaaannnnn

SEQ ID NO: 10801 - DNA, 210 bp, Homo sapiens
acgcggggaggccatctcgctataggaaaggaaagtggaacagcattcatcctcaacattttacgaagacaaaatgaagactggagtagaagactgatcagtgcagcatcatcagcatcatgctattacaatcccaaaccatgggggtttctcacagctttacaccaaagggcatcactatccctcaaagagagaaacctggacacatgt

SEQ ID NO: 10802 - DNA, 1241 bp, Homo sapiens
  misc_feature 1, 2, 3, 4, 5, 6, 7, 8, 9, 10, 11: n = A,T,C or G
nnnnnnnnnnncagaagaggcgggagagacgggtcgtggacggggtgatgatgtggtggagaggtgctgaccaagcgatgtgagctgtgttcagaactttccctttggagaagtctgtggctgccttctggggaaggcaaacaaatgtgagctcaagaagtttacaatttagctagggaaacaggatgtgcaaacaggaagaaccaactatgtgaaggtaggtaagataactgttgactccatgctttaacgcggggagagctctttgtggcttgggtggtcagcaagaattttttaagcagagatactcttgattgggttggataaataaaagagcaaggaggacattgtaggaggggaattgctcccagcagagcctagaagcagagagattttccagggttcccaggagaagagattgaataagtgcagtgggccatgtggtgacacatcttgagtgtccagctggagaactggaagtgcatatcataacaggggtggaaaactcagaggttgatagggaatggtgaggttgcaatgaggggaccggtggggactttgaccagtggagcaagagtctttccagatgaagggagcagctgcctcacagctctggccagctgtggacatttggccagtttgtaatttgtcaaaagaagtcagaaatctgccttgttgtgaaatctccagattttttacatgttgtcaatttaattaaaatattaaaatcagcccaggggtcaagactgctgacccatgcatggggcctggggggaaacttgtggggctccagcttgtggcttctctgttggcggtgcagctgttgaagattcctacacacaggtgccacaggggaagatggcacaggaaaggagtgtggacctggagaatcaagtaaggagcaggcagcaactgaggcagggccatatgcaactgtggccaggggtcacatatcatactgagcagagttcaccttgcccgagaaccacaaacccaggacaaatagaagggaaacaaaataaaggaaagggagccagcgtgtctcgttcagtgttgggttgtcttagtctttgctctcagcatcggtgcacttgtaatatacttcatagattcatcaaacccaatagaatcctgccagaatttctacaaagatttcacattacagatcgacatggctttcaacgtgttcttccttctctactttggcttgcggtttattgcaaccaacgataaattgtggc

SEQ ID NO: 10803 - DNA, 496 bp, Homo sapiens
  misc_feature 496: n = A,T,C or G
actctttcctggatttaccatttatacaaagaaaattcttacccagctggaagaggaggaacaaaactttttactatcagggcacaggcaaaaaatccatttgtgcaagagagacatataagcaaaaatgcatctacagtgagagggggcgggacccagttttttttccctgtgaagctacatttaataatctcacttgaaaattgagaatataaaggcttcctgattcaatgattcaaactcgtcagaatacaaaacttcaggttttggtatgacctagtatgaagtaaaaggctcaagaaaatgcctaaaacaattgccttaacctttgaggtataggttcttaggacctgcctaagacagaagctggacaaagacaacagagaaaatctatcttgcctaaaacaaaagcctagcattgagaaaagaacagcatcagtctaacactgaaggaggatgtggagactcttagctgtagcacaggactgaaggaacn

SEQ ID NO: 10804 - DNA, 1542 bp, Homo sapiens
cagctactcaggaggctgagtcatgagaatcacttgaacccaagaggcagaggctgcagtgagccaagatcacaccactgtactccagcctgggcaaaaaaggagactccatcttaaaaaaacaccaaaaagcaaaaagacacacacaaactcaactactggttgagactagtgtaccttactcaaagtaatgcagcctgttcatgaaattcccattacagatggaagggttaagatcaagtggatcaccagccacagccacaaagctaaggggcagaggggagttggtgggggggaaaaatggctctcactgctaggggcttaagcggagggagtcgagccagcgtcgccgcgatggtgttgttggagagcgagcagttcctgacggagctgaccagacttttccagaagtgccggacgtcgggcagcgtctatatcaccttgaagaagtatgacggtcgaaccaaacccattccaaagaaaggtactgtggagggctttgagcccgcagacaacaagtgtctgttaagagctaccgatgggaagaagaagatcagcactgtggtgagctccaaggaagtgaataagtttcagatggcttattcaaacctccttagagctaacatggtcgagcggccgcccgggcaggtactactacccaggttttgtcaaatcatcttttttaaagttttttttttttttaattggttcaggacctttgtaggagaggctaatatgtttaagtagaagatattactgatagcattttccccatgctcctacataaaaaataaatatttccattttatagctttttcaatatacagaagagggttacttcttcatcaagtatattgttgcctttgaggacacagcaaaacccttctatatgtatcttcattgatagtggcagttaaaaactaagttatccagttaagacttaaaaggtgacccatattaattgcatggccttaaaaggcagaaatgcaggagtgtagcaagcatcattttagatggctatggttcctcttccgcatctgtcagtagttcacttatgttcagtcttagaacctactggaggagtgaagtaatttctctgtctcgtgcagaggcactaaggagctgagttacctcttaatctgggggaatggataataagtggagtacagttatgttaaaggatgttccccccgctcaaaaaaaagtttcaatgtttgttttgcccagtcaaaaatataggtcttttctacatataagaacagtcaccagaaattttcccttttgctaaatgcttaggtatttgctatagctgtttctgatgtcatggattctgaggaagtgtcatttacgtgatgatcttcctttattgatgtcttcatcatgttcagtgttttaaaaatataaattacaaacactctacaaccatacccagatttacttattttatcagaaaaaaaacttgagaaatttgtagatcaaattgagagacaataagtgtacattgttgaataaaaaatttaaagtttaaaaaaaaaaagaaaa

SEQ ID NO: 10805 - DNA, 2419 bp, Homo sapiens
  misc_feature 2417, 2418, 2419: n = A,T,C or G
gaaatgcattcattgcaaaatacgaattaaattctctaacctttgtagtagtaagagaaaaactcatagaccaatattatttgtaattttttctcaggtttaacagcactacacgtgtatagtctctattatctaaatctaaaataagtaagaattttaggttatttatgtgattgtgtttttctatttaagcaattctcatgttaggtatagtctctgaaagtactaaagggcacaattctgtaagtgagacatcattttcaggatagtttctcttcttaaaattaaacattatagataatatttgacttatttaaaatgcagcaggagtggcagaaaataccactagaacaggagaaaggtacattgcaaaatttattaattcaattcagatttattaattgcgtccgaaaataaacggtaaataggaaatggctatttacagtttcattaattgataagtacatcagttggctattgtttgtttaatagatagtatgctaattatttttgtacacatatttaatgaaagatataaacacatactcataattaagagtatatttatgcctcattaatttgtcatgttccatatatttagaaaagtctcaagtagtcggcatatctgtttttggctctaactctctgccatccctgtggaacttttagcctacacactgcagttgttttgagaaaacaaaggcatcattctcttctcaaggttatggtagtgatttaaggccaacagacccaagactcatcttgtaatgcatagccaaacagtcatagttcataagcagtcacgtgactggtgacattttaaatctccagtctttgactttgtcattggttgacttttgtcttcaggaaatattctacatttcttggaatacaataaaaatgcccaagtcaatttggttgttgtcaaattattcagctttttcttaccacttactagtactccacctctttgctctagcatccagccaactagactacatagaatttcacagtgatcttcctcagctccagctcttggcatttgctcctcccttctatctgacatatgtttttgttgtccttctggtatcaacctgcatatctcatccaccaaaaagtctacaatattgacccaaaacctggatgtcctatctgtgtgttccagtagtgccctattttaaatgtgtcatgatatctattactttgtgtgaaaattacctgtttgttttttcaggttatataatagtataacactgccaaggagcggattatctcatcttcatcctgtaattccagtgtttgtcacgtggttgttgaataaatgaataaagaatgagaaaaccagaagctctgatacataatcataatgataattatttcaatgcacaactacgggtggtgctgaactagaatctatattttctgaaactggctcctctaggatctactaatgatttaaatctaaaagatgaagttagtaaagcatcagaaaaaaaagtgggtattcctacaagtcaggacattctacgtgactacaatataatctcacagaaatttaacattaatacattctaagatttaattcttagattcttggtaaacaaattgctcctgtggagatgattggcatcacatggtgttttgagctgatacacccaacacttgagctcactgcaacagtaccagattttcaccgctatgcctcctttcactctgggagtctttccagaggtcttgcactcgggagagcatgctcaggtttccccagctctacaaaatcacccagaatgccaaagacttcaacacaaggtatgttcttgttactgattgtcagaaagctggttttgagactgcagcttggactaaattcagtcatctggctgtctggggaagcatgctgaccagtctggtgttctttggcatctactcagccatctggtccaccattctcattgccccaaatatgagaggacaggccaagcacatctgcaaaaaagacattgctggaggaggtgcaaagagctggaaaccaagtctccagtcctgggaaaagcagtggtatggaaaagcaatggaaagagcattttgaaaatgccattccactgttttctggcctttatgatttctgctgagaaatccactgttagtctgatggggtctccttcatagcaccaatgacctgaagagccttgttgaaggaagactccatctgatgactcagagcaagtattttttagtgtgttattgttattagcagaaagagggccataaaatacttggggcaagctgaatatatcttaggcaaaagaagaaaatattcaaattcttatgttattttatctaattattttatctctttttgtgtgtgacttataatgtgtgtattgtattaataaaaggtatataaacatgtaggnnn

SEQ ID NO: 10806 - DNA, 727 bp, Homo sapiens
  misc_feature 702, 703, 704, 705, 706, 707, 708, 709, 710, 711, 712, 713,714, 715, 716, 717, 718, 719, 720, 721, 722, 723, 724, 725,726, 727: n = A,T,C or G
ggaatttggccctcgaggccaagaattcggcacgagggccgaaggggacgccgggaacaggaatttcttcacatggctcctggagaagtgaccatcacagttcgcctcatccgttcctttgaacatcgcaatttcaaacctgtagtgtatcacggagtgaatttggaccaaactgtaaaggaatttatcgtatttctaaagcaagatgtccctttaaggaccaacctgccaccaccattcagaaattataaatatgatgcactaaagattattcatcaagcacataaatcaaagacaaatgaacttgtgttgagtttggaagatgacgaaagactcctgctgaaagaagacagcactctgaaagcagctggaatcgccagtgaaactgaaattgcattcttctgtgaagaagattataggaactacaaagctaatcccatttcatcctggtgaaaacatctcgagggcttcctttttgcatacctgtattaagctctttattccactgctgagtttttgaaattgacaaacaaatcttaaaaaattaatcccaggctatactctttgagctaaaatctggttatttctttctcttcaggtctttctttccttctctctttctttttctttgttgttgtaaaataatatattatgagaaaaacatttgatctttttaaagggaaataaattgttattaaaaannnnnnnnnnnnnnnnnnnnnnnnnn

SEQ ID NO: 10807 - DNA, 3000 bp, Homo sapiens
  misc_feature 1207, 1208, 1209, 1210, 1211, 1212, 1213, 1214, 1215, 1216,1217, 1218, 1219, 1220, 1221, 1222, 1223, 1224, 1225, 1226,1227, 1228, 1229, 1230, 1231, 1232, 1233, 1234, 1235, 1236,1237, 1238, 1239, 1240, 1241, 1242, 1243, 1244, 1245: n = A,T,C or G
  misc_feature 1246, 1247, 1248, 1249, 1250, 1251, 1252, 1253, 1254, 1255,1256, 1257, 1258, 1259, 1260, 1261, 1262, 1263, 1264, 1265,1266, 1267, 1268, 1269, 1270, 1271, 1272, 1273, 1274, 1275,1276, 1277, 1278, 1279, 1280, 1281, 1282, 1283, 1284: n = A,T,C or G
  misc_feature 1285, 1286, 1287, 1288, 1289, 1290, 1291, 1292, 1293, 1294,1295, 1296: n = A,T,C or G
tcgacccacgcgtccgagaaacggccttactggtgccaagggtgctgctggccttcccggcgttgctggggctcccggccttcctggaccccgcggtattcctgggcctgttggtgctgccggtgctactggtgccagaggacttgttggtgagcctggtccagctggctccaaaggagagagcggtaacaagggtgagcccggctctgctgggccccaaggtcctcctggtcccagtggtgaagaaggaaagagaggccctaatggggaagctggatctgccggccctccaggacctcctgggctgagaggtagtcctggttctcgtggtcttcctggagctgatggcagagctggcgtcatgggccctcctggtagtcgtggtgcaagtggccctgctggagtccgaggacctaatggagatgctggtcgccctggggagcctggtctcatgggacccagaggtcttcctggttcccctggaaatatcggccccgctggaaaagaaggtcctgtcggcctccctggcatcgacggcaggcctggcccaattggcccagctggagcaagaggagagcctggcaacattggattccctggacccaaaggccccactgggtgatcctggcaaaaacggtgataaaggtcatgctggtcttgctggtgctcggggtgcccctggtcctgctggagccacaggtgaccggggcgaagctggggctgctggtcctgctggtcctgctggtcctcggggaagccctggtgaacgtggtgaggtcggtcctgctggccccaatggatttgctggtcctgctggtgctgctggtcaacctggtgctaaaggagaaagaggagccaaagggcctaagggtgaaaacggtgttgttggtcccacaggccccgttggagctgctggcccagctggtccaaatggtccccccggtcctgctggaagtcgtggtgatggaggcccccctggtatgactggtttccctggtgctgctggacggactggtcccccaggaccctctggtatttctggccctcctggtccccctggtcctgctgggaaagaagggcttcatggtcctcgtggtgaccaaggtccagttggccgaactggagaagggcttcgtggtcctcgtggtgaccaaggtccagttggccgaactggagaagtaggtgcagttggtccccctggcttcgnnnnnnnnnnnnnnnnnnnnnnnnnnnnnnnnnnnnnnnnnnnnnnnnnnnnnnnnnnnnnnnnnnnnnnnnnnnnnnnnnnnnnnnnnnaaggtgctcctggctccgtgggtcctgctggtcctaggggccctgctggtccttctggccctgctggaaaagatggtcgcactggacatcctggtacagttggacctgctggcattcgaggccctcagggtcaccaaggccctgctggcccccctggtccccctggccctcctggacctccaggtgtaagcggtggtggttatgactttggttacgatggagacttctacagggctgaccagcctcgctcagcaccttctctcagacccaaggactatgaagttgatgctactctgaagtctctcaacaaccagattgagacccttcttactcctgaaggctctagaaagaacccagctcgcacatgccgtgacttgagactcagccacccagagtggagcagtgttactactggattgaccctaaccaaggatgcactatggatgctatcaaagtatactgtgatttctctactggcgaaacctgtatccgggcccaacctgaaaacatcccagccaagaactggtataggagctccaaggacaagaaacacgtctggctaggagaaactatcaatgctggcagccagtttgaatataatgtagaaggagtgacttccaaggaaatggctacccaacttgccttcatgcgcctgctggccaactatgcctctcagaacatcacctaccactgcaagaacagcattgcatacatggatgaggagactggcaacctgaaaaaggctgtcattctacagggctctaatgatgttgaacttgttgctgagggcaacagcaggttcacttacactgttcttgtagatggctgctctaaaaagacaaatgaatggggaaagacaatcattgaatacaaaacaaataagccatcacgcctgcccttccttgatattgcacctttggacattggcccagtctgtttcaaataaatgaactcaatctaaattacacaaagaaagaaatttgaaaaactttctctttgccatttcttcttcttcttttttaactgaaagctgaatccttccatttcttctgcacatctacttgcttaaattgtgggcaaaagagaaaaagaaggattgatcagagcattgtgcaatacagtttcattaactccttccctcgctcccccaaaaatttgaatttttttttcaacactcttacacctgttatggaaaatgtcaacctttgtaagaaaaccaaaataaaaattgaaaaataaaaaccataaacatttgcaccacttgtggcttttgaatatcttccacagagggaagtttaaaacccaaacttccaaaggtttaaactacctcaaaacactttcccatgagtgtgatccacattgttaggtgctgacctagacagagatgaactgaggtccttgttttgttttgttcataatacaaaggtgctaattaatagtatttcagatacttgaagaatgttgatggtgctagaagaatttgagaagaaatactcctgtattgagttgtatcgtgtggtgtattttttaaaaaatttgatttagcattcatattttccatcttcttccatggttccacagaagctttgtttcttgggcaagcagaaaaattaaattgtacctattttgtatatgtgagatgtttaaataaattgtgaaaaaaatgaaataaagcatgtttggttttccaaaagaaaaaaaaaa

SEQ ID NO: 10808 - DNA, 1036 bp, Homo sapiens
agcaaggggatctgtgatattttcgtccttttgtatgattctctacttcttattcaagacctgtgattaagttgtgtgtatattgtctgtaaaatgaaacaaaagtaggtcctaaacattgtaagaatatggtatactaaaaagctttgaaaccaaaagaaaatttaaaaaaacaacaacaacaacaatgtagagtacctcatacctaacagacactatagaaaagctgatatttttttccgttgaagttaggacattagatcatttttcacaaaaatagattccttaaataagacatgttgtctaacaggtatttacaaggcatttctagaaattcaggcgtaagtattttgctctttgtctactcaagtttctaactaaattcccactttgaacaaaaattcctcttttaaaggttggaacatgtggttgtatttgatgtttttttccttcatttttcatggctctaacaagaataatcttttctggaaaacaaaagactgtgtttcttgtgattttattctaagggaatacagggtattggttattcttattttcttattctttcttcattgataaagatagaagctagggattgtgttacattgagcaacctaaagttgtgcttcaacttcataaaacctcttgtccttaagctccttcattagcagatgactaaaagacgaaaggtggaaaatgtgaagcccagagtttttatttatttttagttatatttatcccttttcattagcttatttatattgctttccttatctagccctccttttctcctaatgtaccttgaattccaaacaactgccctgtcagggcaacttgtctcatcgtttggacagttcatgagccaggttaggtttctccagccccatttgtctgagtctccaccatcaacattgttcaaatccatgacatggtgtcttagactcgaggcagaacaaattgggaaatttatgtctacaccattgttctatcagatacactctctgccttctttcctgaccatatgttcttaaactgt

SEQ ID NO: 10809 - DNA, 533 bp, Homo sapiens
  misc_feature 1, 2, 3, 4, 5, 6: n = A,T,C or G
nnnnnnctcagcctatgatggtttctctttctaaacctgttcttctaggttcagctcaaacatcctctcctatagaaacctttccccaacctcccagtcagaactaatgatttcttttcacttcaactgtacttagtttataatttatatgactataatttaataactgagactcttctgatagtacaaacaggtgctatcataattacctctgggcaacaggcaaaaatcaagattgtccttagtaaaccaggattcataccaggtcatctgatgtttacctctagtatagcactcacccgactctgccttacattgcttatttaaaatgtctgcctccccgtctaggttttataaaagttcttggctcacagtaactcttagtataagtttctgaaataaacactttgttatcacttttgaattgatggcttacatttttgttttggcatttaacttcacatttgtgcattcatgtgtatgcatttcaactcatctgcaagcttatatccctcaaagtttgctgctgggct

SEQ ID NO: 10810 - DNA, 959 bp, Homo sapiens
  misc_feature 1, 2, 3, 4, 5, 6, 7, 8, 9, 10, 11, 12, 13, 14, 15, 16, 17,18, 19, 20, 21, 22, 23, 24, 25, 26, 27, 28: n = A,T,C or G
nnnnnnnnnnnnnnnnnnnnnnnnnnnnacatgtatcaatttatttacttttggttttgctcatttttactgaaaatatgattatctatgtggtgtcattatttttcatctcaaataacttcatttttacatagtgtagtccagctggaaacgtttatttcatgtttatcttttaaatgatattttcactggatacagaaacctgtcttctgcctcgctcacgctgggagctgtagactggagctgttcctattcggccatcttggctcctccccactaatgctgttcttctagacatgtttgaaataggggcattgctataatgaatggctagcaagtaggacaacctgaggtttgcgctgacatctttcacaaagcttctcatgtccctccctctcccttggccacaggttgacttcatctcctgtgtcctcaagatttcctgcatattcctgtttgttctcatgttctcaaatccttaattccatcaagcatccaagaacctgaggctggaaattcaaggtcaagatgtcagcagggccagttccttttgagacatttctcttggcttgcagatgaccatcttcttgtgtcttcacatggtctttccttattgaacatctgtgacctaatctcctcatgatcaaaagctgatcttcagttttgactgacttatttaatataagtggtccaaaacatctgtggccatacgttgaatttaaagtggttccaatttaagatgtcaataggcaccaggcagagacaaattcaaatgtttcccaactgatgacaccttgtcctgtgctgttccgtatgggttggagagcctcaggaaacttacaatcatggtggaaggtaaaggggaagcaaggcaagtcttacctgcttcatcagcacttaaacgccaagaaaatctgcagcaatcaaagttaaagcaccttttttctcatctcccccgt

SEQ ID NO: 10811 - DNA, 557 bp, Homo sapiens
  misc_feature 1, 554, 555, 556, 557: n = A,T,C or G
nctctacatccctgtatctcattgaatcctaacaatagccacacaagctagacataattatcccattttccaggagaaactgaagttcacagcatttactaacttcctcaaatgtatacacctcgataagtggtagagccagaatttggacccctgtctgtttcaaaacctttgtcccagaacaccagtggtcttcaattccagataaaattgcttgcagagaccacacctatggaatcaggatctccaggaatcaggggtttttgtttgttttgtggttgttgttgttgttgttgttgttgtttgagacagagtctcactctctcacccaggctggagtgcagtggctattcacaggcataatctgagctcactgcagcctcaaactcctgggctcaagctatccccctgcctcagcctcctgagtagctggggctgtttcataattttaacattggtgctgtaacatacgcactgtttattgattagttgtgatctggtgagaaaacttgtagagtctctaaaaaacttaactttaggagcataagtgcagnnnn

SEQ ID NO: 10812 - DNA, 283 bp, Homo sapiens
ctactatagggcgaattggagctccaccgcggtggcggccgaggtacgcgggaggtgtgctgtgtgtgaggcgcctgccatggtgatggccgtgcacagccagaccattcagatcccaccgtgccccagcgggtggtcctcgctgtggatcggctactcttttgtgatgcacaccagcgctggtgcagaaggctctggccaagccctggcgtcccccggctcctgcccggaggagtttagaagtgcgccattcatcgagtgtcacggccgctctagaactagt

SEQ ID NO: 10813 - DNA, 951 bp, Homo sapiens
acgcgggggggatgggggaattcctggtcctgctggtcccttaggtccacctggtcctccaggcttaccaggtcctcaaggcccaaagggtaacaaaggctctactggacccgctggccagaaaggtgacagtggtcttccagggcctcctgggcctccaggtccacctggtgaagtcattcagcctttaccaatcttgtcctccaaaaaaacgagaagacatactgaaggcatgcaagcagatgcagatgataatattcttgattactcggatggaatggaagaaatatttggttccctcaattccctgaaacaagacatccgagcatatgaaatttccaatgggtactcagaccaacccattttgtgccacatgcaagttttgaataaggatggtatagaaaacaacgctgcatatacaggtaccatttaggaaataccgatgcctttgtgggggcagaatcacatggcaaaagctttgaaaatcataaagatataagttggtgtggctaagatggaaacagggctgattcttgattcccaattctcaactctccttttcctatttgaatttctttggtgctgtagaaaacaaaaaaaagaaaaatatatattcataaaaaatatggtgcccattctcatccatccaggatgtacctgcccgggcggccggccgaggtacaaactatcagaataaatctttacatcaattacatgttaaaatgataacattttggatgtattgagttaaataaaatattaaaattaacttcagctgtttatttttattttttaatgtggcttctaaaattttttaattacatatatcacttacattattgttctatcctacagcattgctatagaagcagcggactcaattatttatgttaatatccatcccaacccacatcattaagcttttttatcattatagtatgagaatacata

SEQ ID NO: 10814 - DNA, 3368 bp, Homo sapiens
  misc_feature 1, 2, 3, 4, 3361, 3362, 3363, 3364, 3365, 3366, 3367, 3368: n = A,T,C or G
nnnnagtcgacccacgcgtccgctgtacttacccctcctgggatcaccactgacagcatccatgaagttctgacagaagaacacaccaggatgacaaagtagtgacttttaaagagcagccaacaacaagcatatagggaatctctcagcaaatacagaatccatctgagaatatgctgccacaaataccctttttgctgctagtatccttgaacttggttcatggagtgttttacgctgaacgataccaaatgcccacaggcataaaaggcccactacccaacaccaagacacagttcttcattccctacaccataaagagtaaaggtatagcagtaagaggagagcaaggtactcctggtccaccaggccctgctggacctcgagggcacccaggtccttctggaccaccaggaaaaccaggctacggaagtcctggactccaaggagagccagggttgccaggaccaccgggaccatcagctgtagggaaaccaggtgtgccaggactcccaggaaaaccaggagagagaggaccatatggaccaaaaggagatgttggaccagctggcctaccaggaccccggggcccaccaggaccacctggaatccctggaccggctggaatttctgtgccaggaaaacctggacaacagggacccacaggagccccaggacccaggggctttcctggagaaaagggtgcaccaggagtccctggtatgaatggacagaaaggggaaatgggatatggtgctcctggtcgtccaggtgagaggggtcttccaggccctcagggtcccacaggaccatctggccctcctggagtgggaaaaagaggtgaaaatggggttccaggacagccaggcatcaaaggtgatagaggttttccgggagaaatgggaccaattggcccaccaggtccccaaggccctcctggggaacgagggccagaaggcattggaaagccaggagctgctggagccccaggccagccagggattccaggaacaaaaggtctccctggggctccaggaatagctgggcccccagggcctcctggctttgggaaaccaggcttgccaggcctgaagggagaaagaggacctgctggccttcctgggggtccaggtgccaaaggggaacaagggccagcaggtcttcctgggaagccaggtctgactggaccccctgggaatatgggaccccaaggaccaaaaggcatcccgggtagccatggtctcccaggccctaaaggtgagacagggccagctgggcctgcaggataccctggggctaagggtgaaaggggttcccctgggtcagatggaaaaccagggtacccaggaaaaccaggtctcgatggtcctaagggtaacccagggttaccaggtccaaaaggtgatcctggagttggaggacctcctggtctcccaggccctgtgggcccagcaggagcaaagggaatgcccggacacaatggagaggctggcccaagaggtgcccctggaataccaggtactagaggccctattgggccaccaggcattccaggattccctgggtctaaaggggatccaggaagtcccggtcctcctggcccagctggcatagcaactaagggcctcaatggacccaccgggccaccagggcctccaggtccaagaggccactctggagagcctggtcttccagggccccctgggcctccaggcccaccaggtcaagcagtcatgcctgagggttttataaaggcaggccaaaggcccagtctttctgggacccctcttgttagtgccaaccagggggtaacaggaatgcctgtgtctgcttttactgttattctctccaaagcttacccagcaataggaactccataccatttgataaaattttgtataacaggcaacagcattatgacccaaggactggaatctttacttgtcagataccaggaatatactatttttcataccacgtgcatgtgaaagggactcatgtttgggtaggcctgtataagaatggcacccctgtaatgtacacctatgatgaatacaccaaaggctacctggatcaggcttcagggagtgccatcatcgatctcacagaaaatgaccaggtgtggctccagcttcccaatgccgagtcaaatggcctatactcctctgagtatgtccactcctctttctcaggattcctagtggctccaatgtgagtacaccccacagagctaatctaaatcttgtgctagaaaaagcattctctaactctaccccaccctacaaaatgcatatggaggtaggctgaaaagaatgtaatttttattttctgaaatacagatttgagctatcagaccaacaaaccttccccctgaaaagtgagcagcaacgtaaaaacgtatgtgaagcctctcttgaatttctagttagcaatcttaaggctctttaaggttttctccaatattaaaaaatatcaccaaagaagtcctgctatgttaaaaacaaacaacaaaaaacaaacaacaaaaaaaaaaattaaaaaaaaaaacagaaatagagctctaagttatgtgaaatttgatttgagaaactcggcatttcctttttaaaaaagcctgtttctaactatgaatatgagaacttctaggaaacatccaggaggtatcatataactttgtagaacttaaatacttgaatattcaaatttaaaagacactgtatcccctaaaatatttctgatggtgcactactctgaggcctgtatggcccctttcatcaatatctattcaaatatacaggtgcatatatacttgttaaagctcttatataaaaaagccccaaaatattgaagttcatctgaaatgcaaggtgctttcatcaatgaaccttttcaaacttttctatgattgcagagaagctttttatatacccagcataacttggaaacaggtatctgacctattcttatttagttaacacaagtgtgattaatttgatttctttaattccttattgaatcttatgtgatatgattttctggatttacagaacattagcacatgtaccttgtgcctcccattcaagtgaagttataatttacactgagggtttcaaaattcgactagaagtggagatatattatttatttatgcactgtactgtatttttatattgctgtttaaaacttttaagctgtgcctcacttattaaagcacaaaatgttttacctactccttatttacgacacaataaaataacatcaatagatttttaggctgaattaatttgaaagcagcaatttgctgttctcaaccattctttcaaggcttttcattcgacacaataaaataacatcaatagannnnnnnn

SEQ ID NO: 10815 - DNA, 751 bp, Homo sapiens
cccagggcagtggtggatgctttatttccatgctgggtgcctgggaagtatgtagacggggtacgtgccaagcatcctcgtgcgaccgcgagagcccggggagcgggggcttgccggccgtcgcactcatttacccggggacagggagaggctcttctgcgtgtagtggttgtgcagagcctcatgcatcacggagcatgagaagacgttcccctgctgccacctgctcttgtccacggtgagcttgctatagaggaagaaggagccgtcggagtccagcacgggaggcgtggtcttgtagttgttctccggctgcccattgctctcccccatcccgggaggagatgaccaagaaccaggtcagcctgacctgcctggtcaaaggcttctatcccagcgacatcgccgtggagtgggagagcagtgggcagccggagaacaactacaagaccacgcctcccgtgctggactccgacggctccttcttcctctacagcaagctcaccgtggacaagagcaggtggcagcaggggaacgtcttctcatgctccgtgatgcatgaggctctgcacaaccactacacgcagaagagcctctccctgtctccgggtaaatgagtgcgacggccggcaagcccccgctccccgggctctcgcggtcgcacgaggatgcttggcacgtaccccctgtacatacttcccgggcgcccagcatggaaataaagcacccagcgctgccctgggcccctgcg

SEQ ID NO: 10816 - DNA, 2030 bp, Homo sapiens
  misc_feature 2024, 2025, 2026, 2027, 2028, 2029, 2030: n = A,T,C or G
gacccacgcgtccgaaattctaggctatatacaactacgcaaaggccccaacgttgtaggcccctacgggctactacaaccctgggctgacgccataaaactcttcaccaaagagcccctaaaacccgccacatctctgatagctgagcataagtaaagaaaggtggagtgccgatgcagaaaggaaaatattcagctttcctctcttagatcgcactttgaagatggccttttggagacaatctgacaggttaaaacaggaactgttggaattattctagctgtaactacctattggctatgtgttgattgatcctagaaagaaaaaataatttttcattttagatcttgattgaatttaagatgtatttatatgcctacaaaaggtctgtcttgtaactgttgtataaaataaacctaatctatggtttcatttttaatctaaaaaaagttgtgccttaacaatagggcattgtatgttaataagggaaaacaacctttttagtagatgggggaaaataggaactttttgccattaaaacttaagttcttttgatgtttttaatattatagttgggggagattcattaaaattaaattgaaataaaattatttttgcataacctagcatttacaactaaagtatgttttttataagaactggcatcttgatgtatataggtctgaaataatatttcatcttttgatttttaattttaataatattagaccaggatagatcacagttttacaaatcttagttttaaataaattatttcagtgtgctgttagtcctctacagtcattttggtttaaaaagtgactatttatttatggtagcatatcaataatttattaatgttaaaaaatactgtgtatgacattacaaaccagaacagttcctgggggagaggattctaattgattggcagttctgagagggcaagaagaatggaactttatacttcaaaaggaggttttggttttaccaggtactgcttatgtaaatcgtttatttttatttcatcaaagcctggcaagtatatgcattccaatttaccattggcaaagctttatttatttttaaggttggatgttgaattaattttgtgggaaaatgagatttgtaagtagttttctttctagataagataacataaaccaaactttcagaagttaaggatgatgaataatattgaaatgacttgttatatattgtaagggttcccttaagtatcataattaacaatttgtggaaattgaaaaagcataaactgtgttatttgattagtaatatgttcccttaaaattcattttgaggtgtatgttatacacacagtaaatttttgttcaggaatgacttgctcattctgtgtttttaaaaataggaaataaggcatagtgagtcatcattacatcaattaaccaaaaaatatttcatcccctccgtcactgaaattatctacttcagccacctttcttattctcgtgttaggagggcacgtttatggactttttaatttccatgtgccatattgtccactaccggcagtagccaaagctagctgtttcagtcccacagaagagacagtgctctgccatgatgacagggcactgctagggctggtttttcttgtttttcccttttggcagtgtggacttcaggaactagatgtatatgcacaagggattgagtttacactaaaactaggaaatggagttttcaatctatgttcttgcctcttcatacttttatttattttttgtcatcctgccttatactgggctaacaatgagataaaataaaaatacctttgaatactcttttccctttcatgcatttaaagccatggaggaactagaccattagctgttgccgtcacatgcttagacaccagttacttgcgtggtgagctctccccatatacaaattatgggcgctcccgggggagaaactcccccggtaggagtcctgccccccctggcccaacacccggggggggtgttccccccaccaccccaannnnnnn

SEQ ID NO: 10817 - DNA, 1307 bp, Homo sapiens
cgtccgctttgctggcacctgtgaataatgcattttctgatgatactctcagcatggatcagcgcctccttaaattaattctgcagaatcacatattgaaagtaaaagttggccttaatgagctttacaacgggcaaatactggaaaccatcggaggcaaacagctcagagtcttcgtatatcgtacagctgtctgcattgaaaattcatgcatggagaaagggagtaagcaagggagaaacggtgcgattcacatattccgcgagatcatcaagccagcagagaaatccctccatgaaaagttaaaacaagataagcgctttagcaccttcctcagcctacttgaagctgcagacttgaaagagctcctgacacaacctggagactggacattatttgtgccaaccaatgatgcttttaagggaatgactagtgaagaaaaagaaattctgatacgggacaaaaatgctcttcaaaacatcattctttatcacctgacaccaggagttttcattggaaaaggatttgaacctggtgttactaacattttaaagaccacacaaggaagcaaaatctttctgaaagaagtaaatgatacacttctggtgaatgaattgaaatcaaaagaatctgacatcatgacaacaaatggtgtaattcatgttgtagataaactcctctatccagcagacacacctgttggaaatgatcaactgctggaaatacttaataaattaatcaaatacatccaaattaagtttgttcgtggtagcaccttcaaagaaatccccgtgactgtctataagccaattattaaaaaatacaccaaaatcattgatggagtgcctgtggaaataactgaaaaagagacacgagaagaacgaatcattacaggtcctgaaataaaatacactaggatttctactggaggtggagaaacagaagaaactctgaagaaattgttacaagaagacacacccgtgaggaagttgcaagccaacaaaaaagttcaaggatctagaagacgattaagggaaggtcgttctcagtgaaaatccaaaaaccagaaaaaaatgtttatacaaccctaagtcaataacctgaccttagaaaattgtgagagccaagttgacttcaggaactgaaacatcagcacaaagaagcaatcatcaaataattctgaacacaaatttaatatttttttttctgaatgagaaacatgagggaaattgtggagttagcctcctgtggtaaaggaattgaagaaaatataacaccttacaccctttttcatcttgacattaaag

SEQ ID NO: 10818 - DNA, 1161 bp, Homo sapiens
  misc_feature 1, 2, 1156, 1157, 1158, 1159, 1160, 1161: n = A,T,C or G
nnagccaggttatagaatgggggaattgatctagtatcggtggttaaacaagcaggaagagcgcctggtccccagaaagaagaggggaaatccccatccgttttggcggctaatgaagggtccatttcttaaagatgtgtgagtgaataaaacactaggtgaattcgagaccgcttctttgttttttgtttcttgaatctgaatatacaagaacattcattatcaaatgttcatcatcaatactacaaagaacgagacacaagtcgcaagaaacaatggaaaatgttaataaagctgaaagaatcgttgagtatttttttgtttcttttaaagttttttttaaatttgagtttctgtagtttcatcttttttggtatcgaagtcaggtttttctgggcagaaaaacaaagagcaggaaagagagagacagagagaaagatgtgtgagaaaagacaaccagcaaataaagaatcaccaccatagcaaaataaaacataaattgaaagaaggtgccacttggcaaatgtactgcacgggcgtcaattccatgccagagggaggatgaattagggatgaaaaggaggagataaggaagagttacaaggtgggcaaacccagggtctagtatcgtttctcaggggaaattcgctgtcggggaaaatggagcactcccacatctattagaaaatgaagaaatcctggggtgcatcttgctctctgtaggactggcctcatgtgaattcccaggaagctgtgtttccagaggcatgctctttccaaacccatcctgctgctctcagtgttctcctgcttcgcctaatgtggacagatctcacggatgccacgttggaagtcggaagtgatagtgggcttgccgggggtgccgggggaggtgctgggtatagagaagactaagtgaaatgctggttggggaaaatgctgtgaaaggtgatcatcagtgaaaactacggcccggagagaaactgcctgtgcaaatgtagccctgttctgatcttttgcattaacttaacatggcaattattcaggccacatctggagtcactcttcttgtttccaagagaacccttttgtctctctttcgtactttgccctaagtcaagcaaatgtgattcaaccatgttcttgcgtgggtagnnnnnn

SEQ ID NO: 10819 - DNA, 4393 bp, Homo sapiens
  misc_feature 4393: n = A,T,C or G
ccacgagatcccggggagccagcttgctgggagagcgggacggtccggagcaagcccagaggcagaggaggcgacagagggaaaaagggccgagctagccgctccagtgctgtacaggagccgaagggacgcaccacgccagccccagcccggctccagcgacagccaacgcctcttgcagcgcggcggcttcgaagccgccgcccggagctgccctttcctcttcggtgaagtttttaaaagctgctaaagactcggaggaagcaaggaaagtgcctggtaggactgacggctgcctttgtcctcctcctctccaccccgcctccccccaccctgccttccccccctcccccgtcttctctcccgcagctgcctcagtcggctactctcagccaacccccctcaccacccttctccccacccgcccccccgcccccgtcggcccagcgctgccagcccgagtttgcagagaggtaactccctttggctgcgagcgggcgagctagctgcacattgcaaagaaggctcttaggagccaggcgactggggagcggcttcagcactgcagccacgacccgcctggttagaattccggcggagagaaccctctgttttcccccactctctctccacctcctcctgccttccccaccccgagtgcggagcagagatcaaaagatgaaaaggcagtcaggtcttcagtagccaaaaaacaaaacaaacaaaaacaaaaaagccgaaataaaagaaaaagataataactcagttcttatttgcacctacttcagtggacactgaatttggaaggtggaggattttgtttttttcttttaagatctgggcatcttttgaatctacccttcaagtattaagagacagactgtgagcctagcagggcagatcttgtccaccgtgtgtcttcttctgcacgagactttgaggctgtcagagcgctttttgcgtggttgctcccgcaagtttccttctctggagcttcccgcaggtgggcagctagctgcagcgactaccgcatcatcacagcctgttgaactcttctgagcaagagaaggggaggcggggtaagggaagtaggtggaagattcagccaagctcaaggatggaagtgcagttagggctgggaagggtctaccctcggccgccgtccaagacctaccgaggagctttccagaatctgttccagagcgtgcgcgaagtgatccagaacccgggccccaggcacccagaggccgcgagcgcagcacctcccggcgccagtttgctgctgctgcagcagcagcagcagcagcagcagcagcagcagcagcagcagcagcagcagcagcagcagcaagagactagccccaggcagcagcagcagcagcagggtgaggatggttctccccaagcccatcgtagaggccccacaggctacctggtcctggatgaggaacagcaaccttcacagccgcagtcggccctggagtgccaccccgagagaggttgcgtcccagagcctggagccgccgtggccgccagcaaggggctgccgcagcagctgccagcacctccggacgaggatgactcagctgccccatccacgttgtccctgctgggccccactttccccggcttaagcagctgctccgctgaccttaaagacatcctgagcgaggccagcaccatgcaactccttcagcaacagcagcaggaagcagtatccgaaggcagcagcagcgggagagcgagggaagcctcgggggctcccacttcctccaaggacaattacttagggggcacttcgaccatttctgacaacgccaaggagttgtgtaaggcagtgtcggtgtccatgggcctgggtgtggaggcgttggagcatctgagtccaggggaacagcttcggggggattgcatgtacgccccacttttgggagttccacccgctgtgcgtcccactccttgtgccccattggccgaatgcaaaggttctctgctagacgacagcgcaggcaagagcactgaagatactgctgagtattcccctttcaagggaggttacaccaaagggctagaaggcgagagcctaggctgctctggcagcgctgcagcagggagctccgggacacttgaactgccgtctaccctgtctctctacaagtccggagcactggacgaggcagctgcgtaccagagtcgcgactactacaactttccactggctctggccggaccgccgccccctccgccgcctccccatccccacgctcgcatcaagctggagaacccgctggactacggcagcgcctgggcggctgcggcggcgcagtgccgctatggggacctggcgagcctgcatggcgcgggtgcagcgggacccggttctgggtcaccctcagccgccgcttcctcatcctggcacactctcttcacagccgaagaaggccagttgtatggaccgtgtggtggtggtgggggtggtggcggcggcggcggcggcggcggcggcggcggcggcggcggcggcggcggcggcgaggcgggagctgtagccccctacggctacactcggccccctcaggggctggcgggccaggaaagcgacttcaccgcacctgatgtgtggtaccctggcggcatggtgagcagagtgccctatcccagtcccacttgtgtcaaaagcgaaatgggcccctggatggatagctactccggaccttacggggacatgcgtttggagactgccagggaccatgttttgcccattgactattactttccaccccagaagacctgcctgatctgtggagatgaagcttctgggtgtcactatggagctctcacatgtggaagctgcaaggtcttcttcaaaagagccgctgaagggaaacagaagtacctgtgcgccagcagaaatgattgcactattgataaattccgaaggaaaaattgtccatcttgtcgtcttcggaaatgttatgaagcagggatgactctgggagcccggaagctgaagaaacttggtaatctgaaactacaggaggaaggagaggcttccagcaccaccagccccactgaggagacaacccagaagctgacagtgtcacacattgaaggctatgaatgtcagcccatctttctgaatgtcctggaagccattgagccaggtgtagtgtgtgctggacacgacaacaaccagcccgactcctttgcagccttgctctctagcctcaatgaactgggagagagacagcttgtacacgtggtcaagtgggccaaggccttgcctggcttccgcaacttacacgtggacgaccagatggctgtcattcagtactcctggatggggctcatggtgtttgccatgggctggcgatccttcaccaatgtcaactccaggatgctctacttcgcccctgatctggttttcaatgagtaccgcatgcacaagtcccggatgtacagccagtgtgtccgaatgaggcacctctctcaagagtttggatggctccaaatcaccccccaggaattcctgtgcatgaaagcactgctactcttcagcattattccagtggatgggctgaaaaatcaaaaattctttgatgaacttcgaatgaactacatcaaggaactcgatcgtatcattgcatgcaaaagaaaaaatcccacatcctgctcaagacgcttctaccagctcaccaagctcctggactccgtgcagcctattgcgagagagctgcatcagttcacttttgacctgctaatcaagtcacacatggtgagcgtggactttccggaaatgatggcagagatcatctctgtgcaagtgcccaagatcctttctgggaaagtcaagcccatctatttccacacccagtgaagcattggaaaccctatttccccaccccagctcatgccccctttcagatgtcttctgcctgttataactctgcactactcctctgcagtgccttggggaatttcctctattgatgtacagtctgtcatgaacatgttcctgaattctatttgctgggctttttttttctctttctctcctttctttttcttcttccctccctatctaaccctcccatggcaccttcagactttgcttcccattgtggctcctatctgtgttttgaatggtgttgtatgcctttaaatctgtgatgatcctcatatggcccagtgtcaagttgtgcttgtttacagcactactctgtgccagccacacaaacgtttacttatcttatgccacgggaagtttagagagctaagattatctggggaaatcaaaacaaaaacaagcaaacaaaaaaaaaagcaaaaacaaaacaaaaaataagccaaaaaaccttgctagtgttttttcctcaaaaaaaaaaaaaaaaan

SEQ ID NO: 10820 - DNA, 1071 bp, Homo sapiens
  misc_feature 1, 2, 3, 1071: n = A,T,C or G
nnncgatccctgaatcatcgggatcaaatggcgggcccatcttccaaagtcctgggttcctataagaaagagctctgcagaaagatggaagtggcaaagattcccccaataagctttctcacatgggggataaaagtggctccagtcactccagcagcaacacgctctccagcaacacctccagcaacagtgacgacaagcacttggggtctggcgacctgatggaccccgaattactggggctgacctacatcaaagggggcctccaccgacagtggcttcgacacggccccctgcatgcctgccaccatcctcggccctgtgcacctggcaggcagcaggtccctgatccacagccgggccgagcagtgggctgatgctgccgacgtctctgggcctgacgacgagccagccaagttatattctgtgcatggctacgcgtccaccatctccgccggcagtgctgcggaaggcagcatgggcgatctcagtgagatatcctctcattccagtggttctcaccattcaggaagcccttcagctcactgttcaaaaagtagtgggtctctggattcatccaaagtctacatcgtgtctcacagcagcggacaacaggttcccgggtccatgtccaagccctaccacagacaaggggcagtgaacaaatatgtcatcggctggaagaaatcggagggcagcccaccgcccgaggagcctgaagtgactgaatgtcccgggatgtatagtgagatggatgtcatgtccacagcaactcagcatcagacagtggtgggagatgctgttgcagagactcaacatgttctgtctaaagaagattttctgaaattgatgcttcctgacagccccttagtggaggaggggcgaagaaagttttcgttctatgggaacctgtctccaaggaggtcgctttaccgcacgctgtctgaccagagcatctgcagcaacgggagggcggcctccttggagtccggatcacggtccacagccggccaagattggtagacaacacctacacaaaaacgcctcgcgccaccgcccgaatggctgccn

SEQ ID NO: 10821 - DNA, 811 bp, Homo sapiens
  misc_feature 682, 683, 755, 810, 811: n = A,T,C or G
ccacgcgtccggaaaaaactacaagagtcaagatttgacatcgtttttgcagatgctgtttttccctgtggaagacccactaccttatttgagacaatgggaaaagctgacatatggcttatgcgaaactcctggagttttcaatttcctcatccattcttaccaaacgttgattttgttggaggattccactgcaaacctgccaaacccctacctaaggaaatggaggagtttgtacagagctctggagaaaatggtgttgtggtgttttctctggggtcagtgataagtaacatgacagcagaaagggccaatgtaattgcaacagcccttgccaagatcccacaaaaggttctgtggagatttgacgggaataaaccagatgccttaggtctcaatactcggctgtacaagtggataccccagaatgaccttctaggtcatccaaaaaccagagcttttataactcatggtggagccaatggcatctatgaggcaatctaccatgggatccctatggtgggcattccattgtttttggatcaacctgataacattgctcacatgaaggccaagggagcagctgttagactggacttccacacaatgtcgagtacctgcccgggcggccgcgctacttacgcagctaactaggtggatgctgccccgggctgcgaggaannttcgattatcaaggcttattcggataccgtgcgaccttcgagggggggggcccggttagcccagctttttgnttcccttttagtggagggtttataattgcgcgctatggcggtaatacatggtcann

SEQ ID NO: 10822 - DNA, 955 bp, Homo sapiens
  misc_feature 829, 854, 883, 894, 900, 917, 918, 930, 932, 933, 938, 947,948, 954, 955: n = A,T,C or G
acgcggggagtcttcactgctctgcgtcctgtgctgataaaggctcgccgctgtgaccctgttacctgcaagaacttggaggttcacagctaagacgccaggaccccctggaagcctagaaatgggaccactgacatttagggatgtgaaaatagaattctctctagaggaatggcaatgcttggacactgcgcagcggaatttatatagagatgtgatgttagagaactacagaaacctggtcttccttggtattgctgtctctaagccagacctgatcacctggctggagcaaggaaaggagccctggaatctgaagagacatgagatggtagacaaaaccccagttatgtgttctcattttgcccaagatgtttggccagagcacagcataaaagatgctttccaaaaagtgatactgagaacatatggaaaatatggacatgagaatttacagctaagaaaagaccataaaagtgtggatgcatgtaaggtgtacaaaggacgttattatggacttaaccagtgtttgacaactactgacagtaagatatttcagtgtgataaatatgtgaaagtctttcataaatttccaaatgtaaatagaaataagatgggacatactggaaagaaacctttcaaatgtaaaaaccgaggcaaatcatttggcatgctttcacaagttactcaacataagaaaattcatactagagagtattcttacaatgtgaagatgtggtaaggctttactggtcctcaaccttactaacataagatattcatctggagaaaaccctacaatgtgaggatgtggaaagcttttaccggnctcaatcttactaacataaatatcnatctggggagaacccacaatgtgaggatntggaaagtttnacccgncccaaccttctaaatanngatcacaggggngnncctcnatggaggtnnggaggnn

SEQ ID NO: 10823 - DNA, 1154 bp, Homo sapiens
  misc_feature 1153, 1154: n = A,T,C or G
acccccagtgatgggacatggtcgcgctggcggtcggggcagggcaggaatcggcaccgatctggcggcggcggcttgggcgcctgcactgtgtgtccccgcgtacgcggggaattcagaaatcactacaagcagcattaagactgaagttggaatattctgttgaccataaaaccttgatatcattctgtgtatatagaatgtaaaaggaatattacagtgttaactgccatatatgtaatatacacaaactcaagttagcattgtaatggccaaatgcattcccccatgcttttctgttttcaaaaaaattgaaaaacaaatcaactcttatccccaacagctgcctaattttaggagtctgaccctccacatctcactggtgtgggtgcatggggctgtggagtgggtgtcagtatggatgtgtctgaatgtgtgaggccttggaagggactctttctgcagatactgtaaatacaagtaccattttaataaagcatgtacaataaaccaaaataagcttgagttggactttatatacagaactgtaagccagtgcattatgatacagttgtaagattgtgtatttgattcaagataaggaaaaatcttggaaatgaaaagcaggcactggttaaccaagttgtacacattgtaccacattcagcataactttaggaagaaattccactttgtggaacattctccagaaatccaagattattcaggtaagaattggtatattaaatgtacatctttttactttctattttgatgccaactgattatactagacaattagcactccaggtggttattgaacacaaaacagtaaagaatattgcactgattggatactaaattattattttattaggttggaaaaagccccttactaaaaagcctcatatatcaattacttatttcattatgactacctaagtccggcgggggccagtcactaacaggccgtttttaccggtccccgtaagactccgcttgaatactgcgaagcccaccgggggctttaggcccagctcagttttaaacacttctacaccgggtggaaaagtttccccttgacagggggggggaccgtcgtcacaccacagagtcctccgttttaacaccgagggagcacacacggcatgcnn

SEQ ID NO: 10824 - DNA, 1923 bp, Homo sapiens
  misc_feature 1, 2, 3, 4, 5, 6, 7, 8, 9, 10, 11, 12, 1922, 1923: n = A,T,C or G
nnnnnnnnnnnncggtacgtccggggagtgcgcacgcatacctgtacccacgtagtgcgcgcaggtcggtgcgtctgtcgggggcgcgctcgggtacctgtaccccacgtagtcgccggttaccgatcggactaagttccagtggtgatttacaagtcaagttaaaatgtccccagaagtggccttgaaccgaatatctccaatgctctcccctttcatatctagcgtggtccggaatggaaaagtgggactggatgctacaaactgtttgaggataactgacttaaaatctggctgcacatcattgactcctgggcccaactgtgaccgatttaaactgcacataccatatgctggagagacattaaagtgggatatcattttcaatgcccaatacccagaactgcctcccgattttatctttggagaagatgctgaattcctgccagacccctcagctttgcagaatcttgcctcctggaatccttcaaatcctgaatgtctcttacttgtggtgaaggaacttgtgcaacaatatcaccaattccaatgtagccgcctccgggagagctcccgcctcatgtttgaataccagacattactggaggagccacagtatggagagaacatggaaatttatgctgggaaaaaaaacaactggactggtgaattttcagctcgtttccttttgaagctgcccgtagatttcagcaatatccccacataccttctcaaggatgtaaatgaagaccctggagaagatgtggccctcctctctgttagttttgaggacactgaagccacccaggtgtaccccaagctgtacttgtcacctcgaattgagcatgcacttggaggctcctcagctcttcatatcccagcttttccaggaggaggatgtctcattgattacgttcctcaagtatgccacctgctcaccaacaaggtgcagtacgtgattcaagggtatcacaaaagaagagagtatattgctgcttttctcagtcactttggcacaggtgtcgtggaatatgatgcagaaggctttacaaaactcactctgctgctgatgtggaaagatttttgttttcttgtacacattgacctgcctctgtttttccctcgagaccagccaactctcacatttcagtccgtttatcactttaccaacagtggacagctttactcccaggcccaaaaaaattatccgtacagccccagatgggatggaaatgaaatggccaaaagagcaaaggcttatttcaaaacctttgtccctcagttccaggaggcagcatttgccaatggaaagctctaggaaacaccagtcttgagaggtggccagccagactgcctgtccacatgcgtgtcagcacatacagccgcttcctggaagccgcctggaatgtcttcacggcagcgttttgctcacacagcagcttttgcacgccccaggcagccccgactgctgaaatccaacttgagctggctggtggtccctggatcctagagcccttcacttcgggttactccctctttcttgcctctatttcttagttggaagaaataaactcacaaattatggtgcagtaattttccggggaaagtaaagcctcaggaatgcccacgcctttcttccaaagcctttgtctctgagacctcttaagttctaagattaaatgcccctcgctgttcttcctcgaaaaaaaagggcgggggttaaaactccagggggccgaaacacaaccaaagcatttcctatctggggcagtccttcacggcgagaaggagttacctgagtcaatgtgaccaacctgctgggtttcagccactcatccagcctgacctaaggctgtgctcaataacaaatggctctagcacaaaagacccaccggtgccatccataccctccagccccgtgnn

SEQ ID NO: 10825 - DNA, 334 bp, Homo sapiens
  misc_feature 1, 128, 129, 130, 131, 132, 133, 134, 135, 136, 137, 138,139, 140, 141, 142, 143, 144, 145, 146, 147, 148, 149, 150,151, 152, 153, 154, 155, 156, 157, 158, 159, 160, 161, 162,163, 164, 165, 166, 167, 168, 169, 170, 171, 172, 173: n = A,T,C or G
  misc_feature 174, 175, 176, 177, 178, 179, 180, 181, 182, 183, 184, 185,186, 187, 188, 189, 190, 191, 192, 193, 194, 195, 196, 197,198, 199, 200, 201, 202, 203, 204, 205, 206, 207, 208, 209,210, 211, 212, 213, 214, 215, 216, 217, 218, 219, 220: n = A,T,C or G
  misc_feature 221, 222, 223, 224, 225, 226: n = A,T,C or G
ngaatttgtgagacggaataaacaattttcaccccgaggagaacacgctattgacccatgatttatcgccacaggcgggccaatataccccctccatctaaaagggacacacacaagtctgggtgacnnnnnnnnnnnnnnnnnnnnnnnnnnnnnnnnnnnnnnnnnnnnnnnnnnnnnnnnnnnnnnnnnnnnnnnnnnnnnnnnnnnnnnnnnnnnnnnnnnnatggcttccatttgagccccctcgggaccccagcgctcctggcgcccttttttcatcgcttggcctatgacaggtccccgtgtgtaaatctttcccaataaagtgttg

SEQ ID NO: 10826 - DNA, 2437 bp, Homo sapiens
  misc_feature 2128: n = A,T,C or G
gccgcgcgcactcgcacccgctgcccccgaggccctcctgcactctccccggcgccgctctccggccctcgccctgtccgccgccaccgccgccgccgccagagtcgccatgcagatcccgcgcgccgctcttctcccgctgctgctgctgctgctggcggcgcccgcctcggcgcagctgtcccgggccggccgctcggcgcctttggccgccgggtgcccagaccgctgcgagccggcgcgctgcccgccgcagccggagcactgcgagggcggccgggcccgggacgcgtgcggctgctgcgaggtgtgcggcgcgcccgagggcgccgcgtgcggcctgcaggagggcccgtgcggcgaggggctgcagtgcgtggtgcccttcggggtgccagcctcggccacggtgcggcggcgcgcgcaggccggcctctgtgtgtgcgccagcagcgagccggtgtgcggcagcgacgccaacacctacgccaacctgtgccagctgcgcgccgccagccgccgctccgagaggctgcaccggccgccggtcatcgtcctgcagcgcggagcctgcggccaagggcaggaagatcccaacagtttgcgccataaatataactttatcgcggacgtggtggagaagatcgcccctgccgtggttcatatcgaattgtttcgcaagcttccgttttctaaacgagaggtgccggtggctagtgggtctgggtttattgtgtcggaagatggactgatcgtgacaaatgcccacgtggtgaccaacaagcaccgggtcaaagttgagctgaagaacggtgccacttacgaagccaaaatcaaggatgtggatgagaaagcagacatcgcactcatcaaaattgaccaccagggcaagctgcctgtcctgctgcttggccgctcctcagagctgcggccgggagagttcgtggtcgccatcggaagcccgttttcccttcaaaacacagtcaccaccgggatcgtgagcaccacccagcgaggcggcaaagagctggggctccgcaactcagacatggactacatccagaccgacgccatcatcaactatggaaactcgggaggcccgttagtaaacctggacggtgaagtgattggaattaacactttgaaagtgacagctggaatctcctttgcaatcccatctgataagattaaaaagttcctcacggagtcccatgaccgacaggccaaaggaaaagccatcaccaagaagaagtatattggtatccgaatgatgtcactcacgtccagcaaagccaaagagctgaaggaccggcaccgggacttcccagacgtgatctcaggagcgtatataattgaagtaattcctgataccccagcagaagctggtggtctcaaggaaaacgacgtcataatcagcatcaatggacagtccgtggtctccgccaatgatgtcagcgacgtcattaaaagggaaagcaccctgaacatggtggtccgcaggggtaatgaagatatcatgatcacagtgattcccgaagaaattgacccataggcagaggcatgagctggacttcatgtttccctcaaagactctcccgtggatgacggatgaggactctgggctgctggaataggacactcaagacttttgactgccattttgtttgttcagtggagactccctggccaacagaatccttcttgatagtttgcaggcaaaacaaatgtaatgttgcagatccgcaggcagaagctctgcccttctgtatcctatgtatgcagtgtgctttttcttgccagcttgggccattcttgcttagacagtcagcatttgtctcctcctttaactgagtcatcatcttagtccaactaatgcagtcgatacaatgcgtagatagaagaagccccacgggagccaggatgggactggtcgtgtttgtgcttttctccaagtcagcacccaaaggtcaatgcacagagaccccgggtgggtgagcgctggcttctcaaacggccgaagttgcctcttttaggaatctctttggaattgggagcacgatgactctgagtttgagctattaaagtacttcttacacattgaaaaaaaaaaaaaaaaaaaaaaaaaaangcatgcggccgcaattcgagctcacttggccaattcgccctaatagggagtcgtattacaattcactgggccggcggtttacaacgtcgtgactgggaaaaccctggcgttacccaacttaatcgccttgcagcacatccccctttcgccagctggcgtaataccgaagaggcccgaaccgatcccccttccaaacagttgccaacctgatgggcaaatggaaatgggaagcgtaaaattttggtaaaatccgcgtaaatttttgaaaaacaacttattttttaaccatgggccaaatcgggaaaatcc

SEQ ID NO: 10827 - DNA, 378 bp, Homo sapiens
  misc_feature 1, 63, 64, 78, 79: n = A,T,C or G
nctgggtatccgggccccccccctcgaggtcgcacggtatccgaataaggcttgatatcgaannttcctgcagcccgnngggggatccactaggtttctagaagcggccgtagggtacgcgggtctgcccccaggtatcggggtaaccccttgccatgaagcatcagcagctcaaaaggaaaatgcaggtgaagacccagggttagccagacaggcaccaaagccaaggaagcagagatccagccttctggaaaaaggcctagacggagcaaaaaaagctgtggggggactcggaaaactaggaaaagatgcagtcgaagatctagaaagcgtgggtaaaggagccgtccatgacgttaaagacgtccttgactcagt

SEQ ID NO: 10828 - DNA, 850 bp, Homo sapiens
acgcggggactcagaagcttggaccgcatcctagccgccgactcacacaaggcaggtgggtgaggaaatccagagttgccatggagaaaattccagtgtcagcattcttgctccttgtggccctctcctacactctggccagagataccacagtcaaacctggagccaaaaaggacacaaaggactctcgacccaaactgccccagaccctctccagaggttggggtgaccaactcatctggactcagacatatgaagaagctctatataaatccaagacaagcaacaaacccttgatgattattcatcacttggatgagtgcccacacagtcaagctttaaagaaagtgtttgctgaaaataaagaaatccagaaattggcagagcagtttgtcctcctcaatctggtttatgaaacaactgacaaacacctttctcctgatggccagtatgtccccaggattatgtttgttgacccatctccgacagttagagccgatatcactggaagatattcaaatcgtctctatgcttacgaacctgcagatacagctctgttgcttgacaacatgaagaaagctctcaagttgctgaagaccgaattgtaaagaaaaaaaatctccaagcccttctgtctgtcaggccttgagacttgaaaccagaagaagtgtgagaagactggctagtgtggaagcatagtgaacacactgattaggttatggtttaatgttacaacaactattttttaagaaaaacaagttttagaaatttggtttcaagtgtacatgtgtgaaaacaatattggatactaccatagtgagccatgattttctaaaaaaaaaaataaatg

SEQ ID NO: 10829 - DNA, 719 bp, Homo sapiens
  misc_feature 1, 691, 692, 693, 694, 695, 696, 697, 698, 699, 700, 701,702, 703, 704, 705, 706, 707, 708, 709, 710, 711, 712, 713,714, 715, 716, 717, 718, 719: n = A,T,C or G
natgattgcttgagtacagttccttggaaaggacacaaggggtttcataaagcggtactaaaaatctgcttttctccctagcatttaccaacaaccttgcgatccgatggcttgaaataatggtcagagtgcatgttacccaacttctcctgggctgctcctactctgtcacactgcacacagatcatgcccgccaccaccctacactccccgacctcacccaccagtcaggacagtttaaggtcctggctggacgcaccacggcgtgtgttcggctcgtggttgtacttttcatgagtagcagggaagatacactccaggaaggtgggatacaaattattgaactgtgtgacttaaaagctccagtgagtttcgtcggaagtataggagtttgaaagtgctccccagtcaaacccagaactacatagggtcagccgtggttgagctaatttctgcttacacatgtgtggagggtgtcattttctgactacgcctaggcctgagtggacagccgattaaaagatgtaaattcgtggattgtatcaaggagagcgggttccatctttgtggtcaggagggggcccactcttttgttccgcaaagggtttatctggatgttccttgctggaagttgcttttccagtttggatcaaaccacttaagtggagctccagcctcagtccttgcaatnnnnnnnnnnnnnnnnnnnnnnnnnnnnn

SEQ ID NO: 10830 - DNA, 2040 bp, Homo sapiens
  misc_feature 1, 2024, 2025, 2026, 2027, 2028, 2029, 2030, 2031, 2032,2033, 2034, 2035, 2036, 2037, 2038, 2039, 2040: n = A,T,C or G
nacggccagtgcaagctaaaattaaccctcactaaagggaataagcttgcggccgcctggagctctcggcctcggccttcgacgacggcaacttctcgctgctcatccgcgcggtggaggagacggacgcggggctgtacacctgcaacctgcaccatcactactgccacctctacgagagcctggccgtccgcctggaggtcaccgacggccccccggccacccccgcctactgggacggcgagaaggaggtgctggcggtggcgcgcggcgcacccgcgcttctgacctgcgtgaaccgcgggcacgtgtggaccgaccggcacgtggaggaggctcaacaggtggtgcactgggaccggcagccgcccggggtcccgcacgaccgcgcggaccgcctgctggacctctacgcgtcgggcgagcgccgcgcctacgggcccctttttctgcgcgaccgcgtggctgtgggcgcggatgcctttgagcgcggtgacttctcactgcgtatcgagccgctggaggtcgccgacgagggcacctactcctgccacctgcaccaccattactgtggcctgcacgaacgccgcgtcttccacctgacggtcgccgaaccccacgcggagccgcccccccggggctctccgggcaacggctccagccacagcggcgccccaggcccagaccccacactggcgcgcggccacaacgtcatcaatgtcatcgtccccgagagccgagcccacttcttccagcagctgggctacgtgctggccacgctgctgctcttcatcctgctactggtcactgtcctcctggccgcccgcaggcgccgcggaggctacgaatactcggaccagaagtcgggaaagtcaaaggggaaggatgttaacttggcggagttcgctgtggctgcaggggaccagatgctttacaggagtgaggacatccagctagattacaaaaacaacatcctgaaggagagggcggagctggcccacagccccctgcctgccaagtacatcgacctagacaaagggttccggaaggagaactgcaaatagggaggccctgggctcctggctgggccagcagctgcacctctcctgtctgtgctcctcggggcatctcctgatgctccggggctcaccccccttccagcggctggtcccgctttcctggaatttggcctgggcgtatgcagaggccgcctccacacccctcccccaggggcttggtggcagcatagcccccacccctgcggcctttgctcacgggtggccctgcccacccctggcacaaccaaaatcccactgatgcccatcatgccctcagacccttctgggctctgcccgctgggggcctgaagacattcctggaggacactcccatcagaacctggcagccccaaaactggggtcagcctcagggcaggagtcccactcctccagggctctgctcgtccggggctgggagatgttcctggaggaggacactcccatcagaacttggcagccttgaagttggggtcagcctcggcaggagtcccactcctcctggggtgctgcctgccaccaagagctcccccacctgtaccaccatgtgggactccaggcaccatctgttctccccagggacctgctgacttgaatgccagcccttgctcctctgtgttgctttgggccacctggggctgcaccccctgccctttctctgccccatccctaccctagccttgctctcagccaccttgatagtcactgggctccctgtgacttctgaccctgacacccctcccttggactctgcctgggctggagtctagggctggggctacatttggcttctgtactggctgaggacaggggagggagtgaagttggtttggggtggcctgtgttgccactctcagcaccccacatttgcatctgctggtggacctgccaccatcacaataaagtccccatctgatttttaaaaaaaaaaaaaagacaaataagtccacgcgcatgctgcaagcaacnnnnnnnnnnnnnnnnn

SEQ ID NO: 10831 - DNA, 1200 bp, Homo sapiens
gaacgctgacatcacagagatgcagaccatctccttcatcccggactttgccgtggccattcccacctttcgccagctggggaccgtccaacaggtcatctctgagagggtgacccagctcacccgcgaggagctgagcaggctgcagccggtgttgcagcctctaccaagccagccaccactaagcccatggttaagatgtcccgtgaagtccaggtgtttgagataacagagaacagcgccaaactccactgggagaggcctgagccccccggtccttatttttatgacctcaccgtcacctcagcccatgatcagtccctggttctgaagcagaacctcacggtcacggaccgcgtcattggaggcctgctcgctgggcagacataccatgtggctgtggtctgctacctgaggtctcaggtcagagccatctaccatggaagtttcagtacaaagaaatctcagcccccacctccacagccagcaaggtcagcttctagttcaaccatcaatctaatggtgagcacagaaccattggctctcactgaaacagatatatgcaagttgccgaaagacgaaggaacttgcagggatttcatattaaaatggtactatgatccaaacaccaaaagctgtgcaagattctggtatggaggttgtggtggaaacgaaaacaaatttggatcacagaaagaatgtgaaaaggtttgcgctcctgtgctcgccaaacccggagtcatcagtgtgatgggaacctaagcgtgggtggccaacatcatatacctcttgaagaagaaggagtcagccatcgccaacttgtctctgtagaagctccgggtgtagattcccttgcactgtatcatttcatgctttgatttacactcgaactcgggagggaacatcctgctgcatgacctatcagtatggtgctaatgtgtctgtggaccctcgctctctgtctccaggcagttctctcgaatactttgaatgttgtgtaacagttagccactgctggtgtttatgtgaacattcctatcaatccaaattccctctggagtttcatgttatgcctgttgcaggcaaatgtaaagtctagaaaataatgcaaatgtcacggctactctatatacttttgcttggttcattttttttcccttttagttaagcatgactttagatgggaagcctgtgtatcgt

SEQ ID NO: 10832 - DNA, 983 bp, Homo sapiens
cccacgcgtccgctttggaatccaccagctacatccagctccctgagagttgagaatggagagaatgttacctctcctggctctggggctcttggcggctgggttctgccctgctgtcctctgccaccctaacagcccacttgacgaggagaatctgacccaggagaaccaagaccgagggacacacgtggacctcggattagcctccgccaacgtggacttcgctttcagcctgtacaagcagttagtcctgaaggcccctgataagaatgtcatcttctccctgatcaagacaagatggaggaagtggaagccatgctgctcccagagaccctgaagcggtggagagactctctggagttcagagagataggtgagctctacctgccaaagttttccatctcgagggactataacctgaacgacatacttatccagctgggcattgaggaagccggcaccagcaaggctgacctgtcagggatcacaggggccaggaacctaacaatctcccaagtgggccataaggctgtgcttgatgtatttgaggagggcacataagcatgtgctgacacagcactgaaaatcaccctcctttctgcattagtggagacaaggaccattgtgcgtttcaacaggcccttcctgatgatcattgtccctacagacacccagaacatcttcttcatgagcaaagtcaccaatcccaagcaagcctagagcttgccatcaagcagtggggctctcagtaaggaacttggaatgcaagctggatgcctgggtctctgggcacagcctggcccctgtgcaccgagtggccatggcatgtgtggccctgtctgcttatccttggaaggtgacagcgattccctgtgtagctctcacatgcacaggggcccatggactcttcagtctggagggtcctgggcctcctgacagcaataaataatttcgttggacaaaaaaaaaaaaaaaaaaaagtg

SEQ ID NO: 10833 - DNA, 1870 bp, Homo sapiens
  misc_feature 1, 2, 3, 4, 5, 6, 1870: n = A,T,C or G
nnnnnnacgcgtccgccttcccgtatctttcatcaatcattgtacagtttgtttacacacgtgcaatttgtttgtgcttctaatatttataaaggaatcccacgcgtcagcccacgcgtccgaagaagcgactagggacccaagtttaaaaattcctccccccacccaatgcgagacgtggccagatcccatccaacacacggtttaattttcatggggctctgggatcaaaagaacagaaacagcaacaacaaaagcccagccgctgtctgattttaagctggcaaagtgggaaaaataaagtgttgagtaaacagaccaagttggaaacttttcagcattacctaagaagcaaaggctcaattttggctgcttcattcttatctcttctgccacagttctaacgtgcctgatctactgagaccaaggatgaccaatgactcagaagggaaaatgggatttaaacacccaaagatcatggggaatttcagaggtcatgccctccctggaaccttcttttttattattggtctttggtggtgtacaaagagtattctgaagtatatctgcaaaaagcaaaagcgaacctgctatcttggttccaaaacattattctatcgattggaaattttggagggaattacaatagttggcatggctttaactggcatggctggggagcagtttattcctggagggccccatctgatgttatatgactataaacaaggtcactggaatcaactcctgggctggcatcatttcaccatgtatttcttctttgggctgttgggtgtggcagatatcttatgtttcaccatcagttcacttcctgtgtccttaaccaagttaatgttgtcaaatgccttatttgtggaggcctttatcttctacaaccacactcatggccgggaaatgctggacatctttgtgcaccagctgctggttttggtcgtctttctgacaggcctcgttgccttcctagagttccttgttcggaacaatgtacttctggagctattgcggtcaagtctcattctgcttcaggggagctggttctttcagattggatttgtcctgtatccccccagtggaggtcctgcatgggatctgatggatcatgaaaatatttgtttctcaccatatgctttgttggcattatgcagtaaccatgtcatcgtggaatgaattatgctttcattacctggttggttaaatctagacttaagaggctctgctcctcagaagttggacttctgaaaaatgctgaacgagaacaagaatcagaagaagaaatgtgactttgatgagcttccagtttttctagataaaccttttcttttttacatgttcttggtttgtttctcgatctttgttggagaacagctggctaaggatgactctaagtgtactgttgcatttccaattggttaaagtatttgaatttaaatattttctttttagcttgaaaatatttgggtgatactgtcattttgcacatcatgcacatcatggtatgcaggggctagagtgatttttccagattatctaagctggatgccacctatgaaagaatattgtttcactcgcctgatagatatggtccaaggttaccagggtcggctactattggaattccctggagcccaggagtgatactgatgcactggagggtggaaggcgaataatgcatggatggagtgggggacagcggagagatcctacaagcaaagcgcggcaggccgagaatcaagaaagacgacaacaaacatgaggaagcgcctggggggattacaaggacccgagagcacagggacgcgggcggggcgaaataaaggcacattaaacgagggagagggacagacacgan

SEQ ID NO: 10834 - DNA, 1874 bp, Homo sapiens
agaaaactacgatagcccttatgaaacttaagggtcgaaggtggatttagcagtaaactaagagtagagtgcttagttgaacagggccctgaagcgcgtacacaccgcccgtcaccctcctcaagtatacttcaaaggacatttaactaaaacccctacgcatttatatagaggagacaagtcgtaacatggtaagtgtactggaaagtgcacttggacgaacaggctgagttttatgacgggcccggtgctgaagggcagggaacaacttgatggtgctactttgaactgcttttcttttctcctttttgcacaaagagtctcatgtctgatatttagacatgatgagctttgtgcaaaaggggagctggctacttctcgctctgcttcatcccactattattttggcacaacaggaagctgttgaaggaggatgttcccatcttggtcagtcctatgcggatagagatgtctggaagccagaaccatgccaaatatgtgtctgtgactcaggatccgttctctgcgatgacataatatgtgacgatcaagaattagactgccccaacccagaaattccattggaggtgaaaaagctggcggttttgccccgtattatggagatgaaccaatggatttcaaaatcaacaccgatgagattatgacttcactcaagtctgttaatggacaaatagaaagcctcattagtcctgatggttctcgtaaaaaccccgctagaaactgcagagacctgaaattctgccatcctgaactcaagagtggagaatactgggttgaccctaaccaaggatgcaaattggatgctatcaaggtattctgtaatatggaaactggggaaacatgcataagtgccaatcctttgaatgttccacggaaacactggtggacagattctagtgctgagaagaaacacgtttggtttggagagtccatggatggtggttttcagtttagctacggcaatcctgaacttcctgaagatgtccttgatgtgcagctggcattccttcgacttctctccagccgagcttcccagaacatcacatatcactgcaaaaatagcattgcatacatggatcaggccagtggaaatgtaaagaaggccctgaagctgatggggtcaaatgaaggtgaattcaaggctgaaggaaatagcaaattcacctacacagttctggaggatggttgcacgaaacacactggggaatggagcaaaacagtctttgaatatcgaacacgcaaggctgtgagactacctattgtagatattgcaccctatgacattggtggtcctgatcaagaatttggtgtggacgttggccctgtttgctttttataaaccaaactctatctgaaatcccaacaaaaaaaatttaactccatatgtgttcctcttgttctaatcttgtcaaccagtgcaagtgaccgacaaaattccagttatttatttccaaaatgtttggaaacagtataatttgacaaagaaaaatgatacttctctttttttgctgttccaccaaatacaattcaaatgctttttgttttatttttttaccaattccaatttcaaaatgtctcaatggtgctataataaataaacttcaacactctttatgataacaacactgtgttatattctttgaatcctagcccatctgcagagcaatgactgtgctcaccagtaaaagataacctttctttctgaaatagtcaaatacgaaattagaaaagccctccctattttaactacctcaactggtcagaaacacagactggcaataaactcctactaaatcccaaaaaaaaaaaaaaagaagattactatcaaagtaaaaaaatgctaaaatgctaac

SEQ ID NO: 10835 - DNA, 769 bp, Homo sapiens
  misc_feature 1, 2, 3: n = A,T,C or G
nnngtgctgagtgtgtttgtgtgtgtctctgtgtttctgtgtttgtgtgtttctgtctgtgtgtttgtgtttgtgtctggatgattgtgtgctggtgtgattgtgtctggtgtctgtgtctgtgtctttgcctgtctgtcctatgtttgtgtatgttctgaatgtgtgtgtatttgttgaatacattatttcaaagaaccacaaacacacagaatatatatttaaaaagtccatgtggggggaaatgatgccagaaactacagctcttctacttccagccctaaccgtctgggatgctagatggttgtgggcaaaccgtggaaaaagataagcttctgtttttcaagattttattttgttagagagtgcagaaaatctaagtgatgtctctgtttttgctttctagcaattaatatatgacagcagtctttgtgatttattttaactttctgcaagacctttggctcacagaactgcagggtatggtgagaaaccaactacggattgctgcaaaccacaccttctctttcttatgtctttttactacaaactacaagacaattgttgaaacctgctatacatgtttattttaataaattgatggcaaaaactgaagtttctctttgttctaccgtagaaaagaggcgttagagggcctcacatattttacatacacacacacacacacttacttattaaagaactcatggtcatgggttgaggactctgtgaagcatttgtttcctcagtctggcctctaagccttggt

SEQ ID NO: 10836 - DNA, 2952 bp, Homo sapiens
  misc_feature 1, 2949, 2950, 2951, 2952: n = A,T,C or G
ncctccgcgcggcgcgagcggctgactgcccgtagaggaaacgacattcggagctgcgctcccgcccacgccggccctgacgcgggcctcgtcagccagtaacagggagcagaggtgggagttagcgaggcgaccacgaaaacggtgaaggtcggaaccgacagcctcctccgagaagggcaggagctgggaggaggcggcagcggcggcggcagaaacagcagcggcggcggcggcggcagctgggaggaggtggtgacggtggcaacggcagcgtcggggacgatggcgcgactcgtggcagtgtgcagggacggggaggaggagttccccttcgagaggaggcagattcccctctacatagacgacaccctgacgatggtgatggaatttcctgataatgtgttaaatctcgatggacatcagaataatggtgcacagctaaagcagttcattcagcgacatggtatgcttaagcaacaggatctaagtattgccatggtggtgacatcacgcgaagtcctgagtgcactttctcagcttgtcccatgtgttggttgtcgtcgcagtgtggagcgtctcttttcccagcttgtagagtctggaaatcctgctcttgaacccctaacagtagggcccaagggagtcctgtctgtaactagaagctgcatgactgatgcaaagaagctttatacattattttatgtacatgggtccaaactaaatgacatgatagatgctattccaaaaagtaagaagaataagagatgtcagttgcactccttagatacgcacaagccaaaacctttgggaggttgttggatggatgtatgggaactaatgtcgcaggaatgcagggatgaagtagttttaattgactcgagttgtcttttagaaacactagaaacatatctgcgaaaacacaggttttgcactgattgcaaaaataaagtcctccgagcatacaatatccttattggtgaacttgactgcagcaaagaaaagggctactgtgctgcactttatgaaggcttgcggtgctgtccacatgaacgacacatacatgtttgctgtgaaacagacttcattgcacatcttttgggtcgtgctgagccagagttcgcaggagggcgaagagaaaggcatgcaaagacaatagatatagctcaagaagaagttctgacctgcttgggaattcatctttatgaaagactgcatcgaatctggcagaagctacgggcagaagagcagacatggcagatgcttttctatcttggtgttgatgctttacgcaagagttttgagatgaccgtggaaaaagtacagggtattagcagattggaacaactttgtgaggaattttcagaagaggaacgagtaagagaactcaagcaagaaaagaaacgccaaaaacggaagaatagacgaaaaaataagtgtgtgtgtgatattcctactcccttacaaacagcagatgaaaaggaagtaagccaagagaaggaaacagacttcatagaaaatagcagctgcaaagcctgtggcagcactgaagatggtaatacttgtgtagaagtaattgttaccaatgaaaatacatcatgtacctgtcctagcagtggcaatcttttggggtcccctaaaataaagaaaggcttatctccacactgtaatggtagtgattgtggatattcatctagcatggaagggagtgaaacaggttctcgggagggttcggatgttgcctgcactgaaggcatttgtaatcatgatgaacacggtgatgactcttgtgttcatcactgtgaagacaaagaggatgatggtgatagttgtgttgaatgttgggcaaattctgaagagaacgacacaaaaggaaaaaataaaaagaagaaaaagaaaagcaagatactgaaatgtgatgaacatatccagaagcttggaagctgtattacagatccaggtaatcgagagacctcaggaaataccatgcacacagtgtttcaccgtgacaagaccaaagatacacatcctgaaagctgttgcagctctgaaaagggtgggcagccattgccttggtttgagcataggaaaaatgtaccacagtttgcagaacctacagaaacgttgtttggtcccgattccggaaaaggtgccaagagcttagttgaactccttgatgagtctgaatgtacttcagatgaggaaatctttatctcacaagatgaaatacagtcatttatggctaataaccagtctttctacagcaatagagaacaataccgacagcatctgaaggagaaatttaataaatactgccggttaaatgatcacaagaggcccatttgtagtggctggttgacaacggctggagcaaattaaataaataaaatagctctgtctttcaatgaaacactcacgatgactactgcgccttctctttcgaaaaactcttaatttagtgacttatggcaaaattttatcttaaatcaatgtgattctttcttgttttgggagacggtggaggtatcctcattagttctttcttcaggcttgtgtctttagttgcgtggctgcgcaggcctgccatatgatttaagccatctcttttcattaaatgtttctcttcctgtgagacttactaaagcaacttagtggcaaaaagtaatgttgtacttataattctgtacagaaatgacaatgagctgaatatatggttttacaaagtagacatccacttgcaaaatgtttggatgtaatgttaaagcgcaatgtgcaaaatttaaaataaagaatatttattaatacgcacagtaaaaaaaaaaaaaaaaaaaaaaaaaaaaaaaaaaaaaaaaaaaaaaaaaaaaaaaaaactcaagggggggcccggtaccaaattcgccctatagggagtcgttttacatttcacttggccgtctttttacaacgtcnnnn

SEQ ID NO: 10837 - DNA, 2347 bp, Homo sapiens
  misc_feature 1, 2341, 2342, 2343, 2344, 2345, 2346, 2347: n = A,T,C or G
ncccgctgtacatcggcccagcaggccatatgaggggtcaggcctgcaggactcacacttggcacctgctccaaaaccctttcaggtctttgaggatctgagccctgggctgggtctcccgccggctcggaaaagctggcctgccgggcagacgagagaaccacacgattcagaaaagcagtgcccttcagcagcctctccaccgtctgggctccccaaaggcagagcgggacgctggaaatgtgtgcgcgctgtggtatgggtgtgcaagtgtgcgaaggcggcgtgttgtgtgagcgagagggtagcggatgtgtgtgtgcgtgtgcgcgcgtggctccgggtgtgcgccgctgcgatagcgggtcctttcccggggcgggcgacgggcgggctgggaaggtctcctcccctcaccacattgagaaatctcagtgagtcaccgagtggttctgcatattaatgagctcgctcgctgcgagggcaggagcggatttaaaagaggccagggcgggcggagggaggctgtggagagagcgcggagacaagcgcagagcgcagcgcacggccacagacagccctgggcatccaccgacggcgcagccggagccagcagagccggaaggcgcgccccgggcagagaaagccgagcagagctgggtggcgtctccgggccgccgctccgacgggccagcgccctccccatgtccctgctcccacgccgcgcccctccggtcagcatgaggctcctggcggccgcgctgctcctgctgctgctggcgctgtacaccgcgcgtgtggacgggtccaaatgcaagtgctcccggaagggacccaagatccgctacagcgacgtgaagaagctggaaatgaagccaaagtacccgcactgcgaggagaagatggttatcatcaccaccaagagcgtgtccaggtaccgaggtcaggagcactgcctgcaccccaagctgcagagcaccaagcgcttcatcaagtggtacaacgcctggaacgagaagcgcagggtctacgaagaatagggtgaaaaacctcagaagggaaaactccaaaccagttgggagacttgtgcaaaggactttgcagattaaaaaaaaaaaaaaaaaaagcctttctttctcacaggcataagacacaaattatatattgttatgaagcactttttaccaacggtcagtttttacattttatagctgcgtgcgaaaggcttccagatgggagacccatctctcttgtgctccagacttcatcacaggctgctttttatcaaaaaggggaaaactcatgcctttcctttttaaaaaatgcttttttgtatttgtccatacgtcactatacatctgagctttataagcgcccgggaggaacaatgagcttggtggacacatttcattgcagtgttgctccattcctagcttgggaagcttccgcttagaggtcctggcgcctcggcacagctgccacgggctctcctgggcttatggccggtcacagcctcagtgtgactccacagtggcccctgtagccgggcaagcaggagcaggtctctctgcatctgttctctgaggaactcaagtttggttgccagaaaaatgtgcttcattcccccctggttaatttttacacaccctaggaaacatttccaagatcctgtgatggcgagacaaatgatccttaaagaaggtgtggggtctttcccaacctgaggatttctgaaaggttcacaggttcaatatttaatgcttcagaagcatgtgaggttcccaacactgtcagcaaaaaccttaggagaaaacttaaaaatatatgaatacatgcgcaatacacagctacagacacacattctgttgacaagggaaaaccttcaaagcatgtttctttccctcaccacaacagaacatgcagtactaaagcaatatatttgtgattccccatgtaattcttcaatgttaaacagtgcagtcctctttcgaaagctaagatgaccatgcgccctttcctctgtacatatacccttaagaacgccccctccacacactgccccccagtatatgccgcattgtactgctgtgttatatgctatgtacatgtcagaaaccattagcattgcatgcaggtttcatattctttctaagatggaaagtaataaaatatatttgaaatgtaaaaaaaaaaaaaaaaaaaaaaaaaaaaagggcggccgctcgccggacgcgtgggtcgactccctacttacgcgcgctcactggccgtcgttttacaacgtcgtgactgggaaaaccctggcgttacccaacttaatcgccttgcagcacatcccccnnnnnnn

SEQ ID NO: 10838 - DNA, 1954 bp, Homo sapiens
cactttatcgtcgggaccagactcgtctcaggccagttgcagccttctcagccaaacgccgaccaaggaaaactcactaccatgagaattgcagtgatttgcttttgcctcctaggcatcacctgtgccataccagttaaacaggctgattctggaagttctgaggacccatctcagaagcagaatctcctagccccacagacccttccaagtaagtccaacgaaagccatgaccacatggatgatatggatgatgaagatgatgacgaccatgtggacagccaggactccattgactcgaacgactctgatgatgtagatgacactgatgattctcaccagtctgatgagtctcaccattctgatgaatctgatgaactggtcactgattttcccacggacctgccagcaaccgaagttttcactccagttgtccccacagtagacacatatgatggccgaggtgatagtgtggtttatggactgaggtcaaaatctaagaagtttcgcagacctgacatccagtaccctgatgctacagacgaggacatcatcctcacacatggaaagcgaggagttgaatggtgcatacaaggccatccccgttgccaggacctgaacgcgccttctgattgggacagccgtgggaaggacagttatgaaacgagtcagcctggatgaccagagtgctgcaacccacagccacaacgcagtccagattatataagcggaaaagcccatgcttgagagcatgagccttccgatgtgctcgatacgtccggcacctctccaaacgaccggcggtcaatccacaagccaagaattcaagccattaacaaaatgcgggttgaacccacaaggatggcacacgatacccccgaacttcgataccctaactaaaatgaaccgacggacacaagcggaaacacctcgtgtagtacacaactgtcacgtagaacgagctctctgcgcgagtatctagcaacgaatccgtgtcaccccagcgttctatatattttttattatctacctacgacagacccgcactcccactcccgcgtgctcgataaatcaagatactaacactcgatcgataactattaataaaccacacgatcaccacacacaacagtatctcaacacacacagctgccaaccctcaacctactacatacattactaatatacaccacacacaaactaaactgacctcgtatcatctaccaatcaacacacatcactaactctccatactaacaacaatcaaacacccactatcacgctcaatacattcaaacaacgaacaggataaactgaaaacatacatcaacaacacacaaacctcagcacacaaccgagaaacaagcaaggcaaccaccactaatcgcataacacacacacactacaatcacaatactcaccctctacatcataacatccctcaacagcataacacaaccaccaccagcccactcaacaacccgatcacaaactccacatcgacaccactgccacgcactagcgatatacgatatcatacaatataactcacctcacaactttatcaactatctaagcaccagtaacaacttcactatctattctattctatcaacgcatcgctattcagacacagagacgaattgctgacggtagagaggtgagcagagtcgcaagatgacgggtagagggctagatgcacgtagcgtgacaagagcagacgctggcaaacgtgagagagaccgcaagagcgagcaggcaaccgactgatgaagcgagacccagccacggcagacagaatcggataataggggaccaggcgcacgtgcacgatggtcgcagggaacgacacaactgaaagcagcgcgacagccacaagccgcgacgtaagcagccagacgagccgcaccgaaaggccatcaacagactacactctcaacaccgccacacctgc

SEQ ID NO: 10839 - DNA, 1012 bp, Homo sapiens
actttttattccactctcttcttgcttgcgtggtttctgaaaagacagctgcagtttgcatctttattcctctataagtaaggtttatttttccctcctctggtttctttcaaagatttatttttttatccttggtttcctgcagtttagatatgatatgccttagatgtggtttttttttttttttttttttggcttttatcctgtttgttgttctctgagcttcctgaatctgtggtttcgtgtcacatattaatttagaaaaatctcattcattattgctttgaatatttcttctattcctttctctctttcctctccttctggggttccactatgcatacttacatcttttatagttgtcccactgttcttggatattctgttccttttttattcagtctttttccctttgctttcatttttggaagtttctcttgaaatatactgaagctccagattctttcctcacccacatccagtctgctaatgaggcttcaacaccatgcttcatttttgttagtttcttgacttctagaatttttatttgattctttcttagactttccatttctctgcttatattactgatctgttcttgcaaattgtctattttttccattatcactcttaccatattagtcatagttgtttaaaattaccaatctgataattctaatatacctgccatatctgaatatagttctgtcagctagctctgtttcttgaaactttttgttgttttgggttttttgtttgcttgtttgttttagggtttctttttttcctcttacaatgtttttttaattttttgttagaaattagacatgatatactaggtaaaagggagtctgggctgggcacagtggcttccgctggtaattccagcaagttgagtggctgagatgggaggatggcttgaggataggagtttgagaacagcctgggcaacataacaagaccctgtctctacaaaaataaaaaaataaaaatattagccaggcatagtggt

SEQ ID NO: 10840 - DNA, 1261 bp, Homo sapiens
  misc_feature 1, 2, 3, 4, 5, 6, 7, 8, 9, 10, 11, 12, 13, 14, 15, 16, 17,18, 19, 20, 21, 22, 23, 24, 25, 26, 27, 28, 29, 1219, 1258,1259, 1260, 1261: n = A,T,C or G
nnnnnnnnnnnnnnnnnnnnnnnnnnnnnctcgtatcttataggccaggcgtggtggctcacgcctgtaatcccagcactttgggaggtcgagacaggcggatcacgaggtcaggaaatcgagaccatcctgaccaacatggtgaaaccccgtctctactaaaaatacaaaaaaattagccaggcgtggcggcagacacctgtagtcccagctacgcaactgtgccacctcagagaagtagatttttaaacaaacccaattttctcttgctgttaacaacactgaagactagtagcagaggagtgaaagtgtgggttaagagccttaaaaacttgtggaaaagggctcgatgccagtggagagcacttagttatttcagtgagaagagagcacctaaacctgggtctgaaaacacatgaaaactccaggccttgctcccggcccttctgcacattgggggcggggccagagctccactgatggccttgctcatgacttcatctagaaactgagcaacaggatttctagatttcaacgcccaaagcatccacccacccacagagaccatcacaccaacacaagcatgaatacaaagtgaaagcatgttcttggcatgaaaaccatctactcacaccccaccttgctcctaaagtagcagaacctgttccaccagccaggggtttatactccctatcttaatgggattaatggttttcatggggccataatagactccaatttaagagattttcaagaattgccatagaatgttttgtggtggttaaaaaggtcttcctcaaactgttagaaaaagcaaaattgttagtataggtttactttaaccaggctcttttaaagataaatgctgcaagataggttttcagagctcagattaattaaatgagagttaagatcggagtctcaataaacactaatgtgctgttctcatcagattctgacatcctctgtactttcttcttgacttaacaggggtctcctctcaaccttttccaaagcaatgtgacggtttcttttccaaaaggtaaaaaaaaaacccaaacccccaaaccttcccccattttgaatgattcctggggggaattcatttgttttttgcaatcagagtctgaaacctgggctgcaggtcaacaatctcgagcagttatgaaaagaccagggttactggagaccaagaaaggaacgagcggaggaaggaagnaaggaaggaaggagaggggccggggattttgtgcaagannnn

SEQ ID NO: 10841 - DNA, 1183 bp, Homo sapiens
gagtcgacccacgcgtccgggctgaccagcctcgctcagcaccttctctcagacccaaggactatgaagttgatgctactctgaagtctccaggtgtaagcggtggtggttatgactttggttacgatggagacttctacagggctgaccagcctcgctcagcaccttctctcaaacccaaagactatgaagttgatgctactctgaagtctctcaacaaccagattgagacccttcttactcctgaaggctctagaaagaacccagctcgcacatgccgtgacttgagactcagccacccagagtggagcagtggttactactggattgaccctaaccaaggatgcactatggatgctatcaaagtatactgtgatttctctactggcgaaacctgtatccgggcccaacctgaaaacatcccagccaagaactggtataggagctccaaggacaagaaacacgtctggctaggagaaactatcaatgctggcagccagtttgaatataatgtagaaggagtgacttccaaggaaatggctacccaacttgccttcatgcgcctgctggccaactatgcctctcagaacatcacttacactgttcttgtagatggctgctctaaaaagacaagtgaatggggaaagacaatcattgaatacaaaacaaataagccatcacgcctgcccttccttgatattgcacctttggacatcggtggtgctgaccaggaattctttgtggacattggcccagtctgtttcaaataaatgaactcaatctaaattaaaaaagaaagaaatttgaaaaaactttctctttgccatttcttcttcttcttttttaactgaaagctgaatccttccatttcttctgcacatctacttgcttaaattgtgggcaaaagagaaaaagaaggattgatcagagcattgtgcaatacagtttcattaactccttccctcgctcccccaaaaatttgaatttttttttcaacactcttacacctgttatggaaaatgtcaacctttgtaggaaaaccaaaataaaaattgaaaaataaaaaccataaacatttgcaccacttgtggcttttgaatatcttccacagagggaagtttaaaacccaaacttccaaaggtttaaactacctcaaaacactttcccatgagtgtgatccaca

SEQ ID NO: 10842 - DNA, 286 bp, Homo sapiens
  misc_feature 1: n = A,T,C or G
nggagctccattgcggaggcggccgcccgggcaggtacgcgggcactgcgggggggtggtgtggtccaaaggacaggctggatggcgggtgcatcggcgtgggcgtggtcagcatgtgtctgcaatgcctgtgggctctactacaagcttcacaatattaacagacccctgactatgaagaaggaaggcatccagaccagaaaccgaaaaatgtctagcaaatccaaaaagtgcaaaaaagtgcatgactcactggaggacttccccaagaacagctcgtttaacc

SEQ ID NO: 10843 - DNA, 2952 bp, Homo sapiens
  misc_feature 2950, 2951, 2952: n = A,T,C or G
acgcggggataagcacatgagttgtaagaggttgaacttgagagaccagatcaggcatatgccgtaataccttcacatgatcctccccgaggccctgtatttaattaaaatagagagggaggcaccacagatgccagaagaacactgttgctcttggtggacgggcccagaggaattcagagttaaaccttgagtgcctgcgtccgtgagaattcagcatggaatgtctctactatttcctgggatttctgctcctggctgcaagattgccacttgatgccgccaaacgatttcatgatgtgctgggcaatgaaagaccttctgcttacatgagggagcacaatcaattaaatggctggtcttctgatgaaaatgactggaatgaaaaactctacccagtgtggaagcggggagacatgaggtggaaaaactcctggaagggaggccgtgtgcaggcggtcctgaccagtgactcaccagccctcgtgggctcaaatataacatttgcggtgaacctgatattccctagatgccaaaaggaagatgccaatggcaacatagtctatgagaagaactgcagaaatgaggctggtttatctgctgatccgtatgtttacaactggacagcatggtcagaggacagtgacggggaaaatggcaccggccaaagccatcataacgtcttccctgatgggaaaccttttcctcaccaccccggatggagaagatggaatttcatctacgtcttccacacacttggtcagtatttccagaaattgggacgatgttcagtgagagtttctgtgaacacagccaatgtgacacttgggcctcaactcatggaagtgactgtctacagaagacatggacgggcatatgttcccatcgcacaagtgaaagatgtgtacgtggtaacagatcagattcctgtgtttgtgactatgttccagaagaacgatcgaaattcatccgacgaaaccttcctcaaagatctccccattatgtttgatgtcctgattcatgatcctagccacttcctcaattattctaccattaactacaagtggagcttcggggataatactggcctgtttgtttccaccaatcatactgtgaatcacacgtatgtgctcaatggaaccttcagccttaacctcactgtgaaagctgcagcaccaggaccttgtccgccaccgccaccaccacccagaccttcaaaacccaccccttctttaggacctgctggtgacaaccccctggagctgagtaggattcctgatgaaaactgccagattaacagatatggccactttcaagccaccatcacaattgtagagggaatcttagaggttaacatcatccagatgacagacgtcctgatgccggtgccatggcctgaaagctccctaatagactttgtcgtgacctgccaagggagcattcccacggaggtctgtaccatcatttctgaccccacctgcgagatcacccagaacacagtctgcagccctgtggatgtggatgagatgtgtctgctgactgtgagacgaaccttcaatgggtctgggacgtactgtgtgaacctcaccctgggggatgacacaagcctggctctcacgagcaccctgatttctgttcctgacagagacccagcctcgcctttaaggatggcaaacagtgccctgatctccgttggctgcttggccatatttgtcactgtgatctccctcttggtgtacaaaaaacacaaggaatacaacccaatagaaaatagtcctgggaatgtggtcagaagcaaaggcctgagtgtctttctcaaccgtgcaaaagccgtgttcttcccgggaaaccaggaaaaggatccgctactcaaaaaccaagaatttaaaggagtttcttaaatttcgaccttgtttctgaagctcacttttcagtgccattgatgtgagatgtgctggagtggctattaacctttttttcctaaagattattgttaaatagatattgtggtttggggaagttgaattttttataggttaaatgtcattttagagatggggagagggattatactgcaggcagcttcagccatgttgtgaaactgataaaagcaacttagcaaggcttcttttcattattttttatgtttcacttataaagtcttaggtaactagtaggatagaaacactgtgtcccgagagtaaggagagaagctactattgattagagcctaacccaggttaactgcaagaagaggcgggatactttcagctttccatgtaactgtatgcataaagccaatgtagtccagtttctaagatcatgttccaagctaactgaatcccacttcaatacacactcatgaactcctgatggaacaataacaggcccaagcctgtggtatgatgtgcacacttgctagactcagaaaaaatactactctcataaatgggtgggagtattttggtgacaacctactttgcttggctgagtgaaggaatgatattcatatattcatttattccatggacatttagttagtgctttttatataccaggcatgatgctgagtgacactcttgtgtatatttccaaatttttgtacagtcgctgcacatatttgaaatcatatattaagactttccaaagatgaggtccctggtttttcatggcaacttgatcagtaaggatttcacctctgtttgtaactaaaaccatctactatatgttagacatgacattctttttctctccttcctgaaaaataaagtgtgggaagagacaaaaaaaaaaaaaaaaaaaaccaaaagaaaagaagggggcggaaaaaccaggggcacgagggcccccttttgaaaggcccagggcttaaaacagcgggtacaacggggaacagacggccgagaccctcgggatcgaacaaaaacagatacgtgtacgcgcctgctannn

SEQ ID NO: 10844 - DNA, 2003 bp, Homo sapiens
  misc_feature 1, 2, 3, 2001, 2002, 2003: n = A,T,C or G
nnncatacgtcgagcacttcccggccatatcggtggttatcaccttaccctgaagtgttgttcctcgcgttatatctctgtgggtgtgtcccgtatgcccccccggtagtgtttctttcccagttccccgctgccgctgttcccactgccgcctgtttactccgccccgtctcttcttttattatgcgcccccttatgtgccccctttgtcccagaagagctgtgtcgcgcgctacttgggggccccctggggatttttttcccccccccccctttttttttttttttttttttttttttttttttgattatgaagacttttattaaattacagtgtattacagattatatcataataataagcctttcatctttaggctaatatgatacaaaaacctacttggccacattacttcttgagtttcttttgggcagctttcttcttgaccatctgtaatcgcttcatagcattgagctgtgattcttgtgaagttgggcctttaagggatgctgagggagagctgctggattctgaagtagttttgctggtagtacttccactaggtcctgatgttccactatttccattcccacttagttggctgctgcttcctggaactaaactacttggactaggaagacctactttgctgacattgtcacaactaactgagcgactaaggccagttttacccaaggttagaggtggaggtggttttaaaggtacagtgggcgtagtgctgttattggaacctattttggaacctattccacctttggatgatgttgccagaccagtcaaacccacaggtttctggttagctgacgaagtagcaggtttcccagtattgttttgtgttgttgaactcaattttgctgttgaaggaccagcagaggaagttttggctgcaaaagctgcccatccagttaagccactagttactgacgaggaaacgctggcactagaagaatttcctgaaataactgtggatgtcttgacttctgttctcttaaacgctagaaaagttgtctcttgtttcagtttagtttctggtttcttaaccaatggatctttgacagctggagttacagaaacaactgcaggggctggtttctgcggtggtttctgagttttttgagccattcttttcatttgtctggtacatcgggcacaataccacaccaggcgagggtcattcgcttccttgtctgtcacctggggtttatgacaatctcggtggtagagattatggcactcctgacattctactaattgattgccagatgccaccatcatttgcctacaaacaacgcaggccaatcccatctccatggcaaaatcatcagcactggtctcctcaaaactggaaaggtcagccataggtaaatccttgctactttggacagtaatgggagatgactgtgtttctggtttctccaatctaggtttctttggaatatcaactccttcagtgatgtctgatttcattttatcagcaggtctcttttcagcttccttctttaccttttcagttgtgaggaccttgccattattattaccagaaggaagactggatgatattttgggctcttgcttaatggaaatgttttttgtgcttgaaattttgggtggctccacatccttttgagatggacggtaactggaatcaatgccccgagccaaagattcatcaagcagtgcttttagcttttcagcagaatctttactctttgaatgcaagaaacctagtgctttcaaaaaaatgggatcaagttccaagttcacagtagcagccattgcaaacgcattctatcttcagaatcaccattctcagcttggcgttcagtacaacttggcaattctctcatccttctctggtcaactcacttccccactttctgcaaagatcagttatacttcctccattttcttttaaaattgcttctgtgtttcagtagatggcctcaccgttccgccccgcaaggacgcgtgggtcgacnnn

SEQ ID NO: 10845 - DNA, 962 bp, Homo sapiens
  misc_feature 284, 285, 286, 287, 288, 289, 290, 291, 292, 293, 294, 295,296, 297, 298, 299, 300, 301, 302, 303, 304, 305, 306, 307,308, 309, 310, 311, 312, 313, 314, 315, 316, 317, 318, 319,320, 321, 322, 323, 324, 325, 326, 327, 328, 329, 330: n = A,T,C or G
  misc_feature 331, 332, 333, 334, 335, 336, 337, 338, 339, 340, 341, 342,343, 344, 345, 346: n = A,T,C or G
acgcgggggagctacaacaggcaggcaggggcagcaagatggtgttgcagacccaggtcttcatttctctgttgctctggatctctggtgcctacggggacatcgtgatgacccagtctccagactccctggctgtgtctctgggcgagagggccaccatcaactgcaagtccagccagagtgtttcacacaggtccaacaataagaactacttagcttggtatcaacagaaaccaggacagcctcctaagctgctcatttactgggcatctacccgggaaagnnnnnnnnnnnnnnnnnnnnnnnnnnnnnnnnnnnnnnnnnnnnnnnnnnnnnnnnnnnnnnntgtgcaacctgaagattttgcaacttacttctgtcaacatagttatagcactccccggacgttcggccaagggaccaaggtggaaatcaaacgaactgtggctgcaccatctgtcttcatcttcccgccatctgatgagcagttgaaatctggaactgcctctgttgtgtgcctgctgaataacttctatcccagagaggccaaagtacagtgcaaggtgaataacgccctccaatcgggtaactcacaggagagtgtcacagagcaggccagcaagggcagcacttacagcctcatcagctccctgacagtgagcaaagcagactacgacaaacacaaagtttacgcctgagaagtcacccatcagggcatgagctcgcccgtcacaaagagcttcaacaggggagagtgttagagggagaagtgcccccacctgctcctcagttccagcctgaccccctcccatcctttggcctctgaccctttttccacaggggacctacccctattgcggtcctccagctcatctttcacctcacccccctcctcctccttggctttaattatgctaatgttggaggagaatgaataaataaagtgaatctttgcacctgtg

SEQ ID NO: 10846 - DNA, 463 bp, Homo sapiens
  misc_feature 1, 2, 3, 4, 5: n = A,T,C or G
nnnnntgagtcggagtctcactctgtcgcccaggctggagtgcagtggcacgatcttggctcactgcaacctccgcctcctgggttcaagtgattctctgcctcagcctcccaagtagctgggactacaggcaagcgccaccacgcccagctaatttctgtgtttttagtagagacagggtttcactatgttggccaggatggtctcgatctcttggcctcgtgatccacccgcctcagcctcccaaagtgctgggattacaggcatgagctaccacgcccggcctaatttttaactctttattccgtgtctttaaaacatccattcatctaatttttaactgtttattctgtgtctctaaaggattcattcattcacctaatttttcacgataccgttctcagtcctggttatagacaaggcagttattggaaagcacactatggcaggatttatggagtgt

SEQ ID NO: 10847 - DNA, 2684 bp, Homo sapiens
  misc_feature 2683, 2684: n = A,T,C or G
gcgtccgatcgctttaaaaagccgggctctaaaacttccagaatatctttccaccatcagccactctgcgtctttccaacattcccccttctgttacagtggatgatctgaagaaccttttcatagaagctggatgttcagtgaaggcttttaaattctttcagaaagatcgcaaaatggcgctcattcaattgggatctgtggaagaagcaattcaggccctcattgagcttcataaccatgaccttggagaaaatcaccacctcagagtttccttctcaaaatctacaatctgacttttctgtgaatttttctcctaaaactggaccataatttcagtaaaaccttcagacatagactgaagcagctcaagaccaattttgcctctttcacaaaaataactctttctgagtttgatattcaagtatattttaaaaatcaagggattttttttttttgtattccccctgcccccgccagtcaaaggtttcttttccctttttaccatggtttctacaaaaataaccttcaggaaaaagaaaatcaggaaaaaaattttttttcaataatcttattccctatattaaattagatttgaagaggattaacgttgttttagtttgggtccagatcagccttatacaacatttctaaactcatttgtacttttaaaaaatttaaacacagacttctaaaattacttgatgtaagtaatttaaatcacttatgaccaagttattaaccttatgaatcagaagtctgacccttgtaggaaattatattcacatataaagtacatcagatctttgccatatattgatggttattatgcataaacacattgagttgtgttggaagcagatttataaacctgcatgttttctttgaatgatttctttttttcactgtaagacactcctttaaataatgcctatctttaactttttaagactatttggaaaaatgcagtgtctcagctgtccccagggaaattaagtggaattcaactaagatctgttaataagatgtcagaataactaataattttattaggaaaaaatcatgttttaaatttcaaaatgacacttatttgtcaagtaatatgatcttggaaaattttaaagaaaaataatcctacttataaactacttttttataattgttttcagaaaaaaagtttacagtcttaaggaaaatattcaggtctatcatatggtttgacagattttttaaaagttatttttggtaaggtcttcttttagaaaaaaattaatctcaagggttttttgtaccactataatctctaatacttactcagaattactgtgtatttacttaatttcttattatgtgccttattatgtgcttaagatacaataggttagagtttaatctaaatatcttgaaagctatattgtgggcttggtaagcattttgttttttctttctctgttttggtaaggatttaaaatttttttcattgcaattttaagtggttttcaataagtaatagtttttatcaaatttttggtgcttggtgcagagacggtgtggggaagggtgaatggttttgggaataattcagtgcacacctgtaggcctctttacattgtgactgataggggttattgcatatcaatttggggctgtagagtgcaatctcagtttcatctttttcacccatcagaatttgtctcaggattacttggtttttctcagtcctcaagcgagaacttgcttttctttgttaatgtgactttcattactgagtacccacgtatttggagtatgagaaggtgggttatttctcatactctgtccctctctttttcattgaatgtaagagtacattttaatgttgcttcagtgattgtataatgtaaaattgtttctttttaataagaaactttgctattatttcttcaattgttgatcagaattttttaaagcagaatttgtcaaaagggtcatttttttgtctaccccttttacacttttcagattctcaaagtgtctcatctcaacttttaaaagaataaagaatatcttgctgggcatggtggtgtgcgcctgtgcgcctgtagtcccagctacaggctgagcctgtaggcaggaggctacaggcaggaggatcacttgagcccaggagttcaaggctgcagtgcgctatgatcacatttgtgaatagccacttcactccagccctggaacatagtgtgaccccttctcttaaaagtaaaaattaagaaaatctcaatctctttgctgtattccagtgattaatttgaacatagggaggtttttacagaagaaattttaccaaaaaatagagactgcagagatgatacgattgtttaaaaagcagaattcactcaccatgagcacacttagttggtcaatacaacggcgggctcctacgttcagactttccaatggttcgtggtgatgattgattttctgttgtagtggggaagtaaaggtccggcttcctatgacctgctttgccaaaccaggggttgcggggggcacttcttggcacttccaatgttttttcctcccgggcattatttcggcgggcgggttcttctgcgagacggccacaggccgaccctgacagcagggcaccgggtgcaggtcctcccccccgggtgcgctctccccttcccttctgttactttaccann

SEQ ID NO: 10848 - DNA, 809 bp, Homo sapiens
  misc_feature 1, 2, 3, 4, 5, 6, 7, 8, 132, 135, 136, 137, 139, 140, 152,153, 154, 230, 676: n = A,T,C or G
nnnnnnnnccatttacctcattaaggaccaaaattgggccgggccccccctcagggcgcggtatcgaaagcttatatgaattcctccagccgggggatccactatttataaacggcgcccggcaaggaaccnttnnntnntttttttttttnnntaataaggttgaatgcagggtttattgagtggtgagggtggtcctctgaagaatggatccagagctgaaagcgggnaatggcacgggaggattattcttcttgctgggggggccaaacctttccgaccaccctcggttgaactcctctcggcgttcaaatgttcctcttctctctttctccgctgtatcgtttcaccattcatctgcttgtctggggtggtgaagacaactgtttgctcatttgcttggcgataggtgattgtctcgccgctcagctataggcgatggtctcaccactcggtgataggcgattgtcccatctaggtcgccaaaatgtgtctggaattggtgggttcttggtctcactgacttcaagaatgaagccgcggaccctcgcagtgagtgttacagctcttaaggtggcgcgtctggagtctgtcccttctgatgttcagatgtgttcggagtttcttccttctggtgggctcgtggtgtcgctggcttcaggaagcgaagctgcangatcttcacggtgagtgttacagctcttaaaagcagcgtggacccaaagagtgagcagtagcaagatttacctttcccagcttccaggatgtcctgacatcttagctgtgcgtctctccggacctccccgcgt

SEQ ID NO: 10849 - DNA, 1318 bp, Homo sapiens
  misc_feature 1, 2, 1318: n = A,T,C or G
nngacttttaataaaaaaaaatttgatcacatttgtaatagttatattactaataaaacaatgacagaatgctacttaattcatagtcctatctctatttattattcattcaagaaaaacttcctgattatttttcacttggtaaattagcatcttgttatttttattttttatttttgagacagagtctcactctgtcacccaagctggagtggaatggtgtgatctcacactgcaacttccgcctcccgggttcaagcggttctcctgcctcagcctcccgagtagctaggattgcaggagcctaccaccatgcccagctaatttttgtaatttcagtagagacagggtctcatcatgttggtcaggctggtctcgaacttctgacctcaggtgatccgcccgccttggcctcccaaagtgctggaattacagacgtgagccaccacgcctggccagcaaacacaccaggggtactccatgctgttgaagtgcccatcacacgggcatgctcatacactgcgggtgttaagtgtaactggtgtagcttttctggaaagttatttggttatatgcactgagatacttgaatatgttcactcctgctgtgacacatgaattttatttcatggaatccatatgtactcagggataataaaaatgcaaacaaagttttatgcacataatacccatcacagggttacttataacagcaagaattaggagaccaaaaaaaaggtagacaatataagaggaatggttgggtaagtcataatatggccatacaatggattttatgaagccattaataaggaagattttaatgtaatagaaaatacatgagataaattaagtaaaaaaagcgtgacacaaaattgcacgtaaaacctcacccatcttaaaaggatgcttaatgatacttttcactttatgctttcataatatctaaatgatctacaattaacctacatttattctctaatgagtcaaaaaggcttttttttttttttttttttgagacagagtcttgctctgtcatccaggctggagtgcagtggcgcgatctcggctcactgcaagctcagcctcccgggttcacgccattctcctacttcaacctcccaagtagctgggactacaggcgcaggccaacaggcccggctaattttttttgtattttttttttagtagagatagggtttcaccatgctagccaggacggtctcgatctcccgacctcgtgatccgcccgcctcggcctcccaaagtgctgggaccacaggtgtgagccaccacgcctggcctaaaaagtcggacn

SEQ ID NO: 10850 - DNA, 915 bp, Homo sapiens
  misc_feature 1, 2, 3, 4, 5, 6, 7, 8, 9, 10, 11, 12, 13, 14, 15, 16, 866,891, 914, 915: n = A,T,C or G
nnnnnnnnnnnnnnnncgcttcatcccttctctgtctgttgttcccgtcccgctgttctttggcgtctgtctgtttcgttctgcccttatgactgtgccgtgggagttgtctcgtgggtacttctgctgtagccgcgatccttgttggaccctgacgaggtgggggttgccgtcgtgatgtcgtaggcctggagtgccgtggggcgagttaggtgggtggctgggggtttgcccagtattgggcccggctgggtgtcgggagtgcgtggcccttgtgattcggcgcgggccgtcggcctcgcgcgggagtcttgggattagcaggcgtatagcgcagccgcggcccggccggtacaaattaatttaacacatcttttgataatctcatccttggtgttggaaaagacgggaaaatccaaaagtgtctattttgtgcccaaatgctcaagttaatactcgagggccttgatctctggcctcttgccatccctctccccattatttctgaagaagtagccattttgcagattccggaggatgggagccacggccggcccctggtactgaatctcatctccttctcaaggctccttggatcaagttgggaccggcagcgccaaggctgctctccgtgatttagcagcaaccacaaaatgccaccacttccctaagtgacgctgggccccggggacctgatttgaaatcggtgttcagaagaccgagcccggctggacgcagctggcctccggctgagagcggaggggaagggttccatactctccgaggatcccgcgggctcgtggcgtgtggaacgcttttcatcgctttcagttcccgtttccttcgccccgactgcctactcggtngcagctaaagcccggagcgtggganccgggcccggaggaacgggatcnn

SEQ ID NO: 10851 - DNA, 1606 bp, Homo sapiens
  misc_feature 1548: n = A,T,C or G
tccggaattcccgggtcgacccacgcgtccgcaggagctccctttagcgagtccttcttttcctgactgcagctcttttcattttgccatccttttccagctccatgatggttctgcaggtttctgcggccccccggacagtggctctgacggcgttactgatggtgctgctcacatctgtggtccagggcagggccactccagagaattaccttttccagggacggcaggaatgctacgcgtttaatgggacacagcgcttcctggagagatacatctacaaccgggaggagttcgcgcgcttcgacagcgacgtgggggagttccgggcggtgacggagctggggcggcctgctgcggagtactggaacagccagaaggacatcctggaggagaagcgggcagtgccggacaggatgtgcagacacaactacgagctgggcgggcccatgaccctgcagcgccgagtccagcctagggtgaatgtttccccctccaagaaggggcccttgcagcaccacaacctgcttgtctgccacgtgacggatttctacccaggcagcattcaagtccgatggttcctgaatggacaggaggaaacagctggggtcgtgtccaccaacctgatccgtaatggagactggaccttccagatcctggtgatgctggaaatgaccccccagcagggagatgtctacacctgccaagtggagcacaccagcctggatagtcctgtcaccgtggagtggaaggcacagtctgattctgcccggagtaagacattgacgggagctgggggcttcgtgctggggctcatcatctgtggagtgggcatcttcatgcacaggaggagcaagaaaggtgagaaagcctgcaagttcaacgaggatctgcataaacagggttcctgagctcactgaaaagactattgtgccttaggaaaagcatttgctgtgtttcgttagcatctggctccaggacagaccttcaacttccaaattggatactgctgccaagaagttgctctgaagtcagtttctatcattctgctctttgattcaaagcactgtttctctcactgggcctccaaccatgttcccttcttcttagcaccacaaataatcaaaacccaacatgactgtttgttttcctttaaaaatatgcaccaaatcatctctcattacttttctctgagggttttagtaaacagtaggagttaataaagaagttcattttggtttacacgtaggaaagaagagaagcatgaaagtggagatatgttaactattgtataatgtggcctgttatacatgacactcttctgaattgactgtatttcagtgagctgcccacaaatcaagtttagagccctcatccatttatgtctcagaccgttattcttagctattcaatggtgagcacgactgcaaatctgcctgataggacccgtattgccacagcactaatacaacatatatcgtactgagagcatgttttatcattaccatgatgaaggtacatgaacatcagaatttaaaatcataaatntaatcctttcacctttaccataaaaaaaaaaaaaaaaaaaaaccccgggcgctggagg

SEQ ID NO: 10852 - DNA, 784 bp, Homo sapiens
  misc_feature 1, 2, 3, 4, 783, 784: n = A,T,C or G
nnnnaaaaaataggtaccaggtagtgtggaacctggtatctaatagatgacaatagtaatggtaatgatgaaagaaacagtactacgactacttccactaagactataattactactgatggttatgatgatgtcccaaacacgccatcctaacaccggcttcttaccagtttgaaaacttttaaggcattgtttgacttctctttaatcctagatacattctgcttaaaagtccttcattattttctttaaaagcgtaacattattatttatcccacagttactacccttgctctttaccagttagcttgtgactgaattactgaagcattttcttagcggtttcctactttatactttctctttttgtaatatactcagtattcttctgccaaatgaatccctcccatctcttccctatgatatctaacttaagctctgacaatttgagtgtgggagtagttagcagtgattctggtgaggtaagcagggacaagatcataaaggaccttaagttacaaggtaaagagtttacattttggctgggtgcggtggctcacgcctgtaatcccagcactttgggaggccgacgtaggtggatcacgaggtcaggagatcaagaccatcctggctaacacgatgaccccatctgtactaaaaacacaaaaaaattagccaggcgtagtggcaggcatctgtagtcccagctggggcaggagaatggcgtgaacccgggaggcagagcttgcagtgagctgagattgcaccactgcactccagccnn

SEQ ID NO: 10853 - DNA, 458 bp, Homo sapiens
  misc_feature 407, 457, 458: n = A,T,C or G
acatgtagaaaatccagcaacgaagagccatggctcactgctaatcacataacacacacaggagtctatttatgcatggaatgtggcagattttttaacaagaagtcacaacttgttatacaccagagaactcatacaggagagaagccctatcaatgcagtgagtgtggaaaagccttttcacagaagtcactgctcacggttcatcaaagaactcactcaggagaaaaaccgcatgggtgcagcgaatgtcagaaagcttttagtaggaagtcactcctcattttacatcagagaattcatactggagagaagccgtatggatgcagtgaatgtggaaaagccttcagtaggaagtcgcagcttaaaagacatcagataacgcacaccatagagaaaccctacangtgcagtgagtgtgggaaagcattctcccagaaatttaaactcatcacann

SEQ ID NO: 10854 - DNA, 2288 bp, Homo sapiens
  misc_feature 1, 2, 2161, 2162, 2163, 2164, 2165, 2166, 2167, 2168, 2169,2170, 2171, 2172, 2173, 2174, 2175, 2176, 2177, 2178, 2179,2180, 2181, 2182, 2183, 2184, 2185, 2186, 2187, 2188, 2189,2190, 2191, 2192, 2193, 2194, 2195, 2268, 2269, 2270: n = A,T,C or G
  misc_feature 2271, 2272, 2273, 2274, 2275, 2276, 2277, 2278, 2279, 2280,2281, 2282, 2283, 2284, 2285, 2286, 2287, 2288: n = A,T,C or G
nnacgcgtccggttttattctttgctgatgtcctttctgcttgaaataacagtcaccatacagctaaaggagaggagtttctttccttctaagtaggcagaaatggtatcattatgttgccgctctccaatctcccagagctcgctctctagagaatcaccttctttcgcttttttttttttttttgaggtagagtctcactatgttgcccagactagccttgaactcttgggctcaagtgattctccctcctcagcctcccgagtagctggaacgaactatagttgcaccactgcagctggcaagaatcaccttctttataaagcgtcagtcatgcttccagcaagaggcagcatcagtcatggctttataacagcttcatggtgcctcaaagactgttgaggttaatgagagcctagattagacagtttggctgtccttccctaaaacttgttttctcctattcactactccccaccgcacttaaaatctatgagtttttactttttactgggaatggaaagtgtggtgaagatcattcaacacttatgttgtcatttctcccattttctgaatttttttttaaatttccccccttttaaaattgttcgaaagcccacagttatggaaagaattactgtctagatggtctgcagaacgtgtttggggtgagtgggagtgaggggcaatgttactttttctccctgtagtttggagtccattatgagctgctgctttttcttctcatcttgtcatcttctggggatgtttgaaggctgagttccaacagaattcacaaagggaataaaacaggattgagattttgaggtgtgcacaaggtggtaagataaagggcatatgagcttcaaaactaatgctgttgcatacatgaagccttttgttttttgaggagctatttttgttattcttgtaacgctccaccttacatgccacgtctgtgtgagtcaacagggatcaggtttggtcaccacacatgtctgaagctgggcagcgtctgctctgtgttctgtgtggaatggagaaaaaaacgcctgccctgctgccttccatgttcataggcccagcccaagagagtgacacacagtgctggccctgagacatttccacaaagtggtcaactctgccttgcatcctaaaactttttgggcatctattttgaaaactataggagcctttggaaggcctcttatgtttggaggggaagggtgttgagattgtcaccatccttcaagctgagactcctggtgagcctttgccaccatgaaaaccacatagctgaccagggctgtgcttgaggtacagaggacacacatcgtagacaggcctgtgtcatgtttccttacagtcgttttttacagagaaaaggggcattgttttttcactgctttctcaacagttcctgtgaataaatgaaacatttcggagctccctgagagcaagagccttcacttcttcttgcggtgccgggaccatgtgttggtgaagctggtgctgtgggggccactcactcgaatgacacctggaggcctgttcctcccttaccactcccttccccagcccgacttcttggcctcctgcccaaccagacacctcaaactctgtcagtgccctggcattctggcagagaatcctcaccagttctcaccaaccttccccccaggcaagggcagctgccagcatggtgctctgccaggacaggtttccctgaaggaagctgctcacactgagatgagcctctcagggcaggacctcttcccaagccctgcacacccacccctgcagcccttttggctccccttttccctgtgcctcagcactcctttcctggttgcagataacgaactaaggttgcctaaagggcagatctgccctctccatgtcttcgtcctggcaaacagggtcgtcttaaaattatgcgctaattctgtatgggagcactcaaaaggcattacttagagattgaaatttcaaactatctctagtttttcaatggaaatatatcagctagggaaaaaccatcaagctcattattattttttgatcttcagttgtatttttgtgaatattttaatacatctttttcaatttctgaaaaaaaaaaaaaaaaaaaaaaaaaaaaaaaaaaaaaaaaaaaaaaaannnnnnnnnnnnnnnnnnnnnnnnnnnnnnnnnnntctccttgttccaatttattaaaataatatttgtctctctctttcttcttcttttgggggtgccccctcctannnnnnnnnnnnnnnnnnnnn

SEQ ID NO: 10855 - DNA, 1753 bp, Homo sapiens
  misc_feature 1, 2, 3, 1752, 1753: n = A,T,C or G
nnnacggtgtgattgacgtatgaacatcagcaatacgactaattgcttgcttgttttattattgtctcgtgaccagtgatctctcttccttgcagcatgctttttttgttggtgggttgcttttttgcagagttcgcgtttgtgtccgtctgccttggtgtctcttcctcctgcgccttagcgcactacagagtggtgcctcttcatccaagtgctgcttgggtggactcctgccgtccctttagatagccctcacccagatgtgggtctgtggttgggaagggtactttattaaaggtcaacgcacctgccagcccacgggtctgcagagcttcacagccagatgggtgccagggtgccacaaccccaagcaaagtttcaaaataatataaaatttaaaaagttttgtacataagctattcaagatttctccagcactgactgatacaaagcacaattgagatggcacttctagagacagcagcttcaaacccagaaaagggtaatgagatgagtttcacatggctaaatcagtggcaaaaacacagtcttctttctttctttctttcaaggaggcaggaaagcaattaagtggtcacctcaacataagggggacatgatccattctgtaagcagttgtgagggggtagagatgggacaaaattttggtctcagaggtcttaccatcttaatttggtaacttctaatgaaaaaaataaaaaatagaaataacattatccaaagatatcttaaagctgaaaacttgaacagcacattttttgtttttgttgttgtttggctaactcctcctggaatcacctttctggtttagctagtactttgtacagaacaatgaggtttcccacagcggagtctccctgggctctgtttggctctcggtaaggcaggcctacaccttttcctctcctctatggagaggggaatatgcattaaggtgaaaagtcaccttccaaaagtgagaaagggattcgattgctgcttcaggactgtggaattatttggaatgttttacaaatggttgctacaaaacaacaaaaaaggtaattacaaaatgtgtacatcacaacatgctttttaaagacattatgcattgtgctcacattcccttaaatgttgtttccaaaggtgctcagcctctagcccagctggattctccgggaagaggcagagacagtttggcgaaaaagacacagggaaggagggggtggtgaaaggagaaagcagccttccagttaaagatcagccctcagttaaaggtcagcttcccgcaggctggcctcaggcggagtctgggtcagagggaggagcagcagcagggtgggactggggcgttctacatctcattcaggtcaagcagggtctggtccagcatcctttgtgtacagaggtgctcctctttggtgcatttcagtttatcttccaggtcatcaattgtcttttccagcttggctaccgatctctcagcaaactcagcacgggtctctgcctccttgagtttatcagtaagaatcttgatttcttcctcatatttatcttctttttgagagtacttttcttcagcagcactcagacacttcaggttctggtccatcagtctaatctgctcatccatctctcggcaacgggactctgccagctcagctcgttcctctgtgcgttccaagtctccttcaatgatcaccaacttacatttcccctcggccgattcacccccagcctcctacctagccnn

SEQ ID NO: 10856 - DNA, 2633 bp, Homo sapiens
  misc_feature 1, 2621, 2622, 2623, 2624, 2625, 2626, 2627, 2628, 2629,2630, 2631, 2632, 2633: n = A,T,C or G
ncgcccacgcgtccgcgccaggtctccagggctccaatcactccggagactgagccatggggggaaagcagcgggacgaggatgacgaggcctacgggaagccagtcaaatacgacccctcctttcgaggccccatcaagaacagaagctgcacagatgtcatctgctgcgtcctcttcctgctcttcattctaggttacatcgtggtggggattgtggcctggttgtatggagacccccggcaagtcctctaccccaggaactctactggggcctactgtggcatgggggagaacaaagataagccgtatctcctgtacttcaacatcttcagctgcatcctgtccagcaacatcatctcagttgctgagaacggcctacagtgccccacaccccaggtgtgtgtgtcctcctgcccggaggacccatggactgtgggaaaaaacgagttctcacagactgttggggaagtcttctatacaaaaaacaggaacttttgtctgccaggggtaccctggaatatgacggtgatcacaagcctgcaacaggaactctgccccagtttcctcctcccctctgctccagctctgggacgctgctttccatggaccaacattactccaccggcgctcccagggatcaccaatgacaccaccatacagcaggggatcagcggtcttattgacagcctcaatgcccgagacatcagtgttaagatctttgaagattttgcccagtcctggtattggattcttgttgccctgggggtggctctggtcttgagcctactgtttatcttgcttctgcgcctggtggctgggcccctggtgctggtgctgatcctgggagtgctgggcgtgctggcatatggcatctactactgctgggaggagtaccgagtgctgcgggacaagggcgcctccatctcccagctgggtttcaccaccaacctcagtgcctaccagagcgtgcaggagacctggctggccgccctgatcgtgttggcggtgcttgaagccatcctgctgctggtgctcatcttcctgcggcagcggattcgtattgccatcgccctcctgaaggaggccagcaaggctgtgggacagatgatgtctaccatgttctacccactggtcacctttgtcctcctcctcatctgcattgcctactgggccatgactgctctgtacctggctacatcggggcaaccccagtatgtgctctgggcatccaacatcagctcccccggctgtgagaaagtgccaataaatacatcatgcaaccccacggcccaccttgtgaactcctcgtgcccagggctgatgtgcgtcttccagggctactcatccaaaggcctaatccaacgttctgtcttcaatctgcaaatctatggggtcctggggctcttctggacccttaactgggtactggccctgggccaatgcgtcctcgctggagcctttgcctccttctactgggccttccacaagccccaggacatccctaccttccccttaatctctgccttcatccgcacactccgttaccacactgggtcattggcatttggagccctcatcctgacccttgtgcagatagcccgggtcatcttggagtatattgaccacaagctcagaggagtgcagaaccctgtagcccgctgcatcatgtgctgtttcaagtgctgcctctggtgtctggaaaaatttatcaagttcctaaaccgcaatgcatacatcatgatcgccatctacgggaagaatttctgtgtctcagccaaaaatgcgttcatgctactcatgcgaaacattgtcagggtggtcgtcctggacaaagtcacagacctgctgctgttctttgggaagctgctggtggtcggaggcgtgggggtcctgtccttcttttttttctccggtcgcatcccggggctgggtaaagactttaagagcccccacctcaactattactggctgcccatcatgacctccatcctgggggcctatgtcatcgccagcggcttcttcagcgttttcggcatgtgtgtggacacgctcttcctctgcttcctggaagacctggagcggaacaacggctccctggaccggccctactacatgtccaagagccttctaaagattctgggcaagaagaacgaggcgcccccggacaacaagaagaggaagaagtgacagctccggccctgatccaggactgcaccccacccccaccgtccagccatccaacctcacttcgccttacaggtctccattttgtggtaaaaaaaggttttaggccaggcgccgtggctcacgcctgtaatccaacactttgagaggctgaggcgggcggatcacctgagtcaggagttcgagaccagcctggccaacatggtgaaacctccgtctctattaaaaatacaaaaattagccgagagtggtggcatgcacctgtcatcccagctactcgggaggctgaggcaggagaatcgcttgaacccgggaggcagaggttgcagtgagccgagatcgcgccactgcactccaacctgggtgacagactctgtctccaaaacaaaacaaacaaacaaaaagattttattaaagatattttgttaactcagnnnnnnnnnnnnn

SEQ ID NO: 10857 - DNA, 1725 bp, Homo sapiens
acaaataagatgcccacatcagaattaggaagaaaagaagatacaaaatcaacttcagattctgagattatctctgtgagtgatacacagaattatgagtgtgtacctcgaggctacatatcaaaaagaaataaagacaacaaatggcaaaatagaagagtctcctgaaaagccttctcactttgagcctgccactgaaatgcaaaactctgttccaaataaaggcttagaatggaagaataaacaaacattgagagcagattcaactaccctatcaaaaatcttggatgcacttccttcttgtgaaagaggaagggaacttaaaaaagataactgtgaacaaattacagcaaaaatggaacaaatgaaaaataagttttgtgtactacaaaaggaactgtcagaagcgaaagaaataaaatcacagttagagaaccaaaaagctaaatgggaacaagagctctgcagtgtgagattgactttaaatcaagaagaagagaagagaagaaatgtcgatatattaaaagaaaaaattagacccgaagagcaacttaggaaaaagttagaagtgaaacaacaacttgaacagactctcagaatacaagatatagaattgaaaagtgtaacaagtaatttgaatcaggtttctcacactcatgaaagtgaaaatgatctctttcatgaaaattgcatgttgaaaaaggaaattgccatgctaaaactggaagtagccacactgaaacatcaacaccaggtgaaggaaaataaatactttgaggacattaagattttacaagaaaagaatgctgaacttcagatgaccctaaaactgaaacaggaatcagtaactaaaagggcatctcagtatagtgggcagcttaaagttctgacggctgagaacacgatgctgacttctaaattgaaggaaaaacaagacaaagaaatactggagacagaaattgaatcacaccatcctagactggcttctgctttacaagaccatgatcaaagtgtcacatcaagaaaaaaccaagaacttgctttccacagtgcaggagatgctcctttgcaaggaataatgaatgttgatgtgagtaatacaatatataacaatgaggtgctccatcaaccactttctgaagctcaaaggaaatccaaaagcctaaaaattaatctcaattatgcaggagatgctctaagagaaaatacattggtttcagaacatgcacaaagagaccaacgtgaaacacagtgtcaaatgaaggaagctgaacacatgtatcaaaacgaacaagataatgtgaacaaacacactgaacagcaggagtctctagatcagaaattatttcaactacaaagcaaaaatatgtggcttcaacagcaattagttcatgcacataagaaagctgacaacaaaagcaagataacaattgatattcattttcttgagaggaaaatgcaacatcatctcctaaaagagaaaaatgaggagatatttaattatggtaaccatttaaaagaacgtatagatcaatatgaaaaagagaaagcagaaagagaagtcattgtgagacaacttcaaaaaaaattggctgatcttaataacagtgtgaggcttcactaaaggttacatcacattctcactctctgaggcatcaatagaggctacatcacattatcacattaatctcaaagattaaacagtaaagtttattgtgaacattt

SEQ ID NO: 10858 - DNA, 3098 bp, Homo sapiens
  misc_feature 1, 3086, 3087, 3088, 3089, 3090, 3091, 3092, 3093, 3094,3095, 3096, 3097, 3098: n = A,T,C or G
nccaggaatcgatagtgcattcgtgcgcgcggccgcccgtcgcttcgcacagggctggatggttgtattgggcagggtggctccaggatgttaggaactgtgaagatggaagggcatgaaaccagcgactggaacagctactacgcagacacgcaggaggcctactcctcggtcccggtcagcaacatgaactcaggcctgggctccatgaactccatgaacacctacatgaccatgaacaccatgactacgagcggcaacatgaccccggcgtccttcaacatgtcctatgccaacccggccttaggggccggcctgagtcccggcgcagtagccggcatgccggggggctcggcgggcgccatgaacagcatgactgcggccggcgtgacggccatgggtacggcgctgagcccgagcggcatgggcgccatgggtgcgcagcaggcggcctccatgatgaatggcctgggcccctacgcggccgccatgaacccgtgcatgagccccatggcgtacgcgccgtccaacctgggccgcagccgcgcgggcggcggcggcgacgccaagacgttcaagcgcagttacccgcacgccaagccgccctactcgtacatctcgctcatcaccatggccatccagcgggcgcccagcaagatgctcacgctgagcgagatctaccagtggatcatggacctcttcccctattaccggcagaaccagcagcgctggcagaactccatccgccactcgctgtccttcaatgactgcttcgtcaaggtggcacgctccccggacaagccgggcaagggctcctactggacgctgcacccggactccggcaacatgttcgagaacggctgctacttgcgccgccagaagcgcttcaagtgcgagaagcagccgggggccggcggcgggggcgggagcggaagcgggggcagcggcgccaagggcggccctgagagccgcaaggacccctctggcgcctctaaccccagcgccgactcgcccctccatcggggtgtgcacgggaagaccggccagctagagggcgcgccggcccccgggcccgccgccagcccccagactctggaccacagtggggcgacggcgacagggggcgcctcggagttgaagactccagcctcctcaactgcgccccccataagctccgggcccggggcgctggcctctgtgcccgcctctcacccggcacacggcttggcaccccacgagtcccagctgcacctgaaaggggacccccactactccttcaaccacccgttctccatcaacaacctcatgtcctcctcggagcagcagcataagctggactgcatataaaccgaacaggcactgcaatactcgccttacggctctacgttgcccgccagcctgcctctaggcagcgcctcggtgaccaccaggagccccatcgagccctcagccctggagccggcgtactaccaaggtgtgtattccagacccgtcctaaacacttcctagctcccgggactggggggtttgtctggcatagccatgctggtagcaagagagaaaaaatcaacagcaaacaaaaccacacaaaccaaaccgtcaacagcataataaaatcccaacaactatttttatttcatttttcatgcacaacctttcccccagtgcaaaagactgttactttattattgtattcaaaattcattgtgtatattactacaaagacaaccccaaaccaatttttttcctgcgaagtttaatgatccacaagtgtatatatgaaattctcctccttccttgcccccctctctttcttccctctttcccctccagacattctagtttgtggagggttatttaaaaaaacaaaaaaggaagatggtcaagtttgtaaaatatttgtttgtgctttttccccctccttacctgaccccctacgagtttacaggtctgtggcaatactcttaaccataagaattgaaatggtgaagaaacaagtatacactagaggctcttaaaagtattgaaagacaatactgctgttatatagcaagacataaacagattataaacatcagagccatttgcttctcagtttacatttctgatacatgcagatagcagatgtctttaaatgaaatacatgtatattgtgtatggacttaattatgcacatgctcagatgtgtagacatcctccgtatatttacataacatatagaggtaatagataggtgatatacatgatacattctcaagagttgcttgaccgaaagttacaaggaccccaacccctttgtcctctctacccacagatggccctgggaatcaattcctcaggaattgccctcaagaactctgcttcttgctttgcagagtgccatggtcatgtcattctgaggtcacataacacataaaattagtttctatgagtgtataccatttaaagaatttttttttcagtaaaagggaatattacaatgttggaggagagataagttatagggagctggatttcaaaacgtggtccaagattcaaaaatcctattgatagtggccattttaatcattgccatcgtgtgcttgtttcatccagtgttatgcactttccacagttggacatggtgttagtatagccagacgggtttcattattatttctctttgctttctcaatgttaatttattgcatggtttattctttttctttacagctgaaattgctttaaatgatggttaaaattacaaattaaattgttaatttttatcaatgtgattgtaattaaaaatattttgatttaaataacaaaaataataccagattttaagccgtggaaaatgttcttgatcatttgcagttaaggactttaaataaatcaaatgttaacaaaagagcatttctgttattttttttcccttaactaaatccgaagtgaatatttctgaatacgatatttttcaaattctagaactgaatataaatgacaaaaatgaaaataaaattgttttgtctgttgttataatgaatgtgtagctagtaaaaaggagtgaaagaaattcaagtaaagtgtataagttgatttaatannnnnnnnnnnnn

SEQ ID NO: 10859 - DNA, 1081 bp, Homo sapiens
  misc_feature 1, 2, 3, 4, 5, 6, 7, 8, 1079, 1080, 1081: n = A,T,C or G
nnnnnnnnccagaagcggcgggagctattccccctaatctacacccatctgctgcgggctggctatttggtgcgccgcgggaagtgaagaagaaaaagaagaagacagcagagcagactgtatgacgagcaccagcaccaggcacagggatttcctagccgagcagtggccatccccatgcctctgacctccaccgacctctgcccaccatgggttggaactaaactgttaccttccctcgctccacagaagaagacagccagcttcaggggtccctgtgctgccaagccagtgagcctgcggggaggctggtccaaggagaaagtggaccagctcccatgacctcaccccactcccccaacacaggacgcttcatatagatgtgtacagtatatgtatttttttaagtgacctcctctccttccacagaccccacatgcccaaaggcctcgggacttcccaccaccttgctccacagatccagctaggcctgacctgtgcctcatcccgtgccgctcggtctctggctgatcccgaggctttgtcttcctctcgtcagttcttttggttgtgttttttgttttttttttaataactcaaaaaaaaaataaaagacttggaggaagggtgcaagctcccagtgcatctggggcacatgtttcttggaagggactgtctcgccgacactcgggattccctcttgcctgcatgttgaggctatgggtgaccgtggttagtgggacaggcagtgagcagtgaagtgcctgagtgccgaattggtggggaaggcttcctggatgaggtggcatctaaactaaaggatggtcctggttgatttcctgttgccagagtaagtcatgtaaatacccaaagacaagaaatggaaggggctgagaatcctcgagttaggcctcgagctaggggcaggctccctggcaggtgcctggtgaacagctgtggcaggcacagcaggtctaggaaaatcggaagtgagttgcccctcaaatcgagctcaccatggttctgtggtggtgagggcaagaagtggatgaacatgaaagacagggtcttcgggtcgnnn

SEQ ID NO: 10860 - DNA, 700 bp, Homo sapiens
  misc_feature 699, 700: n = A,T,C or G
acttcaccaatgtgtcttcaccaatgtgcagtttccatgttttttaagatttaatattacttcttccaacatctttttatcctcctcaagtttacgggggaggtacgctggggacagcggcttccttgatccttgccacccgcgactgaacaccgacagcagcagcctcaccatgaagttgctgatggtcctcatgctggcggccctctcccagcactgctacgcaggctctggctgccccttattggagaatgtgatttccaagacaatcaatccacaagtgtctaagactgaatacaaagaacttcttcaagagttcatagacgacaatgccactacaaatgccatagatgaattgaaggaatgttttcttaaccaaacggatgaaactctgagcaatgttgaggtgtttatgcaattaatatatgacagcagtctttgtgatttattttaactttctgcaagacctttggctcacagaactgcagggtatggtgagaaaccaactacggattgctgcaaaccacaccttctctttcttatgtctttttactacaaactacaagacaattgttgaaacctgctatacatgtttattttaataaattgatggcaaaaaaaaaaaaaaaaaaaaaaaaaaaaatactactggatcctggccaccgactatgagaactatgccctcgtgtattcctgtann

SEQ ID NO: 10861 - DNA, 158 bp, Homo sapiens
ccgggcaggtacgcgggaattaaggattatgagctccagctggcctcatacacctcaggactggaaactctgctgaacatacctatcaagaggaccatgattcagtccccttctggggtgattctgcaagaggctgcagatgttcatgctcggtacct

SEQ ID NO: 10862 - DNA, 3167 bp, Homo sapiens
  misc_feature 1, 2, 3, 4, 5, 6, 7, 8, 9, 3166, 3167: n = A,T,C or G
nnnnnnnnnagacccgcagcttttattagccatcgttacagtctctcgtccacaaacactgcccagctcccttcccagggcactttactggaggcaagtgcaaaacactgtggtgctttctattcaaagaaacagaagatgtagctgtggtggtaacggacagcccagctacccaccagttttacagcaggatccgcagtgagcttgatacagatagaggatagatgacggtaaagggggaaaagagtttaaaattatcaagtttcctcttgaagtgtcttttcccaaggcactgtgaagaagactgctgctagcaattttctaggactaaacacaccgatgggaatataaatatttcaaacacaacccctgttacattcttacagctagtttcatcacttaggtctcttcttagcttaaatgatgctccttgaatctgtttggtccttggaggggcaatccatttttgttttctgtaatattgacaatcaccttctttaatgcagctataacatcaaagctctgttaggttacttaacccttcactcttaaactaaaagttttcattatcatctcacgtgaatccaatgtgcaggttttgcttgcttatttaagaataaaacaaaacaaacataaagggttgaaaaacaaaaactctgctttttttttcttcaagaggaaactatgtaagaatacataaaaggcaaagttggctacttgaaatccaagaatggttttaatgtgttggccgagaaaaataaactgtaaagttctgtgaggtcttctaaaaatttacaagaaaaactgatgggcagttctaatcagacttggatgttatcttttcccccctttttaaaaatgacaacagatacagttccacaaaatacaatagaaactgtttttttatcttgactgccagagacgctcctttgcaatgccttccggtaaccaaatttttgggcacaacacacagctggccttcatttcttcaggggctggtaaacagaggcattggggtcaagtccagaggggctggtctccacaaatttggaagagtagtggggggaaacagggctcagggggctggtggcggcactgtatgttatgctgggcatgacggccatgacttcggctatcttctgttttaggtccttgatttcctgatctttctgaaggatttgtccttgggcaatctcgagctgccgctttgcatcgcccagtgcggagaacaggtccagcttgattctcgtctctgcacttaagctgttctccaggtgctgtgttttgtcttgcatggctgagagggctgacattaacacctcagtgtccttctcattttccttatatttccgaagctcctggacttttagttctagttctctgatttggtcttctttcaccttcatgtccatcgtgagcttcttgccctctgcttctagttctctgatccgattccgtaaggtttcggtgcattctcccctagatgcagcagcaaacgcaacagcccgggcagcagtggcttcttctaacttcttcctctttttctcttccattaactgtttctctacaaaacttcgggcttcctgctcagcttttagctttttctccaactggctgatattctgcttgtctttttgcttcatttgcacagcattatgtaacttgttctgcagcagctcgttctcctgccgaagctggcccatttctgagcggatccctcgctcggtgctcgaaagggagctgatctgactgcggagctcttgttccacttgtctgctggcttgcaggtcagcctttaactttttaatgtcttgttccagcctgaccagtgcgtctggtttgcttagctggttattaggaatacagttttccattaagtccttgtgtgtacttgggctcttgctagtgcatttctgcttcttctcatttttactagatgaggaaggaatgctcccatttgtggcgctatgacttcgaggtgaagagttcacaactccactggcatttttgtaattttttgaggaagcagtgcatgagtcctctttcaagagattttctgtacttcccacaagatcattatttaatcttttactattgatatggttttccatatactcaatctcttgtattttagagtctacaggttgtagaatattgttgttatttattccaaggttgtgttttttggcatccttgtccttttctttccctttttctcggtattctatctctggcaaagttgtggagagttttttgttggctgggatacctccattgtggtgtataaggatcgaagaatccatatcaggtaatcctttggctgcttcctcggcctctttttcttgcttctgtagcatctgttgctctggagggagagcttgttgaagaagttgcatgtaaaactcgttctctttttgtacttctttttgcttccttaaccgcattttgtagcttacgtaacttttgaagccaaaccccaaagttaccacagggtacccaatacagtgagcagcaaatggacgacaaaggtctacatgaaagtttttgagatctttaaatctaatggctgcttcaatataaacaaagaggatccagagagacactgtaggcaaacacactcccctttctgtgtgccatacgtactgaacccatacatatgtgctagcagcaaaaaaaagccactgtatggggatgaacagcaggcatattatatttgacgtgaatgctacacaaacaaaaaatactgagaaggccagtccctggtatctgaaggaatcatagacgcttctgatgaaaagccagaatggccacaggtattcaaatctgaactccaggacaaaatctgctaggaggacaagtgcccacaccaccaggaatttcaggtataaaaatgtactgccgtaaatgccctcggtgatccggttccgctttagggggcggcggagcttactgcagtcggcgttccgccgcttcatcctcccgctggggggccgggtgcccgcgccgccgccgccgtctctcacctcagctgccgccgccgctggcccgccccgcgtcgggcctggactctacccctgaggccggtcacacagacatggagccagcacccggggggagggggtagcacggggagggggggctcggagcctcccggacgcgtgggtcnn

SEQ ID NO: 10863 - DNA, 1574 bp, Homo sapiens
  misc_feature 1, 2, 3, 4, 5, 6, 1574: n = A,T,C or G
nnnnnncaaaactttgagtggggactgaggaatttgcatcccaactctgtgacttattcactgtcccctaacactgccacccatccaacaagttacttaagctatactttctccctctgtgaagggtataacagtcctataatttcttgggttattgggttattgtgcatatttcatgagatgatgcaagtatagcccttgggagcctccctgattggtaagctttgtatttgtattctttctcatagtgcttcacttagtaactgatcagttgccacagtgtattctgcaatgagtcttttattaaaccgtatacatgaagacattgctgagagagctaaaaccttgccgtgcttctgtgtgtgctctttgtttatgaacagaatcaaagccagctgctaccacacgctcttctggaggaggaggtggtggcggtggaaaacgaggtggcaagaaagttgattctcactggtggtccaggtttcagaaggtttgatgctatacattgtgtgaattttgaggttatgatggtggcccagagaaggttgggaggcattagtgtagtgttggagggatttgtgtctcacagagcatagatcgtattgtggaatttcattctcactggtggtccaggtttcagaagggtgacattccatgggacgacaaggatttcaggatgttcttcctctggactgctctgttctggggtggagtcatgttttacttgctgctcaagagatccgggagagaaatcacttggaaggacttgtcaataactatctttcaaaaggagtagtagacagattggaagtcgtcaacaagcgtttgttcgagtgacctttacaccaggaaaaactcctgttgatgggcaatacgttggtttaatattggcagtgtggacacctttgaacggaatctggaaactttacagcaggaattgggcatagaaggagaaaatcgggtgcctgttgtctacattgctgaaagtgatggctcttttctgctgagcatgctgcctacggtgctcatcatcgccttcttgctctacaccatcagaagagggcctgctggcattggccggacaggccgagggatgggcggactcttcagtgtccggagaaaccactgccaaggtcttacaggatgaaattgatgtgaagttcaaagatgtggctggctgtgaggaggccaagctaaagatcatggaatttgtgaatttcttgaaaaaccaaaggagtatcaagacctaggagcaaaatccccaagggttgcattcctcaagtggtcctcccagggcactgggaaggagcggcaggctaaggcacagccggagaacgcaatgtccctttatcacggaggggactgagtcggagatgtcgagggggtggccggaagagccagagatattatgcctggcgaaaagccatggaatcatagataagaaaggcggggaagagaagcacgaccttgggaagagaggaaatacaatacggcagaggataggagagcgagatgggcacgccaacgcgggagcggagcgacgagcaaaggtcacacgagaagataagaatgan

SEQ ID NO: 10864 - DNA, 908 bp, Homo sapiens
  misc_feature 215, 216, 217, 218, 219, 220, 221, 222, 223, 224, 225, 226,227, 228, 229, 230, 231, 232, 233, 234, 235, 236, 237, 238,239, 240, 241, 242, 243, 244, 245, 246, 247, 248, 249, 250,251, 252, 253, 254, 255, 256, 257, 258, 259, 260, 261: n = A,T,C or G
  misc_feature 262, 263, 264, 265, 266, 267, 268, 269, 270, 271, 272, 867: n = A,T,C or G
acatccaaattgggctacgaaaagtggcaagtttgattgtagcatcatgtctttgagtgtcctattggactacagattagaggataataaagaacattcatttgaggtttcattgtttgcggaacttttcaacgaaatgcttcaagagattttggtgtccgtatatacaaatcattactgtctcttcctgagaaagaggacaaaaaagaaaaggnnnnnnnnnnnnnnnnnnnnnnnnnnnnnnnnnnnnnnnnnnnnnnnnnnnnnnnnnngtccactgttaagaagttgagcttttatcttagaggcagcagaaggtttggagccaagggatgaaatgatgaggcgtccttcaggtaatgaacttcagctgcagtgtgaaaggggcaggaagactggcagctgtcaaaactggaacagtccagtgagtatgtgcaggcccgggcttgggcagtgacgagggcagggagcacacatcaatttctgcggtagaaccttctagaggaagaccagacagagggtcaacagagttgaaaggagaaaataattgaggatgaggtccaagtttttagtttcagagactaggcatatggttaatatttaggtaggaaattcaggaaaaggagcttgtggggcaggaagggaaggaacggcagcttggggcactctgacatctttaacaagtcttgtaaaggcttactaaatacaacgaagcattgtaccaactataccctaataaagattaaaaatttacattccagttaactaccttaaaagttaagtccactttcatcccacgcccccatcctttccgtcatccctcaccccctttgtcttgagaaaaggagggtttagctgcttctttgnatctgcaatctcttattctagctctattatcttcatctgta

SEQ ID NO: 10865 - DNA, 445 bp, Homo sapiens
  misc_feature 437, 438, 439, 440, 441, 442, 443, 444, 445: n = A,T,C or G
acattttacaaaattaaagtcactttgtaggtatataaaaagttttaaaagttggtttattaatgagagtagtggattacatttcttttcaagcagtagtttaaatattaaccagtttacttttttttaaaggcaatttacttttccagcctggacaacatggtgaaacctcgtatctaccaaaaattgaaaaattagctgggcgttggtgggtcacgccggtagcgtggtttttttgggggggataccaatgttctaaactgtgctggggcactgggtattccactctggggccttttctcaaaatccctggaattgggcctgggccggccgggcgctttttaaaattggggggtccccccgggctgggaaggaatttaatttcaagcttttttgatacccctcgaacccttaggggggggccccggttccccaannnnnnnnn

SEQ ID NO: 10866 - DNA, 1219 bp, Homo sapiens
  misc_feature 1: n = A,T,C or G
ngtcgctgttttcgtctcttttctttgatgctcgtccccttgtcgttgagtcgggtctcagtgtgctgtgctgtgtgtcgaggttgttctgtgctgtgcgtgtttgtgtttctgctccgtttgtgctttaacataatgggtttatatttaatatagtacttctcatcaggaggatgttactcagttaatataaagttttttttcaaaacattaaatctcttttccatgtcaatgtctatagtttttttttaacattaaattttttccgcatttcagtattagatacactgaatacatttttctaaatgtttttccctagagataaaagttttcctttttgcctgactctctgatatctaaatataatattaacttgggatacaacaaatcaatatctaatttaactgagactccctcattaagctgattcaggagccgtgattataaccgaacagtggtgatttcctaagattctgggcaagaacttccttcttcctatttcacatgctttgagagaattctaagattatgaaatattacttatgtaaatttcacccatcttacttctttgactacctaactagcaaattataggctgcatttttctgtgcattatttgttgtaaagaaaacatttttttttcaatttataaatgtatgtttgttgccatttcatggaaacaatgaaaaatgtgaaactcccttatttactgattcttggaacctttcacacaccaaatctcaggtttagcctctaaagcgcaaaggttttcagggtgaggtttgactcagtaggcctttcaaagtcacatctgtccatttctttttcgtgcatatacccccaagcaggcacaaatgcctgtaatgctgagaaccacacctaacaaagggcgattgcatcaccggcttctactgcttccacaacaggcagcaccaaagcagtgacatgaggactaaggacaactgtgttgaaactgaggtcatgatgttggaatcttgagggctgaaggttccaaagaaatggtatatatagaattctatctgacttgaaattttcccttcctggagctccggatgctgagattaagaggttccacgtgacacgaccttctaggaagcagccattacaggaatacactggtgcaacctaagtatcctttggagacgagttcgtacattaccttctaggaagcagccattcccacgcgaccgcggacgcg

SEQ ID NO: 10867 - DNA, 1452 bp, Homo sapiens
  misc_feature 1, 2, 3, 4, 5, 6, 7, 8, 34, 1452: n = A,T,C or G
nnnnnnnnggactaattttttgtattttttgtanataggggtttcaccatgttggctgggctggtctcactctcctgacctcaagcaatctgcctgtctcagcctcccaaagtgctgggattacaggcgtgagccaccgcccccagcctgagccttttttttttctaatgcatccaaggttaaggggaagacgcaaataacaggactactctaaaaggaaacctgtttgaactctgtgagatcagtcatcagtctcagtattccacaggcacaccttaatttcattgtaaaaagatatatatattttgtctatttttgtgcttttgggggcctattttgtgcttttttaccttatgtagagatcttattacaaagtgattttctacattaaaaagagactgaaataaattgtatagttacttaactaatgaagacatttcagaactctgggatgattttaatcttgaagtagtaggtggtatagtcataaaaccattcatccccttcttgattgtatcttaattttctggctttaaggcgacatctgagaggtaatgcattcttttttatattgaaatcataaactatcacccgctgcttctctgagttacttttaattttgccttgtggttatggtttggcgtttccttctgtttggttttcagagccccatgtctatatagtcctgagtgcaagtaattactatacttgtaaatgaagatcagtatttctgcctagatctgataaaaaaattttcttgtcttagttataaaaattcaaagaaatgtgttacaaagatacttagtatagctcctcagccataacctgagacttgggatgaaatttaaaccagatacgatttactttgcagatcataaggctttttatactcttgttatcaaaatggcttatttttcaggcactaaggattgttaagagaaaagcttttcaacgaaggattgcctttcttctcccacactgttcttgatttcctctctctttcaggcctcaacaggcactgtattcattgccaatgttccaaattatcaaattcaagtgaatttatttgtgtgttctttacttatataaaaaaagataactttaaggatgtgcaagtacatttccaactgctagcacaaccagtattttgtaattaaacaaatcgctgtatggtatggtcttctacacatttatgtctatagatatctatcgatcatctttctattctgtttcatgactgaataatgtaaaaccagtgttggcaattggtatcatcaatgatactcattttttaataaccaaaggcaggggaaaatcattttacttattaataaatattttatgatgtgaaaacaaagccagcacaaacaacaaaaaaggggggccaaatacccggggacatgcccctttgaaggcgcccagagggcaaaaagcccgcgcacaaggcaacan

SEQ ID NO: 10868 - DNA, 1292 bp, Homo sapiens
cacccacgcgtccgaaccggtccgggggctcccagcgctataaaaactttataaaccccccggagcccgagcagtgtgaagaagaggcgagaacgacccccggaccgaccaaagcccgcgcgccgctgcatcccgcgtccagcacctacgtcccgctgccgtcgccgccgccaccatgcccaagagaaaggctgaaggggatgctaagggagataaagcaaaggtgaaggacgaaccacagagaagatccgcgaggttgtctgctaaacctgctcctccaaagccagagcccaagcctaaaaaggcccctgcaaagaagggagagaaggtacccaaagggaaaaagggaaaagctgatgctggcaaggaggggaataaccctgcagaaaatggagatgccaaaacagaccaggcacagaaagctgaaggtgctggagatgccaagtgaagtgtgtgcatttttgataactgtgtacttctggtgactgtacagtttgaaatactattttttatcaagttttataaaaatgcagaattttgttttacttttttttttttttttaaaagctatgttgttagcacacagaacacttcattgttgtttttgggggaaggggcatatgtcactaatagaatgtctccaaagctggattgatgtggagaaaacacctttcccttctagttttgagagacttcctcttggctcccaggaggagggattccctgactttgacacacatggccaccttggcacaaaagccttgtggtatagaaaaacaaatttgtttttatgtcctcttctccctttccatctttcagcatagacttaactcccttaagcccagacatctgttgagacctgacccctagtcattggttaccagtgtgtcaggcaatctggactttccagtgatgccactgagatggcacctgtcaaaagagcagtggttccatttctagattgtggatcttcagataaattctgccattttcatttcacttcctgaaagtcagggtcggcttgtgaaaagttgttaaacaacatgctaaatgtgaaatgtcaaccctcactctaaactttccctgttcagagcatcagatgaagacttcattgggttttatagtggctttctgatttttggtagtccattgaagaagggagtttgaaagttgttgtatactgttaacgattgtctgcccatgtcctgcctgaaataccatgattgtttatggaaagtatctttaataaagctggatacagtttggcttgaacggacgcgtgggtcgactcc

SEQ ID NO: 10869 - DNA, 1095 bp, Homo sapiens
  misc_feature 1, 2, 3, 1094, 1095: n = A,T,C or G
nnnccagttacttccgaatccatgaaagaactcacactggagagaaaccctatgaatgtaagcaatgtgggaaagccttcagtcgatccacttactttcgagtacatgaaaaaattcatactggagagaaaccctatgagaaccctaaccctaacgcttcagttgtcccagttctttcatgagcatgaaaggagtcacatagagaaaccccatgaaagtaagaaatttgggaaagccttcagtcctttctgtttctttcaactacgtgaaaggattcacagtggagaaagaccctgtaagataattggctttaaattacgagagacttgtgataggacagtaaaacctagagttggagttggatctctggattgtgttatgtcagtgttggtaggttaggaactagatttcccagaatccattccatttgtgattccatgatacaattcaccagtaacctatcttacatgagattcggaagtaagttaagaaggcattagtcatggtttggaagcaccatacagggagacagctgtgtgaatacaggctgtatggacacttgcttccatcccattttcctgcttctttgggttgccaatcaagagtatcctcaaaacgacttgactttaattttctcggaggtgataggcttccacacaggtctccagaagccctgcattgaatatccatccacactttggttttccttcagacattattatgtcttggactaggcaactaaattcgactggcgggtgggggaaattccgcgaagatctggatacctaattttgaagaatagggacacggccatatgggggagtagaaacctggtggccacacacaacagggagatttggaaacaggatgagaacaagcgtagtctaccacccaaggggagcggaaatctagaaggagagaaaggaccacaacagaatagagaaaaagcctacagaaaaaagagaggtaaaaaaatgggaacacacagcgacagagaaaactatagaaaacgagcgatagcaacgacagagacgaacatagtaggtaacagcgaaccaccacctacctactatgcacattccacaacatcaccnn

SEQ ID NO: 10870 - DNA, 1393 bp, Homo sapiens
actggcttccttgttaatcctttatccccttcaggtgttattcaaatgtcatcttctcaagaaggccttgtgtgattagtttattgaaattattccactcaactcctatgtctaacactattcagtctcctttcctgcttcaattttcttcttggctcctagcaccatctaacttggaacatgtatatgtgacatatttggctagattatttcacccattagcatgtaaactccacgaaggcttttattttactgcagtattttctgcacctagaacagtattggtatatagcagtcacttaaatatttgttgaatgagtgatgtagagaaggttcaaaaagccactggagaatgtcatggcttgaccggtttgaattgtaatactttaaatcaaagatcaatggaaacattaataggaaagatcttaacatcaattttcttccaggagaatttaaacataaacacatacaaatagataagcacatgctttagaaactctcccattcccttctctaaacctcaacccactctctctaccacccttccctaaaaaaatgagagattaaagaaaaagtaaacacactgtgtccatgggcctttttctctcatccgactgctcagatcctaaattttagagtctttctcgaatcatctttttctcattgcttcccattgtctccactgctattatccctttaagccacaatcagttcttgcctaaaatatggccaattgtctgctaactggtttccctcttccaaatttgacctgcgacaatctttatttccaaatcagctacaatgcaatggactggattgtctccctactaaattcatatgctaaaaccctaacccctaatgtgagatagggactttatagaagtaactcagatttaatgaggtcacaaggggagggccctgatctgataagatccttatgagaagacacagcaaagatgttgttttctctccaccctatgaggacacagggagaaagtggctgtctgcaagccaggaagaaagccctcaccagattctgaccatattggcatactcatcttggacttccagcttccagaactatgagaaaataaatgtctgttgtgcaagccacccagtatgtagcattttgttatggaagcccaagccaactaacatgctgagaaattcttttaaaaacctaagtcacaccatgacaatcttctgagtagaagcctccaatggctctccagtcttaatcctagcaattgccttcaggagcctttagtttctggctcttttcctttgtagccgcatttcctactacgttccccacccatcattcctttcaaccacactggccaatgacctaattcttgaacccatcaggcatgtttccatctcagggccctgt

SEQ ID NO: 10871 - DNA, 953 bp, Homo sapiens
  misc_feature 1, 2, 3, 4, 5, 6, 7, 8, 9, 10, 11, 12, 13, 14, 15, 16, 17,953: n = A,T,C or G
nnnnnnnnnnnnnnnnnagtttgaaatttgcattttaatcagcgtttggctaacaatatgagataaactattagagaagtgtaggtcattctggcaaatagaaagttccatcatttcacacttagaaagctgccacgaagagcttattcttggagtataaaatgcagaatttaggttaagccagtcattttgtagatgaaattgtacactggcaatttcttatggttcaacctaatagtaaaacatttataaacaattgtatcattacaaatacatttagacatcgttttctgctaaactcagtattttcctttccatcctgatcaaagaaacattattgcagtaagccacattataattcagcacgatttcttctaaaaaggctccgagttcctttgagcttgttattgtacagtggatttttcatttgcaaagacgttaagccctccaaatgtgcaaatcatgaagtcagttgttgttccagcaaggtttgcccagcggtaaaaaacaagataaaactaatgcactagctgaaaccaggtggggagaccatgtgtggtagtgcttgggggtggagggaaactatttctgaaatgaggacttaaagtataataccagcttcactgcctgttcacatgagaaaccaaagcttcaatttaactgcaggcaataggagtttcacactgtcagcaccaactgtctaaaatccaaaactagtatctaaatgtgtaggatcaaaaccaaaaatctggagggatctagttaaacttcaatatgcatgaccccagattcccctttaaaatatagtccaagtattttatcttttccatagggcattgacattattgtgttaatgtgaaatagctatttacctctccaaacctcggctttatagaatagataattatcacatcctgtaggagaaccatttgaaaagacagccttgcccgcgn

SEQ ID NO: 10872 - DNA, 2652 bp, Homo sapiens
  misc_feature 2543, 2570, 2600, 2616: n = A,T,C or G
cccacgcgtccgccggactggcctggggcgggacgtgggcgcgggggcgcggcgtgcggcacgctgcagggctgaagcggcggcggcggtggggactgcacgtagcccggcgctcggcatggctctcctggtgctcggtctggtgagctgtaccttctttctggcagtgaatggtctgtattcctctagtgatgatgtgatcgaattaactccatcgaatttcaaccgagaagttattcagagtgatagtttgtggcttgtagaattctatgctccatggtgtggtcactgtcaaagattaacaccagaatggaagaaagcagcaactgcattaaaagatgttgtcaaagttggtgcagttgatgcagataagcatcattccctaggaggtcagtatggtgttcagggatttcctaccattaagatttttggatccaacaaaaacagaccagaagattaccaaggtggcagaactggtgaagccattgtagatgctgcgctgagtgctctgcgccagctcgtgaaggatcgcctcgggggacggagcggaggatacagttctggaaaacaaggcagaagtgatagttcaagtaagaaggatgtgattgagctgacagacgacagctttgataagaatgttctggacagtgaagatgtttggatggttgagttctatgctccttggtgtggacactgcaaaaacctagagccagagtgggctgccgcagcttcagaagtaaaagagcagacgaaaggaaaagtgaaactggcagctgtggatgctacagtcaatcaggttctggcctcccgatacgggattagaggatttcctacaatcaagatatttcagaaaggcgagtctcctgtggattatgacggtgggcggacaagatccgacatcgtgtcccgggcccttgatttgttttctgataacgccccacctcctgagctgcttgagattatcaacgaggacattgccaagaggacgtgtgaggagcaccagctctgtgttgtggctgtgctgccccatatccttgaaactggcagctgcaggcagaaattcttatctggaagttcttcagaagttggcagacaaatacaaaaagaaaatgtgggggtggctgtggacagaagctggagcccagtctgaacttgagaccgcgttggggattggagggtttgggtacccccgccatggccgccatcaatgcacgcaagatgaaatttgctctgctaaaaggctccttcagtgagcaaggcatcaacgaggacattgccaagaggacgtgtgaggagcaccagctctgtgttgtggctgtgctgccccatatccttgatactggagctgcaggcagaaattcttatctggaagttcttctgaagttggcagacaaatacaaaaagaaaatgtgggggtggctgtggacagaagctggagcccagtctgaacttgagaccgcgttggggattggagggtttgggtaccccgccatggccgccatcaatgcacgcaagatgaaatttgctctgctaaaaggctccttcagtgagcaaggcatcaacgagtttctcagggagctctcttttgggcgtggctccacggcacctgtaggaggcggggctttccctaccatcgttgagagagagccttgggacggcagggatggcgagcttcccgtggaggatgacattgacctcagtgatgtggagcttgatgacttagggaaagatgagttgtgagagccacaacagaggcttcagaccattttcttttcttgggagccagtggatttttccagcagtgaagggacattctctacactcagatgactctaccagtggccttttaaccaagaagtagtacttgattggtcatttgaaaacactgcaacagtgaacttttgcatctcaagaaaacattgaaaaattctatgaattgttgtagccggtgaattgagtcgtattctgtcacataatattttgaagaaaacttggctgtcgaaacatttttctctctgactgctgcttgaatgttcttggaggctgtttcttatgtatgggttttttttaatgtgatcccttcatttgaatattaatggctttttccattaaagaataaaatattttggacaatgccgataaatgtatgatgtggatactaacttcatacatttatcggcattgtccaaaatatatgaagttagtatccacatcataaattcagagtgatgtttagcagtaaatcaatattttgaagtgatacacagatgtctttcctccccacaaacttttttaaacaaaaaacaagacctcttttctttagatggtgccacctatgcccaccacaacagagattttacatggaaaccgggctcagtgagaactgatttcctgcccaatatttgtctttgggctgtctctagtgactaattattaaggaatctagctggttatacagttcaaggctttctgtgttgttaatgaacctcaaaatagccgttaagatatgaaatacagcagcaggttaccaatgcgaacagtanttcgcatttatgtaaaacattcaaaanatgaagttttgaatctgttggaacattcanaggacttgagagcatnttattgtaacttaaaaaaataaatacaactgtcacc

SEQ ID NO: 10873 - DNA, 2436 bp, Homo sapiens
  misc_feature 1, 2, 3, 4, 5, 6, 7, 62, 63, 64, 65, 2436: n = A,T,C or G
nnnnnnnccccctaggggtgggaggaagcaaaagacctgcccgggcggccggccgcccgggnnnnactttttttttttttttttttacattttaaaaaattatctttatttaggtttctgattcagcacatgtatcaaagactaatcaacataaaggagtaaataagacattaattgaaagtcttacatctctctaaactctgaccaagaatgtcaagattgccactattaccagaactccaacctagtcaagttgtagacaagctatcatgaacaacatacagtgtgcacagatatgcagaggcaaaaggcatgctagcgcttggctctcctcttttccttgttgacatctttctgttggacagtccactttcgctttccaggctaagttccaaatcaagtccaaagaaggctcagggtcaacctgaccagatactcttctggaggaatgcattcttaaactgttgtgcctgcaactttgtttttgccaggatgaagttcagaccgagatgtacaatacaatctagatgacggtgcagactaagtcaagaactaaagttgtgcagtaacccgagttaaggcatgaatgcagacacacacatgcacacacacagcacccatgctatcaagacacaggattttttcagttgcctcatgagaggcaacctgggcttggcagttaatcagaactgctgagcattccagaaaatgccccccacgactttatgctaacagctgtgtgtatgttttaatcaaaaaattaaagaagaaaaaaaaaccctaaaaaacaaagaaaaaaacaaacaaaaaatcaccaaaaacctagaaaccccttaatctcttacaatggctcttgagcatggaactcatgtagcagcatcaatggctggctctttaacaatttggaaataaaaggttgttttactatgtatttctttggtagtcatcactacaaagttttcagtgttggttacctataagacaagtactagacagaagatcaagttacacagaaatatttcttctgtactgataagatacaaatattgagctctcaaagcacaagttactatgctatttcttgccttatatcccggggattcggggcggtactttgtgcaggaaaagttcatgtctacctaacaaagggtgatacatgttctattttcctacaagtgaacaattaacaaaaattcacattatcaattatttctggttgaatactgttagaagccaattacaaagggacagtagcacttggtgtcaaagccactttctggtcacacattcattccatggttgctagtcagtatctcaggagctcagaatttaaaactcctttcagtcaacgaaggagtaagttcaattaaaggcttccactgtctgccaaatttctagaattctgtctagagtgctagcatgcttgatgagagaaagcagttcagagcccaaagaggtgtcaggtattaggtaagttaatttggttttgtataaaaggcatggtaatctggcaacagagtacttatcctattagcagcacagtggtagccaagggtctctgtctgcaagacaggaaaatgaagctactgaagcccctgttgctcccacctgcctgcaggatggctactgattttacaaaggccttctgggagccaatccagggctcacctgggagagtgggtaacagaatggcaggaaccatgttcagcccccatgagaagtgcccgactgagggaagtcagcttcccataggtgagggggctgttgccattatgggctcagaatctaaatcttactgatccctagtagtaagacaattgccaagaaattgtcctagcaggtactacccaagtgttacaggctctgcataggtcctcaaacactttaaaggacacgaaccatcaaattcaaaagagtagtgtttgttctatcagttctgaatgtccacagggagaggcaactagatttatgtggaaaaagtgctgtttgaaggagctgtgttttatttcgaagtgaaatgactttgggaaccagaacatttctgcagatgtctgaatatcaagaacctatctctaaaaggcatttatcaggaaatgttcgctcactccaagtgctttttaaaaattcaacatatggcaatgttttaatttttgtgctttcaagaggtaactaaatcgataggaagctgagggaagatcattccattatggactttcttgtttgggtgcaagacactatccacagcattgaaatctataatctcataaaagattcttataaacatataccatatttctcctataagaaaaactgagaactgtaccatgaaggcaaaatttgtttgcctactctcagaattccttggaatggcaatgtaccaggagggtgagtgaactgttggtgaaaattccgggtttgacacgaacgcgtgggtcn

SEQ ID NO: 10874 - DNA, 547 bp, Homo sapiens
  misc_feature 1, 543, 544, 545, 546, 547: n = A,T,C or G
ngattgattagactggcttgggccttttgatgcctactgtggctgcagatgtgcctcttttgcttatttccctcttggttctaagtgacagtgagtggaggactgtggatgagtgaccccccaaaaagtaagatattgtcacataagctcttgagacagttaactcattatctgcagtttcttccattccacaataggctacttatttttaatgctgtattacattgagaatatactcatgtataatttttataagaaaaatatttaactatatatttacagaaggtgacatttcaaaaggcccgggaatactctgtcaagaccgcacgcttgccaatccaggaatacatggtcagaaaccagaatgggaaaaactatcattcagagatactggccatcaatcaaggtacttcttacacggcccccatccagggtgtgtgagttctggtgctgctctttgcactgtgtttaagtggcctttgagtcagtctcctctgtgactaatgtgtgtggactttattgcatgtacgtcatgacatatannnnn

SEQ ID NO: 10875 - DNA, 464 bp, Homo sapiens
  misc_feature 1, 2, 3, 4, 5, 6, 7, 8, 9: n = A,T,C or G
nnnnnnnnngaaagcggggaattaaaacaatattttttcaacacaagggaaaaacaaggtctaattgaacccaattgaatttaccggcccaaaggcggcggccaaatttaatccccttcaattaaaaaggggaaaccaaaaaagcttgggtgtacccggggaccccaccccctttgaggtgttctgacgggtaatacaataaaagctttaaataattgaaaatttcattgccagccacggggggaatccactaagtttttaaaatccggacccaaagttcaagtttaaaattggaaaaaattggggcacagttcagcttgggcacagttagtgataatgccagcaccaaagcaatggcaggatccattctgaattcctacatcccattggacaagtaaggaaaaaactgttaaaaaattgaaagtattttttaaattaaaggaataattcctatcattagacaa

SEQ ID NO: 10876 - DNA, 429 bp, Homo sapiens
aacttttctgtagttttgaaatttttccaaataaaatgttgagggaaaaaaactcttccccaaatttgaaataatcattttatcacaatttgaatgggctctgtaaccccttatcttgaattcgtcataatataaaattctgctaattacacatagtatttacatgattgtatggaagaatcattaagacaattatctggaaaatgaacaaacagtaaatctgaatattgtttgaaaattacggatgtgaaaagtttcccttttttttctagtttctgatgttccgagggacctggaagttgttgctgcgacccccaccagcctactgatcagctgggatgctcctgctgtcacagtgagatattacaggatcacttacggagaaacaggtacagcagtaaaatgctattttacactctgattaaatca

SEQ ID NO: 10877 - DNA, 1008 bp, Homo sapiens
  misc_feature 1, 2, 3, 4, 5, 6, 7, 8, 9, 10, 11, 12, 13, 14: n = A,T,C or G
nnnnnnnnnnnnnnataaaatattatgggggcgcacccaaaaaatattttatgtgcataacaccaagtagtcctcatccttgcatggagaaaaaattgtgaaatccaacccatttttcttccaaaattttccgtggtccaaaaataaagccaagtaagaaaaatttttaaagccccttcataaaccaaccccagccgcaaattttcaaaaaaaataaggtttttagggttcctttggcccccctggcccttggattttaatgttaaccaggaaataggccattaaaagttttgccaaggagttggaaaccgggaaaggaatttttttctaagggaaacctttccatttttttacccattaaaaggtgatgaaattaagtaagggacaaggttaatctctgcttctgattataaatataaggggtataggctgagtataagaccctctttttgttttcagtagctcattctcattcaccaatgataagggagacttggctctcaactataagtgtacacatgtacatctttagagagtagagatacatctgcatataaaaaaaaaatctgccgtaagtgatagagttgaaaataatgtcctacataccagaatgttcttctgaattaggcatcatgtaggtattcagcattctttccatttccaaattgctcccactccctgttttttcatcatcccctttttcctcattagctcattggaaataaagatttttattttatttcattttttttttctgcagagaagcacatatgtatgagatttaggcaatgatttctcaaggaaaaaatgttttgcaggtacagcatcgctggtggtttcaaaaaacgtagtcattcttctcactgcaacaatgtaagataagcagggtagatctgttatttccaaattaaaggtgattaagatatatggagagagaacatggcatgtgaggtttatagggctagaaactgcagaaccatgtagaacccacatttaactacagtacct

SEQ ID NO: 10878 - DNA, 855 bp, Homo sapiens
aggtacgcgggggctgtcaactctccaactcagctcagctgatcggttgccgccgccgccgccgccagattctggaggcgaagaacgcaaagctgagaacatggacgttaatatcgccccactccgcgcctgggacgatttcttcccgggttccgatcgctttgcccggccggacttcagggacatttccaaatggaacaaccgcgtagtgagcaacctggtctattaccagaccaactacctggtggtggctgccatgatgatttccattgtggggtttctgagtcccttcaacatgatcctgggaggaatcgtgggtggtgctggggtacacaggggttcgtgtgggcagacccaacgaataaaaggacgtcccttcgccggatgaagaagcgctaccccacgacgttcgttatggtggtcatgtcggcgagctatttccttatctccatgtctggcggagtcatggtcttggtgtctggcattacttctcctttgctgtcgatgtctatccatgcatcgttgagacttcggaacctcaagaccaaactggagactaaaatggaaggactaggttcgacgcggacaccgacgggcatggtcctggatgccctagaacagcaggcagcaggcatcaaccgactcactgactatatcagccaacgtgcacggcctccccatccccttacctgcagctacggttgcacgcagacactggactggcacctggccctggtccagacctatgtcctgctaggcgtccaggaaccaggagggggacgtaaccaaccaatcaccctggcagcaagcatcaataggcccgcacatcatcaccccggccgaccaagcacacga

SEQ ID NO: 10879 - DNA, 6021 bp, Homo sapiens
  misc_feature 5930, 5954, 5961, 5994, 6018: n = A,T,C or G
aaaaattgggagctcggcccgccgcgctcaggtctccgcttggagcccccgcacgccgggacggtgcgtagcgctggaagtccggccttccgagagctagctgtccgccgcggcccccgcacgccgggcagccgtccctcgccgcctcgggcgcgccaccatggggccccggctcagcgtctggctgctgctgctgcccgccgcccttctgctccacgaggagcacagccgggccgctgcgaagggtggctgtgctggctctggctgtggcaaatgtgactgccatggagtgaagggacaaaagggtgaaagaggcctcccggggttacaaggtgtcattgggtttcctggaatgcaaggacctgaggggccacagggaccaccaggacaaaagggtgatactggagaaccaggactacctggaacaaaagggacaagaggacctccgggagcatctggctaccctggaaacccaggacttcccggaattcctggccaagacggcccgccaggccccccaggtattccaggatgcaatggcacaaagggggagagagggccgctcgggcctcctggcttgcctggtttcgctggaaatcccggaccaccaggcttaccagggatgaagggtgatccaggtgagatacttggccatgtgcccgggatgctgttgaaaggtgaaagaggatttcccggaatcccagggactccaggcccaccaggactgccagggcttcaaggtcctgttgggcctccaggatttaccggaccaccaggtcccccaggccctcccggccctccaggtgaaaagggacaaatgggcttaagttttcaaggaccaaaaggtgacaagggtgaccaaggggtcagtgggcctccaggagtaccaggacaagctcaagttcaagaaaaaggagacttcgccaccaagggagaaaagggccaaaaaggtgaacctggatttcaggggatgccaggggtcggagagaaaggtgaacccggaaaaccaggacccagaggcaaacccggaaaagatggtgacaaaggggaaaaagggagtcccggttttcctggtgaacccgggtacccaggactcataggccgccagggcccgcagggagaaaagggtgaagcaggtcctcctggcccacctggaattgttataggcacaggacctttgggagaaaaaggagagaggggctaccctggaactccggggccaagaggagagccaggcccaaaaggtttcccaggactaccaggccaacccggacctccaggcctccctgtacctgggcaggctggtgcccctggcttccctggtgaaagaggagaaaaaggtgaccgaggatttcctggtacatctctgccaggaccaagtggaagagatgggctcccgggtcctcctggttcccctgggccccctgggcagcctggctacacaaatggaattgtggaatgtcagcccggacctccaggtgaccagggtcctcctggaattccagggcagccaggatttataggcgaaattggagagaaaggtcaaaaaggagagagttgcctcatctgtgatatagacggatatcgggggcctcccgggccacagggacccccgggagaaataggtttcccagggcagccaggggccaagggcgacagaggtttgcctggcagagatggtgttgcaggagtgccaggccctcaaggtacaccagggctgataggccagccaggagccaagggggagcctggtgagttttatttcgacttgcggctcaaaggtgacaaaggagacccaggctttccaggacagcccggcatgccagggagagcgggttctcctggaagagatggccatccgggtcttcctggccccaagggctcgccgggttctgtaggattgaaaggagagcgtggcccccctggaggagttggattcccaggcagtcgtggtgacaccggcccccctgggcctccaggatatggtcctgctggtcccattggtgacaaaggacaagcaggctttcctggaggccctggatccccaggcctgccaggtccaaagggtgaaccaggaaaaattgttcctttaccaggcccccctggagcagaaggactgccggggtccccaggcttcccaggtccccaaggagaccgaggctttcccggaaccccaggaaggccaggcctgccaggagagaagggcgctgtgggccagccaggcattggatttccagggccccccggccccaaaggtgttgacggcttacctggagacatggggccaccggggactccaggtcgcccgggatttaatggcttacctgggaacccaggtgtgcagggccagaagggagagcctggagttggtctaccgggactcaaaggtttgccaggtcttcccggcattcctggcacacccggggagaaggggagcattggggtaccaggcgttcctggagaacatggagcgatcggacccccctgggcttcaggggatcagaggtgaaccgggacctcctggattgccaggctccgtggggtctccaggagttccaggaataggcccccctggagctaggggtccccctggaggacagggaccaccggggttgtcaggccctcctggaataaaaggagagaagggtttccccggattccctggactggacatgccgggccctaaaggagataaaggggctcaaggactccctggcataacgggacagtcggggctccctggccttcctggacagcagggggctcctgggattcctgggtttccaggttccaagggagaaatgggcgtcatggggacccccgggcagccgggctcaccaggaccagtgggtgctcctggattaccgggtgaaaaaggggaccatggctttccgggctcctcaggacccaggggagaccctggcttgaaaggtgataagggggatgtcggtctccctggcaagcctggctccatggataaggtggacatgggcagcatgaagggccagaaaggagaccaaggagagaaaggacaaattggaccaattggtgagaagggatcccgaggagaccctgggaccccaggagtgcctggaaaggacgggcaggcaggacagcctgggcagccaggacctaaaggtgatccaggtataagtggaaccccaggtgctccaggacttccgggaccaaaaggatctgttggtggaatgggcttgccaggaacacctggagagaaaggtgtgcctggcatccctggcccacaaggttcacctggcttacctggagacaaaggtgcaaaaggagagaaagggcaggcaggcccacctggcataggcatcccaggactgcgtggtgaaaagggagatcaagggatagcgggtttcccaggaagccctggagagaagggagaaaaaggaagcattgggatcccaggaatgccagggtccccaggccttaaagggtctcccgggagtgttggctatccaggaagtcctgggctacctggagaaaaaggtgacaaaggcctcccaggattggatggcatccctggtgtcaaaggagaagcaggtcttcctgggactcctggccccacaggcccagctggccagaaaggggagccaggcagtgatggaatcccggggtcagcaggagagaagggtgaaccaggtctaccaggaagaggattcccagggtttccaggggccaaaggagacaaaggttcaaagggtgaggtgggtttcccaggattagccgggagcccaggaattcctggatccaaaggagagcaaggattcatgggtcctccggggccccagggacagccggggttaccgggatccccaggccatgccacggaggggcccaaaggagaccgcggacctcagggccagcctggcctgccaggacttccgggacccatggggcctccagggcttcctgggattgatggagttaaaggtgacaaaggaaatccaggctggccaggagcacccggtgtcccagggcccaagggagaccctggattccagggcatgcctggtattggtggctctccaggaatcacaggctctaagggtgatatggggcctccaggagttccaggatttcaaggtccaaaaggtcttcctggcctccagggaattaaaggtgatcaaggcgatcaaggcgtcccgggagctaaaggtctcccgggtcctcctggccccccaggtccttacgacatcatcaaaggggagcccgggctccctggtcctgagggccccccagggctgaaagggcttcagggactgccaggcccgaaaggccagcaaggtgttacaggattggtgggtatacctggacctccaggtattcctgggtttgacggtgcccctggccagaaaggagagatgggacctgccgggcctactggtccaagaggatttccaggtccaccaggccccgatgggttgccaggatccatggggcccccaggcaccccatctgttgatcacggcttccttgtgaccaggcatagtcaaacaatagatgacccacagtgtccttctgggaccaaaattctttaccacgggtactctttgctctacgtgcaaggcaatgaacgggcccatggccaggacttgggcacggccggcagctgcctgcgcaagttcagcacaatgcccttcctgttctgcaatattaacaacgtgtgcaactttgcatcacgaaatgactactcgtactggctgtccacccctgagcccatgcccatgtcaatggcacccatcacgggggaaaacataagaccatttattagtaggtgtgctgtgtgtgaggcgcctgccatggtgatggccgtgcacagccagaccattcagatcccaccgtgccccagcgggtggtcctcgctgtggatcggctactcttttgtgatgcacaccagcgctggtgcagaaggctctggccaagccctggcgtcccccggctcctgcctggaggagtttagaagtgcgccattcatcgagtgtcacggccgtgggacctgcaattactacgcaaacgcttacagcttttggctcgccaccatagagaggagcgagatgttcaagaagcctacgccgtccaccttgaaggcaggggagctgcgcacgcacgtcagccgctgccaagtctgtatgagaagaacataatgaagcctgactcagctaatgtcacaacatggtgctacttcttcttctttttgttaacagcaacgaaccctagaaatatatcctgtgtacctcactgtccaatatgaaaaccgtaaagtgccttataggaatttgcgtaactaacacaccctgcttcattgacctctacttgctgaaggagaaaaagacagcgataagctttcaatagtggcataccaaatggcacttttgatgaaataaaatatcaatattttctgcaatccaatgcactgatgtgtgaagtgagaactccatcagaaaaccaaagggtgctaggaggtgtgggtgccttccatactgtttgcccattttcattcttgtattataattaattttctacccccagagataaatgtttgtttatatcactgtctagctgtttcaaaatttaggtcccttggtctgtacaaataatagcaatgtaaaaatggttttttgaacctccaaatggaattacagactcagtagccatatcttccaaccccccagtataaatttctgtctttctgctatgtgtgggtactttggcagctgcttttgcaggaaatcacaattttcctgtgggaataaagatgggtccaaaaatagtcaaaaatttaaatatatatatatattaggtaatttatataggatgtcaggcaattagggcaggtccaggggtttaggttttaacttcccactggtttaaaataaaggctttacataggtttttctttcccnttggaaggactgtggctggtcccntttaacntaggggtttttaaagggccgggggtatttggantgtgggaacctcccgtttttccantgg

SEQ ID NO: 10880 - DNA, 4619 bp, Homo sapiens
gcgtccggcgccgactcctggcttttgcaaggctgtggtcggtggtcatcagtgctcttgacccaggtccagcgagccttttccctggtgttgcagctgttgttgtaccgccgccgtcgccgccgtcgccgcctgctctgcggggtcatggtgtgcttccgcctcttccccggttccgggctcagggctcgttctggtctgcctagtcctgggagctgtgcggtcttatgcattggaacttaatttgacagattcagaaaatgccacttgcctttatgcaaaatggcagatgaatttcacagttcgctatgaaactacaaataaaacttataaaactgtaaccatttcagaccatggcactgtgacatataatggaagcatttgtggggatgatcagaatggtcccaaaatagcagtgcagttcggacctggcttttcctggattgcgaattttaccaaggcagcatctacttattcaattgacagcgtctcattttcctacaacactggtgataacacaacatttcctgatgctgaagataaaggaattcttactgttgatgaacttttggccatcagaattccattgaatgacctttttagatgcaatagtttatcaactttggaaaagaatgatgttgtccaacactactgggatgttcttgtacaagcttttgtccaaaatggcacagtgagcacaaatgagttcctgtgtgataaagacaaaacttcaacagtggcacccaccatacacaccactgtgccatctcctactacaacacctactccaaaggaaaaaccagaagctggaacctattcagttaataatggcaatgatacttgtctgctggctaccatggggctgcagctgaacatcactcaggataaggttgcttcagttattaacatcaaccccaatacaactcactccacaggcagctgccgttctcacactgctctacttagactcaatagcagcaccattaagtatctagactttgtctttgctgtgaaaaatgaaaaccgattttatctgaaggaagtgaacatcagcatgtatttggttaatggctccgttttcagcattgcaaataacaatctcagctactgggatgcccccctgggaagttcttatatgtgcaacaaagagcagactgtttcagtgtctggagcatttcagataaatacctttgatctaagggttcagcctttcaatgtgacacaaggaaagtattctacagcccaagagtgttcgctggatgatgacaccattctaatcccaattatagttggtgctggtctttcaggcttgattatcgttatagtgattgcttacgtaattggcagaagaaaaagttatgctggatatcagactctgtaacactaatcaatacgtgatctctgttacaaaagaaaaaagcaagtacaagttccaacatgcaatactggtcaacttaaggtatatttagttgcagtccagctctttagaatgggtggtatgggggatttcaaacttaaacaaaaaactatcaactacaaattagttgcctgactttggtttttccaaccaaggaatttaaaactgttatttttacagcaaaagatgtgcaaaatcactggattataagttctattttactgtcttgaattagtatttcagtgttttcattttagacattcagactaaaaatacaccgtttagaaaaaacaatttttgaaaaagagattttttttccctgcaggtagttgagttggaacaacatgttctaccgtggatttgtacttgctccttttgctctttttgtgtgtgtgtgtgtgtgtgtgtgtgtgtgtgtgtgatttttgtttgcaggttaacttagctactttggcattgctgcatatttgacctttgagagatataatagtagatttgaacaggggctggtattattatgttcttagcaataaatgcttttctaatgccttttgaatacatttgtatttatgtggctgtaatgacaaaagatacaaaagctttttaaaatttagagtaggtattaatcttattgtttaatcttttttttaaaaaaactggatatttcaatcttttaaattgcaatatataagactattccaactgggcatttcaatccattttttaggtgctttagagataattgcttgccagtgccaattgagggcattagtactttgtgctcataaattggcctctgtatgcagtactaaaattaatgcagatttctctttagccttccaacatttcttgttgatagtgatgtattttattattttctttttcttaagaaatgccagtgtgtcctagaacctagataacgaagtgcacttacacttataaaataacttgcatctaggctgggcgtggcggctcacgcctgtaatcccagcactttgggaggccgaagtgggtggatcacttgaggccaggagtttgagaccagcctggccaacatggtgaaaccccatctctatcagaaatacaaaaaattagctgggcgtggtggtgggcgcctgtaatcccagttactcgggaggctgaggcaggagaatcacttgaacccgggaggcagaggttgcggtgagccaagagcgcaccattgcactccagcctgggcgacaaaaacgaaactccatctcaaaacaaaacaaaacaaaacaaacaaacaaacaaaacttgcatctaaccaaaaagtcttggttttatcttaatccattaaaaagttgttctttgtttccagcttgcattgattgctacaacatcactaatttggctttcacatttaaatggttctgtgctaatcaaaactttcgttgttattattcgttatggtagaatcatttttaattcacgtgctttgtgttcagttttgtggtctgagagatgtaccaattgtcaaattaccgtgtaccacctaatgtttataggagaaagcaaaatacatcagcttggtagttaacacatcaaatatttcttgctgcttctaggagaacttttttggtgtgtgttggaatggctgagcaaatattaaaattgttaatatgcagccatatatggaaggttcctgtggggttgttttttcgtgttttttttttttttgtggtgggattatgtgcctcccattcactagaaaatgagaaaattgtctgggttccaaaatattgacattgaatggatcaatacacacacacagacatatatatatatatgcacacatatataggcagctgcatgctagcatgggtatttttataacaatataactgagttatattggaattataaatattttctgtcacttaaatttgttctttgtttagcctgaaaacctttatggctcaagatcagattcctgactaacccctctcttagagctacagcgagctgcattaccagcttaaaacacttcttagggattaaatatagatgtaatttttcaaaatcgtttttaatttaaactgtgttttagtgtaaaattgttaaccttgtaagatggataatgtgtataagaatgtaggccttaactatttcacatgagtcaaaacaaagcagctttaaaaaaataattggaagcacaagtgcatggcactgactgaatgctgttaatatttctaaaagtttctacattcagattatatgcctgattcatagtaaaatacctctaataaacactgttttatagaaaacctgacttcagtgaatatttttgtattttacatgggccagtttatatactgctatttacactattatttcctatagctacatgttctttgtaccttttgtagttttatttgtattactagattcataccttgatggtaacgctctatctggttttgggtgtttttcatgttttagcatttgtataaagaaactggtccatgtaaatactttccatgtttttttcttcaaatgtttaaaccactagttgatgtatggtatctttagatatttgcctgtctgtttgctcaaaattgcttctaaaacaaaataaagattcttttataattttcttaaaaaaaaaaaaaaaaaaaacacaaacacaaaacaagaaaaacacaacacaaagaaaaaccacaagaaacagaagaaaaacaaaaagcaaaacagagagacagagagagcagagaagggaaacaaaaacgaacaggaacaccaggagagagcagaccactcaagcaggagaagcggagaacgagggcgggaggaggaggctgaggcgcggaggcgaggaaagagaggcaacgagcccggggggaaggggcaggacacagagagaagcagcacaaactggagaaggaaccaaaaaactgactcgaacagagagaccaacacacaaagatgcagcaagaagcgaaggaagaagaacagacatagaagaaacaaagtagagcacaaaagaagggaacccgaacaaagtaagatagacggagataccgcaggacatccaaaaagagagacacaaagtacagaacgagacgaagagagagacaaaccaagcactacgaagaaggagaagaggagcaagacaaacagagacgcatggacaaaacagatagaagcgagagcaagtaccagataccagtaagccgcacgc

SEQ ID NO: 10881 - DNA, 3186 bp, Homo sapiens
cggaagtcttctagaattaattaacgcggggctctcagaaccttcctgccgtcgcgtttgcacctcgctgctccagcctctggggcgcattccaaccttccagcctgcgacctgcggagaaaaaaaattacttattttcttgccccatacataccttgaggcgagcaaaaaaattaaattttaaccatgagggaaatcgtgcacatccaggctggtcagtgtggcaaccagatcggtgccaagttctgggaggtgatcagtgatgaacatggcatcgaccccaccggcacctaccacggggacagcgacctgcagctggaccgcatctctgtgtactacaatgaagccacaggtggcaaatatgttcctcgtgccatcctggtggatctagaacctgggaccatggactctgttcgctcaggtccttttggccagatctttagaccagacaactttgtatttggtcagtctggggcaggtaacaactgggccaaaggccactacacagagggcgccgagctggttgattctgtcctggatgtggtacggaaggaggcagagagctgtgactgcctgcagggcttccagcctgcgacctgcggagaaaaaaaaattacttattttcttgccccatacataccttgaggcgagcaaaaaaattaaattttaaccatgagggaaatcgtgcacatccaggctggtcagtgtggcaaccagatcggtgccaagttctgggaggtgatcagtgatgaacatggcatcgaccccaccggcacctaccacggggacagcgacctgcagctggaccgcatctctgtgtactacaatgaagccacaggtggcaaatatgttcctcgtgccatcctggtggatctagaacctgggaccatggactctgttcgctcaggtccttttggccagatctttagaccagacaactttgtatttggtcagtctggggcaggtaacaactgggccaaaggccactacacagagggcgccgagctggttgattctgtcctggatgtggtacggaaggaggcagagagctgtgactgcctgcaggtcttccagctgacccactcactgggcgggggcacaggctctggaatgggcactctccttatcagcaagatccgagaagaataccctgatcgcatcatgaataccttcagtgtggtgccttcacccaaagtgtctgacaccgtggtcgagccctacaatgccaccctctccgtccatcagttggtagagaatactgatgagacctattgcattgacaacgaggccctctatgatatctgcttccgcactctgaagctgaccacaccaacctacggggatctgaaccaccttgtctcagccaccatgagtggtgtcaccacctgcctccgtttccctggccagctcaatgctgacctccgcaagttggcagtcaacatggtccccttcccacgtctccatttctttatgcctggctttgcccctctcaccagccgtggaagccagcagtatcgagctctcacagtgccggaactcacccagcaggtcttcgatgccaagaacatgatggctgcctgtgacccccgccacggccgatacctcaccgtggctgctgtcttccgtggtcggatgtccatgaaggaggtcgatgagcagatgcttaacgtgcagaacaagaacagcagctactttgtggaatggatccccaacaatgtcaagacagccgtctgtgacatcccacctcgtggcctcaagatggcagtcaccttcattggcaatagcacagccatccaggagctcttcaagcgcatctcggagcagttcactgccatgttccgccggaaggccttcctccactggtacacaggcgagggcatggacgagatggagttcaccgaggctgagagcaacatgaacgacctcgtctctgagtatcagcagtaccaggatgccaccgcagaagaggaggaggatttcggtgaggaggccgaagaggaggcctaaggcagagcccccatcacctcaggcttctcagttcccttagccgtcttactcaactgcccctttcctctccctcagaatttgtgtttgctgcctctatcttgttttttgttttttcttctgggggggggtctagaacagtgcctggcacatagtaggcgctcaataaatacttgtttgttgaatgtctcctctctctttccactctgggaaacctaggtttctgcccattctgggtgaccctgtatttctttctgggtgcccattccatttgtccagttaatacttcctcttaaaaatctccaagaagctgggtctccagatcccatttagaaccaaccaggtgctgaaaacacatgtagataatggccatcatcctaagcccaaagtagaaaatggtagaaggtagtgggtagaagtcactatataaggaaggggatgggattttccattctaaaagttttggagagggaaatccaggctattaaagtcactaaatttctaagtatgtccatttcccatctcagcttcaagggaggtgtcagcagtattatctccactttcaatctccctccaagctctactctggaggagtctgtcccactctgtcaagtggaatccttccctttccaactctacctccctcactcagctcctttcccctgatcagagaaagggatcaagggggttgggaggggggaaagagaccagccttggtccctaagcctccagaaacgtcttcttaatccccaccttttcttactcccaaaaaagaatgaacacccctgactctggagtggtgtatactgccacatcagtgtttgagtcagtccccagaggagaggggaaccctcctccatcttttttgcaacatctcatttcttccttttgctgttgcttcccccctcacacacttggttttgttctatcctacatttgagatttctattttatgttgaacttgctgctttttttcatattgaaaagatgacatcgccccaagagccaaaaataaatgggaattgaaaaaaaaaaaaaaaacacaacagaaacaaccccggaggaacattaggggggggcgaaaaaaggctttcatcggcgccttggctcaaggttttcgcggacccatttttgttcgcagggaaattcggggtcccaaggaggcgataatggaaccggacg

SEQ ID NO: 10882 - DNA, 492 bp, Homo sapiens
  misc_feature 323, 324, 325, 326, 327, 328, 329, 330, 331, 332, 333, 334,335, 336, 337, 338, 339, 340, 341, 342, 343, 344, 345, 346,347, 348, 349, 350, 351, 352, 353, 354, 355, 356, 357, 358,359, 360, 361, 362, 363, 364, 365, 366, 367, 368, 369: n = A,T,C or G
  misc_feature 370, 371, 372, 373, 374, 375, 376, 377, 378, 379, 380, 381,382, 383, 384, 385, 386, 387, 388, 389, 390, 391, 392, 393,394, 395, 396, 397, 398, 399, 400, 401, 402, 403, 404, 405,406, 407, 408, 409, 410, 411, 412, 413, 414, 415, 416: n = A,T,C or G
  misc_feature 417, 418, 419, 420, 421, 422, 423, 424, 425, 426, 427, 428,429, 430, 431, 432, 433, 434, 435, 436, 437, 438, 439, 440,441, 442, 443, 444: n = A,T,C or G
acgcggggagcccgataaaggtcctgcgggcaggacagggggtcccaaccaagccctccagcaaggattcagagtgcccctccggcctcgccatgaggctcttcctgtcgctcccggtcctggtggtggttctgtcgatcgtcttggaagggagtggttttcagagacatttcagaaagtgaaggagaaactcaagattgactcatgaggacctgaagggtgacatcccaggaggggcctctgaaatttcccacaccccagcgcctgtgctgaggactccctccatgtggccccaggtgccaccaataaaaatcctaccaaannnnnnnnnnnnnnnnnnnnnnnnnnnnnnnnnnnnnnnnnnnnnnnnnnnnnnnnnnnnnnnnnnnnnnnnnnnnnnnnnnnnnnnnnnnnnnnnnnnnnnnnnnnnnnnnnnnnnnnnnnggggggcccgttaaattattttaaaaaaaaaaccccccaccccccccc

SEQ ID NO: 10883 - DNA, 539 bp, Homo sapiens
  misc_feature 1, 2, 3, 4, 5, 6, 7, 8, 9, 10, 11, 12, 13, 14, 15, 16, 17,18, 19, 20, 21, 22, 23, 24, 25, 26, 27, 28, 29, 30, 404,426, 520, 539: n = A,T,C or G
nnnnnnnnnnnnnnnnnnnnnnnnnnnnnnttttacagatgctttcagtttaatagttgttttaaattttttttttttttttttttaggttttaggctgaagacgtaaagcctgctgctcctgggtatcatttctcagcttctccttacagctatagtacatagaatactcctttttttaagtctaagtagcttcagaccaaatcggtctgacccagaatacctgctagtatggagagtgggatggggagaaggtaactagaaaatgcaagatcatgtttaccccaacagcatagaaccacgctagctggggctctggctgggaggagatgctagtcattctctccccatgcacaaatggtttatagctatgtggtccaatatggtacctaatagccacatgtngtattttaaatttagttaaaanggaataaaagttaaacttaagttcttcgcactacccggtatttcaagtgttcaaatgtgggctcatggctaccatattggatagcacagaatcnaaccatttccattggtcan

SEQ ID NO: 10884 - DNA, 445 bp, Homo sapiens
ttggagctccaccgcggtggccggccgcccgggcaggtacgcgggaagaagggacaaaactaagggtaagcgaactttggttctaggaatggcaagaccagcaagaagatcaccattgccaactgtagcctttacacaatgtcatagtagcccaaattcagtcagctattgaattaagtttattggcttcttggccaggctaaagaatgtatgaatgctgtctttagaagataacatcatatggaggttctacaacttcttagacacaatgtcaagcttttagtaaaattatactagacattcaagagatgggattgaaaaccaagagaaagggcagacaattgaaatatactcacagatgattcaggcagtggagttaagaccaggacttgaaataacaatgataattgttcaagaaaatagaagacagggaaaaaaaaaaaaa

SEQ ID NO: 10885 - DNA, 292 bp, Homo sapiens
  misc_feature 1, 2, 3, 4: n = A,T,C or G
nnnncgaattggaagctccaccgcggtggcggccgaggtacgcgggagagttctgcctcgcttcccggcgcggtcgcagccctcagcccacttaggataatggcgacagctgaggtacattgtgatacaacttcttcacagatgaaggccagcagagacagcaacagctgcaagcccttgagaacgcgccggagcaatgggagccggcccatgaaaaagtaggcagcgaggccgctccgggggcctctggcggggcccgggtcctcctccgtagtggggctgtacctgcccg

SEQ ID NO: 10886 - DNA, 1129 bp, Homo sapiens
  misc_feature 1, 2, 3, 4, 5, 1129: n = A,T,C or G
nnnnnaacgcagggttttcccagtcacgacgttgtaaaacgccggccagtgaattgtaatacgactcactatagggcgaattgggtaccgggccccccctcgaggttttttggtttttgttttttttttttttttttttttttttttatcagcttttaaaatttcatgtttattcatatttttcaaaatatatgtacattaaaaaaggaagatttacaacaggaaagattgccttacatgcaacacaaattccaatgaattcatgatgggatcacacatgattatgatctaattcaagccaatcttctcaagtccatttcccagccatactttaggctacagaagggatcccaggagacaaaagtggaatgaataagaaacaaacatcttttgcctctggcagtactcaaggggccagaagatgtacttcaaaaactttaagacaattaaaatgtcaagtgccacagggaagagaaatgataaccagaaatttgtatttctagctagtactatttaacacaacttcacaatactaaaacaaatacaaataagaaagggttaggtagttgggcttcatttacttttttccttttctttttttttttaatatctcaaaaaggaagccacttgcttgatatcaaaagtgctgtggaaagaaaggaggggaaaaaaacccacaaataaatgtagaatctagtttattttaccaaactgtatatttttccacttaacatttctacattagcaatgatgtaactctccaacatttccttataaaaaaggcaaacaagaagtgacaactcatgctccaaatattaaaaaatatatttaaacatatgatcaagaagatttgggccgtgagtggtagctcacatctgtaaccccaggattttgggaggctgaggtgagtggatcacgaggtcaggagatcgagaccatcctggctaacatggtgaaaccccaactctactaaaaatacaaaaaattagctgggcgtggtcgtgtgcgcctgtaggacccaactcaggaggctgaggtgggagaatcgcttgaacctgggaggcggagtttgcagtgagccaagatcacaccactgcactccacactgggcgacagagcgagactctgn

SEQ ID NO: 10887 - DNA, 3727 bp, Homo sapiens
cgtgcactgagggtggacgtagaggccaggagtagcaggcggccggggaaaagaggtggagaaaggaaaaaagaggagaaaagtggaggagggcgagtaggggggtggggcagagaggggcgggcccgagtgckccccccgcccccagccccgctctgccagctccctcccagcccagccggctacatctggcggctgccctcccttgtttccgctgcatccagacttcctcaggcggtggctggaggctgcgcatctggggctttaaacatacaaagggattgccaggacctgcggcggcggcggcggcggcgggggctggggcgcgggggccggaccatgagccgctgagccgggcaaaccccaggccaccgagccagcggaccctcggagcgcagccctgcgccgcggagcaggctccaaccaggcggcgaggcggccacacgcaccgagccagcgacccccgggcgacgcgcggggccagggagcgctacgatggaggcgctaatggcccggggcgcgctcacgggtcccctgagggcgctctgtctcctgggctgcctgctgagccacgccgccgccgcgccgtcgcccatcatcaagttccccggcgatgtcgcccccaaaacggacaaagagttggcagtgcaatacctgaacaccttctatggctgccccaaggagagctgcaacctgtttgtgctgaaggacacactaaagaagatgcagaagttctttggactgccccagacaggtgatcttgaccagaataccatcgagaccatgcggaagccacgctgcggcaacccagatgtggccaactacaacttcttccctcgcaagcccaagtgggacaagaaccagatcacatacaggatcattggctacacacctgatctggacccagagacagtggatgatgcctttgctcgtgccttccaagtctggagcgatgtgaccccactgcggttttctcgaatccatgatggagaggcagacatcatgatcaactttggccgctgggagcatggcgatggatacccctttgacggtaaggacggactcctggctcatgccttcgccccaggcactggtgttgggggagactcccattttgatgacgatgagctatggaccttgggagaaggccaagtggtccgtgtgaagtatggcaacgccgatggggagtactgcaagttccccttcttgttcaatggcaaggagtacaacagctgcactgataccggccgcagcgatggcttcctctggtgctccaccacctacaactttgagaaggatggcaagtacggcttctgtccccatgaagccctgttcaccatgggcggcaacgctgaaggacagccctgcaagtttccattccgcttccagggcacatcctatgacagctgcaccactgagggccgcacggatggctaccgctggtgcggcaccactgaggactacgaccgcgacaagaagtatggcttctgccctgagaccgccatgtccactgttggtgggaactcagaaggtgccccctgtgtcttccccttcactttcctgggcaacaaatatgagagctgcaccagcgccggccgcagtgacggaaagatgtggtgtgcgaccacagccaactacgatgatgaccgcaagtggggcttctgccctgaccaagggtacagcctgttcctcgtggcagcccacgagtttggccacgccatggggctggagcactcccaagaccctggggccctgatggcacccatttacacctacaccaagaacttccgtctgtcccaggatgacatcaagggcattcaggagctctatggggcctctcctgacattgaccttggcaccggccccacccccacactgggccctgtcactcctgagatctgcaaacaggacattgtatttgatggcatcgctcagatccgtggtgagatcttcttcttcaaggaccggttcatttggcggactgtgacgccacgtgacaagcccatggggcccctgctggtggccacattctggcctgagctcccggaaaagattgatgcggtatacgaggccccacaggaggagaaggctgtgttctttgcagggaatgaatactggatctactcagccagcaccctggagcgagggtaccccaagccactgaccagcctgggactgccccctgatgtccagcgagtggatgccgcctttaactggagcaaaaacaagaagacatacatctttgctggagacaaattctggagatacaatgaggtgaagaagaaaatggatcctggctttcccaagctcatcgcagatgcctggaatgccatcccggataacctggatgccgtcgtggacctgcagggcggcggtcacagctacttcttcaagggtgcctattacctgaagctggagaaccaaagtctgaagagcgtgaagtttggaagcatcaaatccgactggctaggctgctgagctggccctggctcccacaggcccttcctctccactgccttcgatacaccgggcctggagaactagagaaggacccggaggggcctggcagccgtgccttcagctctacagctaatcagcattctcactcctacctggtaatttaagattccagagagtggctcctcccggtgcccaagaatagatgctgactgtactcctcccaggcgccccttccccctccaatcccaccaaccctcagagccacccctaaagagatcctttgatattttcaacgcagccctgctttgggctgccctggtgctgccacacttcaggctcttctcctttcacaaccttctgtggctcacagaacccttggagccaatggagactgtctcaagagggcactggtggcccgacagcctggcacagggcagtgggacagggcatggccaggtggccactccagacccctggcttttcactgctggctgccttagaacctttcttacattagcagtttgctttgtatgcactttgtttttttctttgggtcttgttttttttttccacttagaaattgcatttcctgacagaaggactcaggttgtctgaagtcactgcacagtgcatctcagcccacatagtgatggttcccctgttcactctacttagcatgtccctaccgagtctcttctccactggatggaggaaaaccaagccgtggcttcccgctcagccctccctgcccctcccttcaaccattccccatgggaaatgtcaacaagtatgaataaagacacctactgagtggccgtgtttgccatctgttttagcagagcctagacaagggccacagacccagccagaagcggaaacttaaaaagtccgaatctctgctccctgcagggcacaggtgatggtgtctgctggaaaggtcagagcttccaaagtaaacagcaagagaacctcagggagagtaagctctagtccctctgtcctgtagaaagagccctgaagaatcagcaattttgttgctttattgtggcatctgttcgaggtttgcttcctctttaagtctgtttcttcattagcaatcatatcagttttaatgctactactaacaatgaacagtaacaataatatccccctcaattaatagagtgctttctatgtgcaaggcacttttcacgtgtcacctattttaacctttccaaccacataaataaaaaaggccattattagttgcggacgcgtgggcggacgc

SEQ ID NO: 10888 - DNA, 246 bp, Homo sapiens
aggtactccgaaacaagtagaaaagtgctgtttgagggattttattaaatctttttttaatggaatgtggtacagttagctgtcactcagctgacaccatgatgtggcagcagagagggaaacctacaagtggtttgcctcattgcctttgccacatctgaagttctcagcagcactaccttagacttcatgagctaataggaaactttttatggtgtaaatgctgtaagactttgtacctgcccg

SEQ ID NO: 10889 - DNA, 431 bp, Homo sapiens
  misc_feature 1, 2, 3, 4, 5: n = A,T,C or G
nnnnnctggacattgttgaggtctagaattgtctatacaatgccctgtacaagctacattgctgtcattttcaaaatcaggagtttatttggattacatatactttgtgcttaattttaagtaatgattacttcaagactggtgaattatacgtgactttttgtgcctgttctttataggctatggaaagggcaaatggaatggagctggatggtagaagaattcgggtggattattctataaccaagagagcgcacacaccaacaccaggcatttacatgggcagaccaactcagtaagagttcaagtttcctaagctaaactatgaaatccaccagaaatatgtgcaaaattttgattactcagaaacttttttcctataattagaattgattctggcaaggggcaacatggcaaaaccctgcttctac

SEQ ID NO: 10890 - DNA, 2168 bp, Homo sapiens
  misc_feature 1, 2166, 2167, 2168: n = A,T,C or G
ncctcaaactcctgggctcgtgtgatcctcctgcctcggcctcccaaagtgctgggattgcaggtgtcagccactgtacctggctgaatacttggttttcagtaccacaagaactatgagctggttatccacttcatgtggaatcataagcgtcccaaagtgacaatacatatagattgccaggcagtgaaacagttaagatgccaccatagctttcttttcaacatctttctaagattaccttactatttcttttgttccaagtttgtacttcctcacagttctcacatatggaaaggatacacactttgtagaaacaagaactttatgttatccaagttctaggatagccatgagctccaattatctcagagctctgagtcctctactcaatacccattgagatttatgtgttctgaggcttttgtcttctagctacttacttcattctccatgggtaacgtcattcatccacattaactaatttcctcactccaagctcttttctagagataatctccagtccctgtgcagaaactgtcattgcactttctgctgaaatggcagtttcttctcagcaaggtgagattatggaatccagaatcttttttcaggggtcacatgcccatttccccacttgcatgaatgtcgacactgcagccacagttttggccgtaaatgtgaatttggcaagtaaccactgttcccagggaaatgtcccaatcagaagaagattatctgggacactgatactgacagggagatgggacattctgagggacccggaggcagggtgccacctcctcaacttccctgagggctgcctagaatctgtttcctctcactctgaattattcttcctcttatggctgaccaaaaacatggaacctcacaaagtccactgtaacagctttatatttgtgaagtgaagaacatgaagacagtttcaagcaaagttattgagtggacactttgtgttttttttgagaagtctcactctttcacccaggctggagtgcagtggcacgatctcggctcactgcaactccacctcccgggttcacgccattctcttgcctcagcctcctgagtagctgggaccacaagcgcccaccacgtcagcttaatttttttgttttgtttcttgagacagagtcttgctctcttgcccaggttggagtgccgtgtcgcaatctcagctcactgcaacttctacctcctggattcaagcacttctccttgcctcagccacctctttagctgggattacaggtgcgtgccaccacacccagctaatctcaccttgtattacagcatgttatataagcacatacaggcacatacatgaaatagtgatacttcattctcagtaatattttcatccttctcactggaaagatctttgatgatttttaatcaacataggagtttcaatgatatctagaagtttaaaagggctcgttcaaacaaattatgaccacacacactgaagagtatgtttgtctcttgtggtgtaaatttttttttattacaccaaattatgttcacacaaaacctttgtaatcagggggaattaaagagccttcctggaaaatggaggttgcaatcagccgagatggtgccatcgcactctagcctggggaatagagtgagatcctgcctcaaaaaaaacaaaaaaattctttattttctccataaactacagtttatataagcaaaagtttcagtactaagcaattttagtctctgcagtctcttgtcttgaattaatacaacttttgttaattctcttatgaagttaatcttcctgcttgtatgtgaattaaatatatgtcaaactttttttgtacaaaagattcatacctctttcctgtttgaaattattttactgtgtttcatcaatctaatgtttatttttattacaccagtaatttcctcatgtgtgttgaatcttacagtggttataaatctacatgtacctagaaaatgtttagccagtccatgtatatttgatgtggcccattttttcctttggaatcacatactcttaagagaagtaattcttcttgtaactctattccttcgtggtgattaatctcttgatgaaataatcctttcatagtgaagacttaagattcggcggggggcagcgaccaaagaaagcannn

SEQ ID NO: 10891 - DNA, 425 bp, Homo sapiens
  misc_feature 425: n = A,T,C or G
gttgcttaaaacaacagccattttatttaatatctcatgattttgtggtcaggaatgtggacagagctcagctgggagattgttccactccatgtagcatcagaagacaggtctcttggtgatattcagctggagaataagttaatatgcagagttcaagatggtttcactcacattgacaccttggcagggatggctggagggctgggctcagccagatcagttaactggcgtgcctgcatatgcactctccaccatggtggtctctagaattgactcaaatctagaattggcgatgcatcccgtcagtcagcagctgtttacggaacaccagctgcaggccaggcaccgtgctgcaaggcgtagatatgttgctgaacacgactcccttccagatgttcaggatttaacaggcaagttaacan

SEQ ID NO: 10892 - DNA, 1119 bp, Homo sapiens
  misc_feature 1, 2, 1110, 1111, 1112, 1113, 1114, 1115, 1116, 1117, 1118,1119: n = A,T,C or G
nnttcgagtgctcctggtgtcgacccacgcgtgcatgacggtgtcgacccacgcgtccgcgcgcggcgctccaaagctcggggagtggttgtctccctttcctggagtcatttgtgggagttagggtcttatcctgatctttcctcgtcccccgctcccccgtcctccgaggtggcagctgcgtagaagtctggaacgttttttcttagagttccagaattgtgactgaagtgtacccagagacacaaagaaatacagaagtccagaatgatcaaatgagatcactacccaatgaaatgataggccgaggagccagaaattgtcctactacctgctttccaggtccagattccacgagagccttctgggctcccaccagagaccctcagtgaagactctgttgaagactttaagaccatgctagaaagcctcccggcagaggttcaggaagttctgctatgaggatgcagctggccccagggatgtcctcaggcatctctaggaccttgctggacggtggtggctgagacctgatatccacacaaaggagcagactgtggaaatgctggtgcaggagcaattccaggctgtcctgcccgaggagctcagagctcaagcacagagatgtcagcctggaatcagaatcactggctaaagcttgctgcttgttcttgctcagcctgcatatgagaagcaacccaaccttctcttgggtggcagatccaactggacccaggggaaattggacttcactttctttgagcttggtttggttgtaaaagaaatcattaaaacccaggtgggactctttttggctggggagctttttttccaccagggtttttgtctttttttagacaatcaacctgttgtttgggcttttcagggctttttttaattgtggaggccatgcctctttttttttttttttttgcactttgtgacatgctttaatatatatattttttatgtatccaaagaggtaatcaactttaactttcagaattcatgaatcttggtttggtggcatgaatgaaaggttatgtaaccccaccagtaactcatttggggtgcccttgaaatattaaagtttggtcatcaataaatgcnnnnnnnnnn

SEQ ID NO: 10893 - DNA, 1428 bp, Homo sapiens
  misc_feature 1422, 1423, 1424, 1425, 1426, 1427, 1428: n = A,T,C or G
gcgtccggcgggacccgctgggcactcccgcgcgtactcggccgcctgagcgatactaaaatgtctgatgatgctggtgacaccttagccactggagacaaagcagaagttactgagatgcctaatagtgattctttacctgaggatgcagaagtgcattgtgattcagctgcagtttcacatgagccaacaccagctgaccccagaggggaggggcatgaaaatgcagctgtgcagggtgcaggggctgccgccattgggccccctgtgcagcctcaggatgccaacgccctggagccccctctcaatggagacgtgactgaggatacacttgctgaatgtattgattccgtcagccttgaggcagaacccagatccgaaatacccctgcaagaacagaattatctggctgtggattcccctccaagtggaggaggatgggcaggctggggatcctggggcaaatctctgctgtcgtcagcatctgccacagtaggtcatggattgacggcagtcaaggaaaaagcaggagccactctacggattcatggtgtaaattctggatcttctgaaggagcccaaccaaatactgaaaacggagtccctgaaataacagatgcagccacagatcagggccctgcagaaagcccacccacttccccttcatcagcctctcggggtatgctgtctgccatcaccaatgtggttcaaaacacaggtaaaagtgtcttaactggaggccttgatgcgttggaattcatcggcaagaaaaccatgaatgtccttgcagaaagtgacccgggctttaagcggaccaagacgctcatggagagaactgtttccttgtctcagatgttaagggaagctaaggagaaggagaagcagagactggcacagcagctcacgatggagagaaccgcgcactacgggatgctgtttgatgaatatcaaggcttgtcacacctggaagccctggaaattctgtccaatgaaagcgaaagcaaggttcagtcatttttagcatcacttgatggagagaagctggaactcttaaaaaatgacctaatttccattaaagacatctttgcagccaaagaattagagaatgaagaaaatcaagaagaacaaggcttagaagaaaagggagaagaatttgctcgcatgcttacagagcttctctttgaattacatgtggcggccacacctgacaaactcaataaggccatgaagagggctcatgactgggtggaagaggatcaaaccgtggtgtcagtagatgtggcaaaagtgtccgaagaagaaacaaagaaggaagaaaaggaagagaaatctcaagaccctgaaggcaagggaaaggggagaggagaggagaacaagggcgaccacaacgaaaagcacccggagaacacaaaccccgacgannnnnnn

SEQ ID NO: 10894 - DNA, 599 bp, Homo sapiens
  misc_feature 1, 2, 3, 4, 5, 6, 7, 8, 9, 10, 11, 598, 599: n = A,T,C or G
nnnnnnnnnnngagacagtctcgaaacaaaacaaacaaaatcagagtcctctgcactgggaggaggcatgtggggggacccatgcctgcacttggtagtgaagaagaaagggagacaccaggcccatgtacccttgggcatactaagaaactggcatgtgtgggcagcagccctctctctgcgcatgcccaaaggtggaggtctttttggaaaatgttgaaaggacaggtgggtaggggtgtggatgacaaatggaatctggagcatgatatgggagagaccacagcagaaggaagatccccgccggggggagctccatggtgtgcattttggctttcagggtataaagggggaaacaatagggaaagacttggtgcaaaagggaaggaacagaaacagacagatgagaaaaggaagatgacagcattgcaagtgtttctttcaatccttgccaggccaggctttgtttagctaccctggtctcttcctgcataccccagcccccgtttacctggggaatggggagcaaagaacaggatcagagcatgatctgaaaagaacactgagccttctccctgctggaacccccaccccaccnn

SEQ ID NO: 10895 - DNA, 698 bp, Homo sapiens
  misc_feature 1, 2, 691, 692, 693, 694, 695, 696, 697, 698: n = A,T,C or G
nncgtccgcccgcggcggtgggcggggtccggggcggggccgcaggagcagtaggtgttagcagcttggtcgcgacaggtgcgctaggtagagcgccgggacctgtgacagggctggtagcagcgcagaggaaaggcggcttttagccaggtatttcagtgtctgtagacaagatggaatcatctccatttaatagacggcaatggacctcactatcattgagggtaacagccaaagaactttctcttgtcaacaagaacaagtcatcggctattgtggaaatattctccaaaacaccgaaaatctctcccagcactttagaaaggggaccctgactgtgttaaagaagaagtgggagaacccagggctgggagcagagtctcacacagactctctacggaacagcagcactgagattaggcacagagcagaccatcctcctgctgaagtgacaagccacgctgcttctggagccaaagctgaccaagaagaacaaatccaccccagatctagactcaggtcacctcctgaagccctcgttcagggtcgatatccccacatcaaggacggtgaggatcttaaagaccactcaacagaaagtaaaaaaatggaaaattgtctaggagaatccaggcatgaagtagaaaaatcagaaatcagtgaaaacacagatgctttcgggcaaatagannnnnnnn

SEQ ID NO: 10896 - DNA, 4642 bp, Homo sapiens
  misc_feature 1, 2, 3, 4, 4635, 4636, 4637, 4638, 4639, 4640, 4641, 4642: n = A,T,C or G
nnnnctcgagctcgtcgaccggtcgacgagctcgagggtcgacgagctcgagggcgcgcgcccggcccccacccctcgcagcaccccgcgccccgcgccctcccagccgggtccagccggagccatggggccggagccgcagtgagcaccatggagctggcggccttgtgccgctgggggctcctcctcgccctcttgccccccggagccgcgagcacccaagtgtgcaccggcacagacatgaagctgcggctccctgccagtcccgagacccacctggacatgctccgccacctctaccagggctgccaggtggtgcagggaaacctggaactcacctacctgcccaccaatgccagcctgtccttcctgcaggatatccaggaggtgcagggctacgtgctcatcgctcacaaccaagtgaggcaggtcccactgcagaggctgcggattgtgcgaggcacccagctctttgaggacaactatgccctggccgtgctagacaatggagacccgctgaacaataccacccctgtcacaggggcctccccaggaggcctgcgggagctgcagcttcgaagcctcacagagatcttgaaaggaggggtcttgatccagcggaacccccagctctgctaccaggacacgattttgtggaaggacatcttccacaagaacaaccagctggctctcacactgatagacaccaaccgctctcgggcctgccacccctgttctccgatgtgtaagggctcccgctgctggggagagagttctgaggattgtcagagcctgacgcgcactgtctgtgccggtggctgtgcccgctgcaaggggccactgcccactgactgctgccatgagcagtgtgctgccggctgcacgggccccaagcactctgactgcctggcctgcctccacttcaaccacagtggcatctgtgagctgcactgcccagccctggtcacctacaacacagacacgtttgagtccatgcccaatcccgagggccggtatacattcggcgccagctgtgtgactgcctgtccctacaactacctttctacggacgtgggatcctgcaccctcgtctgccccctgcacaaccaagaggtgacagcagaggatggaacacagcggtgtgagaagtgcagcaagccctgtgcccgagtgtgctatggtctgggcatggagcacttgcgagaggtgagggcagttaccagtgccaatatccaggagtttgctggctgcaagaagatctttgggagcctggcatttctgccggagagctttgatggggacccagcctccaacactgccccgctccagccagagcagctccaagtgtttgagactctggaagagatcacaggttacctatacatctcagcatggccggacagcctgcctgacctcagcgtcttccagaacctgcaagtaatccggggacgaattctgcacaatggcgcctactcgctgaccctgcaagggctgggcatcagctggctggggctgcgctcactgagggaactgggcagtggactggccctcatccaccataacacccacctctgcttcgtgcacacggtgccctgggaccagctctttcggaacccgcaccaagctctgctccacactgccaaccggccagaggacgagtgtgtgggcgagggcctggcctgccaccagctgtgcgcccgagggcactgctggggtccagggcccacccagtgtgtcaactgcagccagttccttcggggccaggagtgcgtggaggaatgccgagtactgcaggggctccccagggagtatgtgaatgccaggcactgtttgccgtgccaccctgagtgtcagccccagaatggctcagtgacctgttttggaccggaggctgaccagtgtgtggcctgtgcccactataaggaccctcccttctgcgtggcccgctgccccagcggtgtgaaacctgacctctcctacatgcccatctggaagtttccagatgaggagggcgcatgccagccttgccccatcaactgcacccactcctgtgtggacctggatgacaagggctgccccgccgagcagagagccagccctctgacgtccatcatctctgcggtggttggcattctgctggtcgtggtcttgggggtggtctttgggatcctcatcaagcgacggcagcagaagatccggaagtacacgatgcggagactgctgcaggaaacggagctggtggagccgctgacacctagcggagcgatgcccaaccaggcgcagatgcggatcctgaaagagacggagctgaggaaggtgaaggtgcttggatctggcgcttttggcacagtctacaagggcatctggatccctgatggggagaatgtgaaaattccagtggccatcaaagtgttgagggaaaacacatcccccaaagccaacaaagaaatcttagacgaagcatacgtgatggctggtgtgggctccccatatgtctcccgccttctgggcatctgcctgacatccacggtgcagctggtgacacagcttatgccctatggctgcctcttagaccatgtccgggaaaaccgcggacgcctgggctcccaggacctgctgaactggtgtatgcagattgccaaggggatgagctacctggaggatgtgcggctcgtacacagggacttggccgctcggaacgtgctggtcaagagtcccaaccatgtcaaaattacagacttcgggctggctcggctgctggacattgacgagacagagtaccatgcagatgggggcaaggtgcccatcaagtggatggcgctggagtccattctccgccggcggttcacccaccagagtgatgtgtggagttatggtgtgactgtgtgggagctgatgacttttggggccaaaccttacgatgggatcccagcccgggagatccctgacctgctggaaaagggggagcggctgccccagccccccatctgcaccattgatgtctacatgatcatggtcaaatgttggatgattgactctgaatgtcggccaagattccgggagttggtgtctgaattctcccgcatggccagggacccccagcgctttgtggtcatccagaatgaggacttgggcccagccagtcccttggacagcaccttctaccgctcactgctggaggacgatgacatgggggacctggtggatgctgaggagtatctggtaccccagcagggcttcttctgtccagaccctgccccgggcgctgggggcatggtccaccacaggcaccgcagctcatctaccaggagtggcggtggggacctgacactagggctggagccctctgaagaggaggcccccaggtctccactggcaccctccgaaggggctggctccgatgtatttgatggtgacctgggaatgggggcagccaaggggctgcaaagcctccccacacatgaccccagccctctacagcggtacagtgaggaccccacagtacccctgccctctgagactgatggctacgttgcccccctgacctgcagcccccagcctgaatatgtgaaccagccagatgttcggccccagcccccttcgccccgagagggccctctgcctgctgcccgacctgctggtgccactctggaaagggccaagactctctccccagggaagaatggggtcgtcaaagacgtttttgcctttgggggtgccgtggagaaccccgagtacttgacaccccagggaggagctgcccctcagccccaccctcctcctgccttcagcccagccttcgacaacctctattactgggaccaggacccaccagagcggggggctccacccagcaccttcaaagggacacctacggcagagaacccagagtacctgggtctggacgtgccagtgtgaaccagaaggccaagtccgcagaagccctgatgtgtcctcagggagcagggaaggcctgacttctgctggcatcaagaggtgggagggccctccgaccacttccaggggaacctgccatgccaggaacctgtcctaaggaaccttccttcctgcttgagttcccagatggctggaaggggtccagcctcgttggaagaggaacagcactggggagtctttgtggattctgaggccctgcccaatgagactctagggtccagtggatgccacagcccagcttggccctttccttccagatcctgggtactgaaagccttagggaagctggcctgagaggggaagcggccctaagggagtgtctaagaacaaaagcgacccattcagagactgtccctgaaacctagtactgccccccatgaggaaggaacagcaatggtgtcagtatccaggctttgtacagagtgcttttctgtttagtttttactttttttgttttgtttttttaaagatgaaataaagacccagggggagaatgggtgttgtatggggaggcaagtgtggggggtccttctccacacccactttgtccatttgcaaatatattttggaaaacagctggtaaaattaaaaaaaaaaaagggggggggggcccttttttttttttaaaaaaaaaccccccccccccccccccctaccaaaaaaaaaaaaaaacccccnnnnnnnn

SEQ ID NO: 10897 - DNA, 790 bp, Homo sapiens
  misc_feature 779, 780, 781, 782, 783, 784, 785, 786, 787, 788, 789, 790: n = A,T,C or G
acgtgaaggtgagagaaaagctgccaagctgcattttagtcagttgggcaacagtgaaaattttcttttagaggtggaaaaaagcctctctctagtgacctgggtagtttgcacggtttggctggaaaccacagtccccccatctctgccagaaccccccatgtggccactgtcctcagacagctcctggagcttgtggataagcactggaatggctccggctccctcctcctcaacaagaagtttctcggaaagtttgaagcaaaaactggtcagagtgctggaggaaaacctcattttgtcagaaaaaattcaacagttggaggaaggtgctgccatctcaattgtgagtgggcaacagtcacatacttatgatgatcttctgcacaaaaaccaacagctgaccatgcaggtggcttgcctgaaccaggagcttgcccagctgaaaaagctggagaagacagttgccattctccatgaaagtcagagctgaataaggagccaaaaggttattccgggaaagcgctcctgcctcctgagaagggtcatcatctggggagatcatcgccctttgggaaaagcacgttgtcttcctcctcaccagtggcacatgagactggtcagtatctaatacagagcgtcttggatgctgccccagagcctggcttatagagctagcatggaactcacaccacagcttccctggtccacagaggctctcaccgccattgccaccagtatggtggtatgtactcacaaagattaagaaagaaatgtannnnnnnnnnnn

SEQ ID NO: 10898 - DNA, 2624 bp, Homo sapiens
agactctagcaggatcctttacctaaatggctgtgccatatgtgactagaggaagaaggagtgtattctgtggattactccaaatttggaacactgttaaagtagctagctccacggtgcagtgcccgagagctgggattggagaaaccttccatccttattcagaccctccaaaagagtgaactgtctcatcaaaattctctgaggaagcgcaactccatggagaagaaacaattccatgaggaggaacaattctataccgaaggaaaccaaaatttcttttccccccttccaatggggtaccccaaaaggttggcaattttattgacctccagaaggcaatcaaaacacatcggaatcatgacagcaagataaccccaagacagtcttttatcaagttttgacggtttatgctgggcactgccagactgaaccagagctggaacacaataatgttcgagcggcccgcccggcaaggtactttttttttttttttctctttggataatactgtttattgtccacggaccgagcgattgctcaagaatgatacaaagcatcagagacatgcgcagtctgcttgtcaactttcaacaactcttgtgtgttcccagcaccggaaggtctcagacttcatattccagcataaacacagtgctcccctcccccaaaaatccaaacggaaacaaaatcaacagagctttaaattacggcagcaagtccaatctttgcttaatacttatcaagcaaagattggacttgctgccgtaatttcttaatacttatcaagcaaagatttgaaaataactacaatgtaaactttattttaaatattttgagttgcttgcaggatgaaaataggagaagagagctgtgcttagaacataacatataaattaaacgatgccaaatggagagccttcttaaactatatatatattgccactatttattgtgaaggtatttgagcggcttcctctgtcagctgccacccggctcttcttaacctgttttgttttctgctcagcacggttaaaagaccaacgtgtgtggatcaaatataaaggccacacctttcagaccgaacctactcaaagatcctttactttgcaataatttgaactggagaaccaaagacgggagacgaatgaaagcaaagatgctcaaagaaccaaaggaaagacctgaaggaatccacctgcataggccacgcgttccactctgggtcaaatgcttccacgatgcagaaacctttttttaaaaaaaaagtgcaagtctaatacctaccaagggtaataaaaaacacagcacaggaatgattacagctgatgtcaaaaacaaaccaaaacattaaaaaaacaatcagcagaaacaggagtaaatgttacatatgatatcaccatacaggaagcgaacaggggtggggtgttatatgggttggaggggtctggtggagttgtatatactgaaatcacatggactggtccattatgacatcttaccaactttaggtcactgtacagcatgaaaacgcccgtggggcaggggccgattcctggataccctcccagtctgccctagaaagggaagtcatcaagatctgtgctgaccaggtcccggtgggcatgggggctgcatgccacttgggggtcaggagtcttaacaggtgctttggggttgccgctgaatagaacaggctaaggtggctttggaagcattttgcaagaccacgcccaggccgccaagcttcggtttcattgcgtgtgtatgtttacataatgtgcctgtatatcgtcagtttatctttacaacacaggtgggaggaaacaagagattctccttatcattaccgagaaagttcttcctatcctaacccccatatcactggcttcaggaaaccacactgagggaacacataggttccctagttccctaggaagtttcttagctaggtaatctttgtcatttaagaaatacaagcagaagttggtatatctgcaactcaggttcacctatcatctgagaattcacctttagaaaaataagatgtctcttaaaacaggccatagtgtcctggaggctgagaaagaagtgagtgtgtcaccaaagccacctacctccaaaatccttcccttcctaggctggacttcttactatgcttagctggcgtcacatgcagaaagccccgtgcagaacgatggctgtcagtctttgagggagggaacactaagcctgggagggcacagcaagacccagctttttctgtcctcaggatgtgcagatggggagcccagccgggccctgcacacaagcccggataaagcaaagctgtgcaactcaatccaggtgcctgatgccagaacaggcaagaagcaatggcaaccgcagcagctagggaagggaccttgagggcagccaccggccccggacagcagcctcaggacaggacctcaccgattcctcctgcaagctggggagcatgtgggcgggggggggggtgggggggtgggtgcagaccaaaaagactcagctgaggctggaacgcagctcagctggggtttctcgctcccatttctacaaggctcagagggagcggacgcgtgggcggacgcgtgggcggacgc

SEQ ID NO: 10899 - DNA, 594 bp, Homo sapiens
caccggggtggcggccgcccgggcacggctacgcgggggtgatcaggactcctgagtgtggcgtctcacaatgaggctccctgctcagctcctggggctgctaatgctctgggtcccaggatccagtggggatgttgtgatgactcagtctccaatctccctgcccgtcacccttggacagccggcctccatctcctgcaggtctagtcaaggcctcgtatatggtgatggaaacacctatttgaattggtttcaacacaggccactccaatctcctaggcgcctaatttataaggtttctaaccgggactctggggtcccagacagattcagcggcagtgggtcaggcactgatttcacactgaaaaatcaccagggtggaggctgaggatgttggggtttatttctgcatgcaacatgcccactggccgctcactttcggcggagggaccaaggtggagatcaaacgaactgtggctgcaccatctgtcttcatcttcccgccatctgatgagcagttgaaatctggaactgcctctgttgtgtgcctgctgaataacttctatcccagagaggccaaagtacctgcccggg

SEQ ID NO: 10900 - DNA, 889 bp, Homo sapiens
  misc_feature 888, 889: n = A,T,C or G
ccagtgcttttggtaactaacagaatgagaactcacttattacagtgaagatggcactgaaacaatacatgagggatctgcctccatgacccaatcacttcccattaggcctcacctccaaaattgggactcaaattacaacatgaggtttgaggggacagacattcaaattatagtaattacgaagtaaaatgagcaactgttttcttttgctatccaatcatgatggattggatatgtgtgatgaaggagagggaggtatgaagaatgactttaagatgtgtaacttataaaactggatactattcactgagagaggaaacactgaaatagaccagaattgaagatgatgagttcccttttagatatgctgaatttcaagtgcttctgaaacattcaagaggagacagaaacagaatttatagctcagtgaagaggtctggactggagaatataatttggcacaaatctttatgcagataataattgactcaagagccaataagacgagtgatggagagattataaagtgagaaaaggagaggatcttggatcccgccttgaggaattcaccccttacatgatggatggaagagggtgagactatagaagagacagatgactagcccaatatgtggaaagaaaaccaaaaaccaaaacagtgtgttcaagacacagggcacggtgaactatgtcgagaagccaagcaagatgaggattgcatttggtaacgtgaagttgaagctgactgataacttcagtgacagctgttttggcagggtaatggtgtcaagagcccaactggagtgagtggaagtgtggagttgggagatgtggaaacgatccaaacaagaatagacaacattttttgaaaaatttgatttgccnn

SEQ ID NO: 10901 - DNA, 1588 bp, Homo sapiens
  misc_feature 1, 2, 3, 4, 5, 6, 7, 8, 9, 10, 11, 12, 13, 14, 15, 16, 17,18, 19, 20, 21, 22, 23, 24, 25, 26, 27, 28, 29, 30, 1083,1084, 1085, 1086, 1586, 1587, 1588: n = A,T,C or G
nnnnnnnnnnnnnnnnnnnnnnnnnnnnnntttttttttttttttttttgaacggaattttggttatccacaacatcccctttttattgatattaatcacagttatgaggtcttgtccatcagaaagcacaatttgcattatgtagaactacatacaaagacataaaaataaaacatacatacaccaaccaccacaccagttaatctcaaccaatcaaacctctgaatgtgtcttcaattttgatcatcagtgcttcggaagaacgtacatagacccagcccaaggttggcctttggggtctgatagcattcacagagcaggagattcacccttggaagcaattgaatgtgtaaactctgagagcagacactgacaatgcaatgcctgcatacctgactcctgggctgccttccttctcagcagagcccactgaaagtctcacgtgtgcctttaaccaatgaggatggcaggccttatctgtgtttgaagtggacaggtcattgctacccctgttggagaagctatgtaagaaggagtaggctggcttctggtctagttcgactcattctttatagggacatttcagaatgatgagttggctaaaatttactttaaaggggaaatgtaaaattacctcttcttttcctatccccttcttcctttcccatcctgagccctctggcaaggcctgttgcagctcaagagtttttggtcagattacaagttaccaaatggtcaacagggaaggacccacagcagattccaaaactctttcattcacttgagttaactgaaatggctccttctttgagtaattgaagagtttgagttctagcagtttgctggtgtctccaagtctcttagaaacatgatggctataaacttatcaaaataaatgcctaagaaatttggaaagcgcgacaaatggccttgctcctggaatccattgacagcagaggcctccgaacaaacccacactctgtctgtctcttctttccacagggctcactgtgagttcacagttgtcctcatcccctttccttcaataatgtcaatctttgccttaaaaaaaaacggacgcnnnngccagactagccaatttccttccctttttctgtgtccccctcccatgtagtatctccttagggggaggtaaaggaagacatgctcctctctgggctggctcggccttggaaggtagcttgctatctttatgatgctccagttccaacattctagatggggagaggctcagcagtgatggagcaggaggggcggatgagaggtgtgctggccactctgccctgagtcactaggccaccaaaatgcttaggagacgtcttttggtagctcgcttctataggtgaccttgaggagttgggaggcagatagaaggtcccgaagtggagatttccctgatctgaagttccttgataatcccactgaagagagagtccattcagtggccaaaacaaagaatctgtatttccatgacaccttaaaattccccattaaatcaaaaatctccctcaaagcaaagtaaaaatggttctattataatcagagtcaatcaggataatgagannn

SEQ ID NO: 10902 - DNA, 593 bp, Homo sapiens
  misc_feature 1, 2, 3, 4, 5: n = A,T,C or G
nnnnngctgaaatattactccgcttacctttatgtaacctctccttgaaaacaacaatttactcatctggtgtgtgactctgataaccttcaatcattctctatatctgacaccatgactagtaacttagatctttaactaagcaacctttctttccacctttgtgatattatatctagtaatttaataacagacaatctatgttgcaaattaaacttccaaattgaatagtaattttcaaatcccaaggacccatttcttctgcctcaatcttaattaggtcttagttaatagaaaaattaactggctgggtgcggtggctcatgcctgtaatcccagcactttgggaggccaaggtgggcggatcacctgaggtctgaagttcgagaccatcctggccaacatggtgaaaccccatgtgtactaagaacacaaaaaattggccgggtatgcgtggtgggtgggtgcctgtggtcccagctgctcgggaggctaaggcaggagaatcacttgaactggcggggtggaggatgcagtgaaccgagatcccagcactgcgctgcagcctgggcagcaacagtgaaactcctcag

SEQ ID NO: 10903 - DNA, 642 bp, Homo sapiens
  misc_feature 620, 621, 622, 623, 624, 625, 626, 627, 628, 629, 630, 631,632, 633, 634, 635, 636, 637, 638, 639, 640, 641, 642: n = A,T,C or G
acgcgggtcacagtattggtccaactcttagcaaatatcttctaataatagcttgaagtaattcactggattctgagaattcctttctgtcatctagcttcttctgagagagtctctagaagacatgatgctacactcagctttgggtctctgcctcttactcgtcacagtttcttccaaccttgccattgcaataaaaaaggaaaagaggcctcctcagacactctcaagaggtgctgtaatctcattttattttctaaactcagtcatttggattgctttttaaaatatctggtgtcttcacccatagtctaattataaagcaaattcaactaactgaatgatttttgttgtgtgtgacttcaaaatggattttttaaaacagaaggaatcagtttattttaggcagtgaatcaaatcaactagcaaacagtaacataaatttgcattatcttttgccaaaataatggagaattggctcgctgtctataactttggtaaccagagtcctagaaaataatgattgattgctgcgtcatattggtgtcctaatagcaatttaagattcctcaaaatttgctcaaattcccagtcctctatttcccagtcctccaaaaaannnnnnnnnnnnnnnnnnnnnnn

SEQ ID NO: 10904 - DNA, 550 bp, Homo sapiens
  misc_feature 550: n = A,T,C or G
cctgcgtcgtgctggcacttttaccggccgggccttagagcggagcctgtagccaggcgtacgcggggagtcttggttttctgctagtgctgctgctgctgggaggacgacggacggcagcggccaagcaagaagaaagacgtggcagcaagcgggagtcggggatagtgtcatcggttcggtaaagtttctgttctctgatttggggatattccctgaagaacacccctaaactcccataatcggtgcggattcctatggagagaaggcctatattgttgacatcttccaggccttggttctggaccttgagaaagaggctgtggaactagagatagcgatgctttttaggatttggggatattccctgcccaaaaacattcctggaaaattgactagtattaagtgtgagtcaaaggtgtccacttttttttaagttttgattttagttttgtcgtaggatagtatttggcaagatttagcctagaaattatgtagtatttattacataagaatcaaagttgcttgttccgctggggtaccgagctcn

SEQ ID NO: 10905 - DNA, 4235 bp, Homo sapiens
  misc_feature 1, 2, 4130, 4131, 4132, 4133, 4134, 4135, 4136, 4137, 4138,4139, 4141, 4142, 4143, 4144, 4145, 4146, 4147, 4148, 4149,4150, 4151, 4170, 4207, 4208, 4209, 4210, 4211, 4212, 4213,4214, 4215, 4216, 4217, 4218, 4219, 4220, 4221, 4222: n = A,T,C or G
  misc_feature 4223, 4224, 4225, 4226, 4227, 4228, 4229, 4230, 4231, 4232,4233, 4234, 4235: n = A,T,C or G
nngcgtccgggcggaggcaatccgccggcgacgccgcaggtcccgggtggctgacgccgtccgggggcgttcctgggagctgggggccggcgaggctggacccgacgcgcccgggaggcggccacgtgacccaccgcggcggggccggcggcccagaaaacgcgtggggactagttctagatcgcgggcggcgcgagcgaggggcagaggcgagagacgccggcggggcgcgggcgcggcggccccggaggatgctgctgagccccggcactgcctggctgcgagcacatgatggcgatacgggagctcaaagtgtgccttctcggggacactggggttgggaaatcaagcatcgtgtgtcgatttgtccaggatcactttgaccacaacatcagccctactattggggcatcttttatgaccaaaactgtgccttgtggaaatgaacttcacaagttcctcatctgggacactgctggtcaggaacggtttcattcattggctcccatgtactatcgaggctcagctgcagctgttatcgtgtatgatattaccaagcaggattcattttataccttgaagaaatgggtcaaggagctgaaagaacatggtccagaaaacattgtaatggccatcgctggaaacaagtgcgacctctcagatattagggaggttcccctgaaggatgctaaggaatacgctgaatccataggtgccatcgtggttgagacaagtgcaaaaaatgctattaatatcgaagagctctttcaaggaatcagccgccagatcccacccttggacccccatgaaaatggaaacaatggaacaatcaaagttgagaagccaaccatgcaagccagccgccggtgctgttgacccaagggccgtggtccacggtacttgaagaagccagagcccacatcctgtgcactgctgaaggaccctacgctcggtggcctggcacctcactttgagaagagtgagcacactggctttgcatcctggaagacctgcagggggcggggcaggaaatgtacctgaaaaggattttagaaaaccctgggaaaacccaccacaccaccacaaaatggcctttagtgtatgaaatgcacatggaggggatgtagttgcatttttgctaaaaaaaaaaaaaaaaacctttaaaaattgttggatgtgtacaaaagtcttactgccttattatgtgtatgggattctaaagtggcattccacttggatttcctgtgctacctatccaaattccagtaactacttcagtgtcattgcctttgttacctaaccaaccttcactgaaaggcaaatttagttcaggaggttagtttttagctagctttggaagtaagcctttatttattactttttggaggaaatcagagaagtgtcaatggaccgtcactcagactgagacttgagttattacagaagccaggaaaagtgtattagaaactgttgtctacaccacttttaattggtgaacaatttttctaagttatggtcatatatacccaaacaaaccaaatcaaactaaattactgcatataattttgggattgggtggcctagtttgaaagagtgatttaagtaatcactatgtaagtggtgagagatgcaggacatacacattattcaagagaccacctgacatgcatctcctccgcaggaatacattcgtcctctcttagagaagtttaacgcacatagtattattttactaagagaatatctcttggtgtcatatctaggggaagagaattaactagaattaaatttaatgtttgaatctaaatcattgggcaaacttctaataataacaattaataataggttacaggaaagccagccagaggaagtgtcagcactttaaaattctagaccccaaaaaactacaaaatcagaaaaagtatttttatgtttctagcttgaggagaagggctttagggctaaccagaggtctgaccctagaatgccaaggaactgagaatgggctccgatgaaaaccttccttttcagattccctgtctgctcaattaaagatgtttgaatccaaaggaagtcaaggaagaaaaagcatggaaaggaagagaactgattcctactgaaaattcaaattctattaccattctaactttcataaaaagttgggatcaagaagcagctgatttcctgccagggcttatattagggggtgattcttaaaggacattaggattggtgctcagaaatggttaatcatgctgtgtgctagccagggccagctggtaccttctttgccatgagcattcaagggacagctaacctttattgacaatctatattgcaaaagtcaggaaagaggttgtgagctgattggattaaagacctggcacttcagtaactcagcacgcttccacttcactcaacttaagagagttcattgacagtgttaggatgtgaaggctgggaaacacttattttgcttcaagagttccacttggctctcccaaataggtacctcaaaaactgttagcaagcggcatttggatgtcttgacaggggctttgcagggatttttagggttttttccacattgtccacattaatggttggcatgattgtgcttgcaggccaagaaatgatcataccccttgccaaaggtaaaaaaaaaaaaaaaaaaaatgagttgaaaattgaagtgacctctttccagctgacttgcaggcttattttgtaacctttcctcatccagttttccctgagaacctgggtttatctctagatagctgttcaggttttttagctgaggggtaagtatcctagctgagagttttgcatctttgggctgggtttgcagtggttgtgttttgcataaaatgtctagtctttgccacagatagtgagctacccactaatgagcccatggttttatttcagaagcacatgagggtgtgaaaccactctgttacctttctgtattgtcttagctattcaagccagtcagaggataatatatatattctcatcagcactcagagtagtcagtgaagagagtagatcacacttgggcacaccaggattcacataaacattgtatcttctctgtggatgctcaggccttgtctacaatgaggctttacaaccttcctttgttttggctcgggattacttcctggctgtctaataattgaaccataaccatgtaatattatgtaaaggcctggaaattactgttgctaaaaaaagtcatgtagtttcatgtagtgtagcatccttggcatcgttttccaaaatttgttccttctcccttttttttttctttcgtgtgtggcatgagtgtgtatctgtgtaaatatgattgtatatgtgttactccgatatgtaatccatttcactggctgagtttggcccctagccatgtgttaatataaagtaggcatggcttcccaatggaaatctctgagaatgacagtggagttgtgcaagcattttacattgccacataattgacttgccattttatggttaaaaacggcacattaggcagttgaatatgacgttaccttgcagactaaaaggttgaaggcccgaaactaacttttagctaacaataagggctgtgccccaatggaaactgagttcattttctgagaaaggtttggatgactgaaatatttcctctacagtcaaggactttggcatgcggtggctgaaactgagcttttttgtgtgggctccagttctcactgttctgcaatgctcatggcaagttgaatggtgagctagcttataaattaaagagctctgaactgtattcagaccgactgggtatctagcttactgttttaacatcattgttgaaaccagaccctgtagtccagtggtgctgccctgttgtgcaaactgctcctttttctcgtgtttttgtaaagagcttccatctgggctggacccagttcttgcacatacaagacaccgctgcagtcagctaggacctttccgccatgtattctattctgtagtaaagcatttccatcaacaatgcctaattgtatctgttatttttggtttaacacacactgattcatactaataaatattttcagttttaaaaaaaaaaaaaagggggcaacccnnnnnnnnnntnnnnnnnnnnnaaaaaaaaaaaaaaaaaanaaaaaaaaaaaaaaaaaaaaaaaaaaaaaaaaaaaannnnnnnnnnnnnnnnnnnnnnnnnnnnn

SEQ ID NO: 10906 - DNA, 1026 bp, Homo sapiens
aggtacgcggggtgaactgtggggcaacctcgaccccactgtggcggcgagatggcacgggacactacctgtgcaacgcctgcgggctctatcacaaaatgaacggacagaaccggcccctcattaagcccaagcgtaggctgtctgcagccaggagagcagggacgtcctgtgcgaactgtcagaccaccacaaccacactctggaggaggaatgccaatggggaccctgtctgcaatgcctgtgggctctactacaagcttcacaatattaacagacccctgactatgaagaaggaaggcatccagaccagaaaccgaaaaatgtctagcaaatccaaaaagtgcaaaaaagtgcatgactcactggaggacttccccaagaacagctcgtttaacccggccgccctctccaggacacatgtcctccctgaggccacatctcgcccttcagccactccagccacatgctgaccacgcccacgccgatgcacccgccatccagcctgtcctttggaccacaccacccctccagcatggtcaccgctatgggttagagccctgctcgatgctcacagggcctccagcgagagtccctgcagtccctttcgacttgcatttttgcaggagcagtatcatgaagcctaaacgcgatggatatatgtttttgaaggcagaaagcaaaattatgtttgccactttgcaaaggagctcactgtggtgtctgtgttccaaccactgaatctggaccccatctgtgaataagccattctgactcatatcccctatttaacagggtctctagtgctgtgaaaaaaaaaatgctgaacattgcatataacttatattgtaagaaatactgtacaatgactttattgcatctgggtagctgtaaggcatgaaggatgccaagaagtttaaggaatatgggagaaatagtgtggaaattaagaagaagctaggtctgatattcaaatggacaaactgccagttttgtttcctttcactggccacagttgtttgatgc

SEQ ID NO: 10907 - DNA, 1349 bp, Homo sapiens
cccacgcgtccgggaggcttccgaataagtgagtcaaagtgcctgatgcaggatgatactagaggcatgtttatggaaacaactgtgttttgtacttccgaggatgggcttgtatctggtttcggacggactgttaatgacaatttgatcgacgggaattgcacaccccagaatccaccacaaaagaaaaaggttacaaatttaacaatttatagtccttttaatagtttttttttttttttcataatactactgaggggaattgttagatgtattatgtaaggcattcttaatttagttattaaagttacatttttaatatttttaaaccttttgtaaatgctggcttaattagaaaatgtttacagaaaagtaaaaaaattctagtaatatgggaaatccttgtaagcagcatggtttcagaaaaatctcaagatgatttatttcaccaaatgagtattttttaaaactaggaactccccaaccaaaaacacagacttgaataatatttgtgttattacctttattgtacattgagcaagcacccttgtatagaggaaatgcctctttcctcatctataatatctatagtatttaggccatggatgtaagagtgtttttattttactaatagttaatgtattaaatattaagttagttccctgatttcccattatttggttggcagacatactgagataattagaatgccttatttcaaaagaaactatagcacttattttgttagtaggcttattgctttgcaagtccaagaattttcgtgatgtgtgcttttaatttttataacagagtccagttggcaactttgtgggaagcaatgtagtatagtggaaagagcacgggctttcaagtaagacctaggttcgaatcccggctccaacactcaccagctgtgtgaccttgagtgagtgagttactcaatttcctcatctataaaatggggatgataatatacctatttcatagggttgttgtgaggataaatgagataatgtatgtaaatcatctaagtacaatgcctggaatatagtaggcatttggtaattgttaattatttgttcagaatcaattaaaataattttcctaatgtaaatatagtaattctctttagacaaaaaagaatgcattggttctgacataaaaaacaagaataaaagatttgctttttctcatctttcttgcttaaggtttctctattagaataccgtaagagacaacgtgaagctaggaaaagtggctctaagacagagaactttccactcattagtgtatcaccccatgcaagtggaagcactagttctagatcgcgatctagaactagcggacgc

SEQ ID NO: 10908 - DNA, 1854 bp, Homo sapiens
cggagtcgacccacgcgtccggctgattcccgggactaggttgcgggagaaagcctgttgcgtggaagataaggcggcgcgggaagtggacacagggtgggctggagatctaactggactctcgctcctgctggctggacatggaggatttggaggaagatgtaaggtttattgtggatgagaccttggactttggggggctgtcaccatctgacagccgtgaggaggaagacataacagtgttggtgactccagagaaaccacttcgacggggcctctcccaccgaagtgacccaaatgcagtggcacctgccccccagggtgtgaggctcagcctaggccccctcagtccagagaagctggaggagatcctcgatgaggccaaccggctggccgctcagctggagcagtgtgccctgcaggatcgggagagcgcaggcgagggcctggggcctcgccgagtgaagcccagtcctcggcgggagacctttgtgctgaaggatagtcctgtccgagacctgctgcccactgtgaactctttgacgcggagcaccccctccccaagcagcctgacgcctcgactccggagtaatgataggaaggggtcagtcagggctctccgggctacatctggaaagaggccctccaacatgaagagggagtcacccacttgcaatctgttccctgcatccaaaagcccagcatcttctcctcttacccgatcgactcccccagtccgggggagagccgggcccagtgggagagcagcagccagcccacccacccccatcagatccgtcctggccccacagccttctaccagcaactctcaacgcctgccccggccgcagggagcagctgctaaatcttccagtcaactgcccattccctcggccatccccaggcctgccagccgaatgccactcaccagccggagtgtgccacctggcagaggtgccctacctccggattctctgtcaactcgaaaagggcttccaagaccaagcactgcaggacacagagtgcgggaaagtggacacaaggttcctgtttcccagcgactaaatcttcctgtcatgggtgccactcgcagcaatctgcagccccccaggaaagtggcagtcccaggacctaccaggtaaagagatcaggacagcaagcaagagcttcagtagcaaaccactacagtcagtacctggactcgcctctacccagcagaccctgactccagcagattctggcccagggacaggaggaagagatgccaccagggctggtctcccaggagtagagaccatgggaaatggggtggattaggattgagctggagaagacttaaactctctgggttgaaagaagattaggggaaaagaggtcaccttccagcagtgaaatgaacaaatagaagatgagaagtacaggcaagtggtttgtctttatccacccccactgttgtggtcagccccagagaattttatcttcttccttggcattggttcactggacatttccacgtgagcggcctccgtagctaacctccctgccctctgaggagccatcttcctgaatcgcattctctactggactctggcctgcttggagaggtggcagcaggcacctggtcttcagaaattgtttcctgtgaattctgtgactcctaataggccagtttgtgataagcttactctatgagtcttcatttttctaaaataaagtgaatgtatttttatattctctgtatatctggaagttgatcctgctcctatttctttctttttttttagacagaatcttgctctgtcacccaagatcgcgccactgcattccagcctggtggcagagtgagactccatc

SEQ ID NO: 10909 - DNA, 596 bp, Homo sapiens
acgcgggagagttagttgatttcagtagttcaacaatgtcagtataaacccatattttgcttagccatatattgctcaattctgccatccttgggactggcttcatcctcaggctagtagcaaaatggttgcggtgattccaggcatcatatcatatccataaataacaacttccaaaagaagaggaaaagtatctcttcctgtgccactgtttttggatagaggaaactttctacaaaaacctctagcaaacttctttcccatctttttggccagaattgggtcataggctagttcctgaaccagtcaccagtaaataacccttaggttaatcacgtttctcaatctggaatggtgttggcttctactgaggtatatggttgtattggggagagattctgttaaagaggaagagggagagaattgatgctaggaaagtaatttggaaaaccataactctcttcagtgttattgtctttgtcaataaacagtattagcaagttattttttactttttcaaagttaaaatctagctgtgggaggatcgcttgagccctggaagtcgaggctgcgctgagctgtgattataccactgt

SEQ ID NO: 10910 - DNA, 782 bp, Homo sapiens
  misc_feature 1, 2: n = A,T,C or G
nnatatcctagtttctaatctctcattctcaaaaggggaaaaatgaagggaggaaacaaaaagggtgctggctctttgaatcctctggaagtcacttcagccagatgggaaggagccccgcgctggccggccgggtacaacaacaaagtctgcccaccttcttgtgtgcacctctgtgatcagaagtagcaatcagtgatcggatgcagatctctaatatttggaagacaacatcctttttgcccaccctggagcccataggctgcatgcaagtttctccaagaactgggggatgggtagctgctaccgttttaagagctaaaattaaaattaattgtgcttttaccttataccttcccctggaatttgcaagcttacagtagactccagagttgcaaaaatagttacattaggcagattttgccagtataattgttgtctaggagcacggccagactcctggtgctttctacccttccatcttccccaaccgctagttattgaaacttactttaatacaggaatgtaagcagtttactttgtgttttttcattttcatcacttatgaataactcagctagtgaaaaacttcttagagtaaatcatttttctttcaaaataatgttgacattgctctgttgaaatctagtgtttatttcagagaagtctgcggccagtttgatttttatttcttttcagattacctgtctctaaagatctggatgctttaaatactttttccttttaatcaataaccatgaaatatctgggtgtgcccgcgt

SEQ ID NO: 10911 - DNA, 451 bp, Homo sapiens
  misc_feature 450, 451: n = A,T,C or G
acgcggggggagatgctgccacctaggttacttgtaggaccctatacggcaacctcctttgccaggaactatttataaacatcctgcaggaaattgactcaaggaagcttgccttttgagctatttacagcttttagcacttgagtaaagtatactcctgtgaacaaaattcggaacatatttgttgctctctaactgatttctccacaatttggaactagtgcagggaactagaagagacagggatatcccacaaggttatgcccaacatcaagagaagatgacaggtcagagatgggaagaaacaagaactttgacatgcttggtgttcttgcccaagctttgaagaagtttacatagtctatatgtcagaatacacatttcccaccttgcccaacagtcaaacttttgttccctttagagagggggtacctcggccgctctagaacnn

SEQ ID NO: 10912 - DNA, 1211 bp, Homo sapiens
agggagtctccacgcgtccgtatgttttgaatatatgtgtaataatagtagtatcttttatgttttttcagagaagactattcaaggacctcaagtaattaaaacatataggccttaaaccaaaaaaaaaaaaaaaaccctgtctttaaatctgttttgaatgtttagcataattatactcttgtcatttccctaggggatggcattcctactgtatttgtggcagtggcaggcagaagtaatggtttgggaccagtgatgtctgggaacactgcatatccagttatcagctgtcctcccctcacaccagactggggagttcaggatgtgtggtcttctcttcgactacccagtggtcttggctgttcaaccgtactttctccagaaggatcagctcaatttgctgctcagatatttgggttaagcaaccatttggtatggagcaaactgcgagcaagcattttgaacacatggatttccttgaagcaggctgacaagaaaatcagagaatgtaatttataagaaagaatgccattgaattttttaggggaaaaactacaaatttctaatttagctgaaggaaaatcaagcaagatgaaaaggtaattttaaattagagaacacaaataaaatgtattagtgaataaatgcttctctagatccatattaataaacatgagcatctaacccctcctttcttaggctagacaccaagatatttcagccagcctttatcattcctcttactttatcctttttccttaagtattggtggtcactactattgagtttcttccttaacactgattaaatgatcttaactccctcagctaaaactggcattactgactcccagctatatttctccagacttgcattttttttttttttttttggggcagggtctcactgcactccaacctgggcagcagagcaagactctgtctcaaaaggggaaaaaaaaattgctgatgtgacccatgaagggaactcattttcctcgtaattttggactgccacacattgggtacctttagttctctgaaggcccacgtttttatcattaagacctatttgttagctagtagagctttatgttcgctgtccatgaaaccttctgtaaccacagtgactacaagtagttctttctctattgaattattaggtccagaatagaagatgtcattgtacctgcccgggcggccgctcga

SEQ ID NO: 10913 - DNA, 1236 bp, Homo sapiens
  misc_feature 1, 2, 1230, 1234, 1235, 1236: n = A,T,C or G
nngcccagggatgccagcagagagggatgcagactatgggacattctaaatcagtgctgttcaagagacctttccatagacgtggaatgttctctgtgttgtctaacagggcagccattagccacatgtgggtagtaagtacttgaagtgtgactaatgtgaccaagggaactgaattttaaattttatttactttaaattaatttaaactgaagatagcgacatgtggccagtggctaccacattggatacagccttagattcctcccagaccagacaaccttctgtggcctccaaagttgcaacagcaaactcacactgtgggcagccaggcctggagtggggcccagcaagccgcatcctggggtcaggtctggccaactaattatctactgtctatggtcacattagtgctacaatggcagcatcgagcagttgcaacagagatggtgtggcctgcaaaactgaaaatattcatatttactatctggccctttacagaaaaacatgctgacccctgcactacagcaattagttttggagagaacattcctgataaaagcttacatcttctctcaaaacatgacacgcaatagcagtggattctcgaggagtccttctagaatccaccccagaatcctatcctacagaatattctggggcccctttaccatatatttgcaacccaagaaagtcagaacagattaccaagtatccctccacacactccagacaccacatttgtacaggatagcttaaagacacccaagtataaatggcaagacattacattaagaatcacttttttaaaaaaccacagccagattctcaaaaagaaataaattcaggccggacacagtggctcacgcctgtaatcccagcactacgggaggccgaggcaggcggatcacttgaggttaggagttcaaaaccagcctgggcaacatggtgataccccatctttactaaaaatacaaaaattagctgcacatggtggcatgtgcctgtaatcccagctactcgggaaggctgaggcaggagaatctcttgaacctgggaggcaggggttgcagtgagccgagatcacgccactgtactccagcctgggtgacagagtgaaactgtgtctcaaaacaaaaaataaataaataaataaattcaatctcagggtaaaaatcaataagcaaacctcctgacatgatagtatttactgaatgcttattaggttcnagcnnn

SEQ ID NO: 10914 - DNA, 397 bp, Homo sapiens
  misc_feature 241, 242, 243, 244, 245, 246, 247, 248, 249, 250, 251, 252,253, 254, 255, 256, 257, 258, 259, 260, 261, 262, 263, 264,265, 266, 267, 268, 269, 270, 271, 272, 273, 274, 275, 276,277, 278, 279, 280, 281, 282, 283, 284, 285: n = A,T,C or G
acatccaaattgggctacgaaaagtggcaagtttgattgtagcatcatgtctttgagtgtcctattggactacagattagaggataataaagaacattcatttgaggtttcattgtttgcggaacttttcaacgaaatgcttcaaagagattttggtgtccgtatatacaaatcattactgtctcttcctgagaaagaggacaaaaaagaaaaggataaaaaaagcaaaaaagatgagagnnnnnnnnnnnnnnnnnnnnnnnnnnnnnnnnnnnnnnnnnnnnnaccgttaagaagttgagcttttatcttagaggcagcagaaggtttggagccaaggaatgaaatgatgaggcgtccttcaagtaatgaacttcagctgcagtgtgaaagggca

SEQ ID NO: 10915 - DNA, 646 bp, Homo sapiens
  misc_feature 644, 645, 646: n = A,T,C or G
acctgaaagtgacggggagaatggaaccaagttggaaaacactttgcaggatattatccaggagaacttccccaatctagcaaggcaggccaacattcaaattcaggaaatacagagaacgctgcaaagatactccttgagaagagcaactccaagacacataattgtcagattcaccaaagttgaaatgaggaaaaaatgtcaagggcagccagagagaaaggtcgggttacccacaaagggaagcccatcagactaacagctgatgtctcggcagaaacgctacaagccagaagagagtgggggccaatattcaacattcttaaagaaaagaattttcaacccagaatttcatatccagccaaactaagcttcataagtgaaggagaaataaaatactttacagacaagcaaatgctgagagattttgtcaacaacatttgaatattataacctgcaggggtctgtcctgcagatggttgagacacataaccagatactgatattcagtgaaagagcagcaaggattccgagctgattacagacaccaaggaagatgctgtaaagagccagcagccacagccctggctagctggcccctggggcctttattaataaagttttaatgaacaaaagctttgagnnn

SEQ ID NO: 10916 - DNA, 688 bp, Homo sapiens
  misc_feature 1, 2, 3, 687, 688: n = A,T,C or G
nnncccctttttttccccgggggggatttaccccccccaaaagggaaaaaaaagggggggcggggccccccccccggggggggggggggaaaaaaggggaaaaaaaattccccccccccgggggggcccctttttttaaaagggcgccccggggggggaggtactttttttttttttttttttttttggaggttgaatgcagggttttattgagtggtggaggtggttctctgaaggatggatgcagagctggaagcggggatggcacgggaagataatcttcctgctgggtggccaaacctctccgaccaccctcggctgaactcctctcggcgttcaaatgttcctcttctctctttctctgctgtatcgtttcaccattcatctgcttgtctgggatggtgaagacaactgtttgctcatttgcttggcgataggtgattgtctcgccgctcagctataggcgatggtctcaccactcggtgataggcgattgtcccatctaggtcgccaaaatgtgtctggaattggtgggttcttcgtctcactgacttcaagaatgaagccgcggacactcgcagtgagtgttgcagttcttaaaggcggcatgtctagagtttgttccttctgatgttcggatgtgttcacagattcttccttctggtggggttcatggtctcgctggcnn

SEQ ID NO: 10917 - DNA, 1443 bp, Homo sapiens
  misc_feature 1, 2, 1436, 1437, 1438, 1439, 1440, 1441, 1442, 1443: n = A,T,C or G
nntcgacccacgcgtgagacggagtctcgctctgtcgcccaggctggagtgcagtggcgggatctcggctcactgcaagctccgcctcccgggttcacgccattctcctgcctcagcctcccaagtagctgggactacaggcgcccgccactacgcccggctaattttttgtatttttagtagagacggggtttcaccgttttagccgggatggtctcgatctcctgacctcgtgatccgcccgcctcggcctcccaaagtgctgggattacaggcgtgagccaccgcgcccggccgggagtatttttataaagcctttttgtacagattaatcggccatgtccaggttattggttttgatattttataggacatttgagtggtgtggcgatgtgtagagaatgtgccagagctgcagagacagtccattctgggctgctggctttttgcccttcctgcatgatttccagctactgtgacctggatgctgggaacccaggcatcggctccaaaaattagaaggcgagtgctgagaagacttgtcacaggtttctcaaatcagaatatactcagtcatagtggttccctgggaagccccagaccctttgacttgtgacattactggtttgcagacataataactacactcagaggaccatggaggcagagggatcatggtttcagggcactgaaaactctacgagccaagaggactagtgcatggactgaaagtcaggcatgccctcaaataggctgtattttctttccaggaatgtaacctttcccctttttcttctgacctgagccaagattggaaatcagaaagtctcctgtacatggagctgaagaggggctgctgttttccgaatgttttccatttcacaggcgccacctgcttgcccggggttggtcttgagaagacacccaaatgttcatgcctcagaaaggcagcagaatgccttttaggaaatttttttaaagtaatttgaagttatatagaagtttggtaagaagaagcagttgtttctctcttttctccctcatttcatggaggtgttaatgatcatggctggccgtgatgtacacatgggctgattttcattttttcagtttcatagctgagaaattcagctttgttttagttgaatcatcatattggaaagcagacattgaaagttttcttttctatctttgttatgaatgtgctatggccccttttggagacttctattgggtaatattctatgtgagagaaggaaacttggtattaaatgttgtggaaaataataatgatgataataataaagtatatgctgcaatggtgtactgccaatcagattgcttgggagaagaaaatttattcaaatccaacgataaaaaattaatttcttattgaataaacagtatgttcccatataaaaaaaaaaaaaaaaaannnnnnnn

SEQ ID NO: 10918 - DNA, 894 bp, Homo sapiens
  misc_feature 1, 892, 893, 894: n = A,T,C or G
ncctaattttagctattcctccaccagtcatcccgagttgctaggtactcaaatttgtgcctcgagagcacgcctctgtcgttaagtgtcttcccccaggtcctatttcgcacgggtccttctggcccggcccgcaaattggcgtcttctctcgcttttttgctatatcgtgccagagatcaggttctctagattaccatgtaagacagctctgtggatcctcttcagatgatacggtttaatggggtattggggaaatgcgaagccatccgagcacaagcgctccatgagggtggccacctctccgcttgccgtcttccataatcgtcggctgcaaattgtagcctgcagccgtatttcagctcgccttcggggatcgccgcctccgaagagcaacaacgagcaaagcagtctgtccacggacctccgcacagactctcagcgcctcccgcctctcagcagaaacgcccaacagaagggttagaaccagcgagcacgcgcaccttagccgggcccttgccaaacagggcccgaggcagagaaaccccctaacagcttcgcgcgcacattcaggcgcggttcttcggaggtccgcggagggcggggctcctggaagccgaggcgcgccctgccccagggcctgtttaactgtcgcccgcgcgctcttctcttccacaggctcccgacgctcggagtcccccgcgctgggccctctgcagcccagggatggggttgagtggtgcttctccgcctggtgccaccgctgggcccacagccccacttcgccctgcgtcgcccccggggtccgcgctgatgggtgcgaggcgggaggacgggatccggggttgccacagctgcagccagcgcaccacttgtaggcggcactgcagcnnn

SEQ ID NO: 10919 - DNA, 2422 bp, Homo sapiens
  misc_feature 2378, 2395: n = A,T,C or G
ccacgcgtccgcggagagcgcgctctgcctgccgcctgcctagcctgccactgaaggttcccagcaccatgagggcctggatcttctttctcctttgcctggccgggagggccttggcagcccctcagcaagaagccctgcctgatgagacagaggtggtggaagaaactgtggcagaggtgactgaggtatctgtgggagctaatcctgtccaggtggaagtaggagaatttgatgatggtgcagaggaaaccgaagaggaggtggtggcggaaaatccctgccagaaccaccactgcaaacacggcaaggtgtgcgagctggatgagaacaacacccccatgtgcgtgtgccaggaccccaccagctgcccagcccccattggcgagtttgagaaggtgtgcagcaatgacaacaagaccttcgactcttcctgccacttctttgccacaaagtgcaccctggagggcaccaagaagggccacaagctccacctggactacatcgggccttgcaaatacatccccccttgcctggactctgagctgaccgaattccccctgcgcatgcgggactggctcaagaacgtcctggtcaccctgtatgagagggatgaggacaacaaccttctgactgagaagcagaagctgcgggtgaagaagatccatgagaatgagaagcgcctggaggcaggagaccaccccgtggagctgctggcccgggacttcgagaagaactataacatgtacatcttccctgtacactggcagttcggccagctggaccagcaccccattgacgggtacctctcccacaccgagctggctccactgcgtgctcccctcatccccatggagcattgcaccacccgctttttcgagacctgtgacctggacaatgacaagtacatcgccctggatgagtgggccggctgcttcggcatcaagcagaaggatatcgacaaggatcttgtgatctaaatccactccttccacagtaccggattctctctttaaccctccccttcgtgtttcccccaatgtttaaaatgtttggatggtttgttgttctgcctggagacaaggtgctaacatagatttaagtgaatacattaacggtgctaaaaatgaaaattctaacccaagacatgacattcttagctgtaacttaactattaaggccttttccacacgcattaatagtcccatttttctcttgccatttgtagctttgcccattgtcttattggcacatgggtggacacggatctgctgggctctgccttaaacacacattgcagcttcaacttttctctttagtgttctgtttgaaactaatacttaccgagtcagactttgtgttcatttcatttcagggtcttggctgcctgtgggcttccccaggtggcctggaggtgggcaaagggaagtaacagacacacgatgttgtcaaggatggttttgggactagaggctcagtggtgggagagatccctgcagaacccaccaaccagaacgtggtttgcctgaggctgtaactgagagaaagattctggggctgtgttatgaaaatatagacattctcacataagcccagttcatcaccatttcctcctttacctttcagtgcagtttcttttcacattaggctgttggttcaaacttttgggagcacggactgtcagttctctgggaagtggtcagcgcatcctgcagggcttctcctcctctgtcttttggagaaccagggctcttctcaggggctctagggactgccaggctgtttcagccaggaaggccaaaatcaagagtgagatgtagaaagttgtaaaatagaaaaagtggagttggtgaatcggttgttctttcctcacatttggatgattgtcataaggtttttagcatgttcctccttttcttcaccctccccttttttcttctattaatcaagagaaacttcaaagttaatgggatggtcggatctcacaggctgagaactcgttcacctccaagcatttcatgaaaaagctgcttcttattaatcatacaaactctcaccatgatgtgaagagtttcacaaatccttcaaaataaaaagtaatgacttagaaactgcaaaaaaaaaaaaaaaaaactcgagggggggcccggtacccaattcgccctatagtgagtcgtattacaattcactggcgccgccgtttacaaacagtcgtgactgggaaaaccctgggcgttacccaacttaatcgccttgcagcacatacccctttcgcagctggtggaatagcgaagaagaccgcaccgatcggccttcccaacagttgcgcagcctgaatggcgaatggcaaaatgtagcgttaatattttggttcgcanaatcccttataaatcanaagaatggaccgagatagggttgagtg

SEQ ID NO: 10920 - DNA, 941 bp, Homo sapiens
acttgtgcaaaattgttcaaaaatatttacatagatggagcttaaagaaaattatggaacacttactggccataatgatattcaatgagaatctcttcaggtagcatccagacagcagctcagtcatgaaatgcttaaagcaacagaatccaatttcatgatgttctatacttaaaacagatttcggccaggagtggcggctcacgcctataatcccagcgctttgggataaccagcgtgagccaccatgctccacctataatttattttacccaaaataaaatgactcaaatatattagagaatgaaatagattctaaaatatctccactttgtatggctaccaattaaaatattctctttgtatccttcagtttttcatgactgctatcgtatttccccttatttgaaacaaagttgtctttatgacttatttttctaattaaggctagatattttctgttattaggttgaaccatacattacctttttcaactacttttacctacaaaaatggacacttcatataaatgaatctaaaaacttgctcaaaattcatattaaaaagaggagacgcactcaatgaaattataattattccattactgtaatactttcctgatagaatacaaaatataaacagtttataccactatcaaactccaaagaaaagtaatcattcccaagagaaaatattcacaatactacatttaattagaaaattagaaaaactgtatggtaccaatttcatttacacataaaacatctaaaactctttcagacttcagtatttttatttctttgttctctccatatgatgactgttttcctaattttctaacttaaatgtagtgtttctgtaattttaaaaatatctaaaaataattcaatctttgcttaactctttaccaaaaaatacttaagatattaattcttccagtt

SEQ ID NO: 10921 - DNA, 5994 bp, Homo sapiens
  misc_feature 5993, 5994: n = A,T,C or G
cgtccggatggaggcaagaggaagtgtgcgcaagacatatccaggcaggttgctgcctgaaggctggcttccgttttcacatgggctggcagggatctgcagccagcaagtgactggcacaggaatttctgccaagagcagaggatggaacacttcagtgcattcaaggacctgctgaagttcccatgatgtcacccaatggatccattcctcccattcatgtgcctccaggttatatctcacaggtgattgaagatagtactggagtccgccgggtggtggtcacaccccagtctcctgagtgttatcccccaagctacccctcagccatgtctccaacccatcatctccctccctatctgactcaccatccacattttattcataactcacacacggcttactacccacctgttaccggacctggagatatgccgcctcagttttttccccagcatcatcttccccacacaatatatggtgagcaagaaattataccattttatggaatgtcaacctacatcacccgagaagaccagtacagcaagcctccgcacaaaaaactgaaagaccgccagatcgatcgccagaaccgcctcaacagccctccttcttctatctacaaaagcagctgcacaacagtatacaatggctatgggaagggccatagtggtggaagtggcggaggcggcagcggtagtggtcccggaattaagaaaacagagcgacgagcaagaagcagcccaaagtcgaatgattcagacttgcaagaatatgagttggaagtaaagagggtgcaagacattctttcgggaatagagaaaccacaggtttctaatattcaggcaagagcagttgtgttgtcctgggctccccctgttggactttcctgtggaccccacagtggtctttccttcccctacagttacgaggtggccttatcagacaaaggacgagatggaaaatacaagataatttacagtggagaagaattagaatgtaacctgaaagatcttagaccagcaacagattatcatgtgagggtgtatgccatgtacaattccgtaaagggatcctgctccgagcctgttagcttcaccacccacagctgtgcacccgagtgtcctttcccccctaagctggcacataggagcaaaagttcactaaccctgcagtggaaggcaccaattgacaacggttcaaaaatcaccaactaccttttagagtgggatgagggaaaaagaaatagtggtttcagacagtgcttcttcgggagccagaagcactgcaagttgacaaagctttgtccggcaatggggtacacattcaggctggccgctcgaaacgacattggcaccagtggttatagccaagaggtggtgtgctacacattaggaaatatccctcagatgccttctgcaccaaggctggttcgagctggcatcacatgggtcacgttgcagtggagtaagccagaaggctgttcacccgaggaagtgatcacctacaccttggaaattcaggaggatgaaaatgataaccttttccacccaaaatacactggagaggatttaacctgtactgtgaaaaatctcaaaagaagcacacagtataaattcaggctgactgcttctaatacggaaggaaaaagctgtccaagcgaagttcttgtttgtacgacgagtcctgacaggcctggacctcctaccagaccgcttgtcaaaggcccagttacatctcatggctttagtgtcaaatgggatccccctaaggacaatggtggttcagaaatcctcaagtacttgctagagattactgatggaaattctgaagcgaatcagtgggaagtggcctacagtgggtcggctaccgaatacaccttcacccacttgaaaccaggcactttgtacaaactccgagcatgctgcatcagtaccggcggacacagccagtgttctgaaagtctccctgttcgcacactaagcattgcaccaggtcaatgtcgaccaccgagggttttgggtagaccaaagcacaaagaagtccacttagagtgggatgttcctgcatcggaaagtggctgtgaggtctcagagtacagcgtggagatgacggagcccgaagacgtagcctcggaagtgtaccatggcccagagctggagtgcaccgtcggcaacctgcttcctggaaccgtgtatcgcttccgggtgagggctctgaatgatggagggtatggtccctattctgatgtctcagaaattaccactgctgcagggcctcctggacaatgcaaagcaccttgtatttcttgtacacctgatggatgtgtcttagtgggttgggagagtcctgatagttctggtgctgacatctcagagtacaggttggaatggggagaagatgaagaatccttagaactcatttatcatgggacagacacccgttttgaaataagagacctgttgcctgctgcacagtattgctgtagactacaggccttcaatcaagcaggggcagggccgtacagtgaacttgtcctttgccagacgccagcgtctgcccctgaccccgtctccactctctgtgtcctggaggaggagccccttgatgcctaccctgattcaccttctgcgtgccttgtactgaactgggaagagccgtgcaataacggatctgaaatccttgcttacaccattgatctaggagacactagcattaccgtgggcaacaccaccatgcatgttatgaaagatctccttccagaaaccacctaccggatcagaattcaggctataaatgaaattggagctggaccatttagtcagttcattaaagcaaaaactcggccattaccacccttgcctcctaggctagaatgtgctgctgctggtcctcagagcctgaagctaaaatggggagacagtaactccaagacacatgctgctgaggacattgtgtacacactacagctggaggacagaaacaagaggtttatttcaatctacagaggacccagccacacctacaaggtccagagactgacggaattcacatgctactccttcagaatccaggcagcaagcgaggctggagaagggcccttctcagaaacctataccttcagcacaaccaaaagtgtcccccccaccatcaaagcacctcgagtaacacagttagaaggaaattcatgtgaaattttatgggagacggtaccatcaatgaaaggtgaccctgttaactacattctgcaggtattggttggaagagaatctgagtacaaacaggtgtacaagggagaagaagccacattccaaatctcaggcctccagaccaacacagactacaggttccgcgtatgtgcgtgtcgtcgctgtttagacacctctcaggagctaagcggagccttcagcccctctgcggcttttgtattacaacgaagtgaggtcatgcttacaggggacatggggagcttagatgatcccaaaatgaagagcatgatgcctactgatgaacagtttgcagccatcattgtgcttggctttgcaactttgtccattttatttgcctttatattacagtacttcttaatgaagtaaacccaacaaaactagaggtatgaattaatgctacacattttaatacacacatttattcagatactcccctttttaaagcccttttgttttttgatttatatactctgttttacagatttagctagaaaaaaaatgtcagtgttttggtgcacctttttgaaatgcaaaactaggaaaaggttaaactggatttttttttttaaaaaaaagaaaaaaaaagaagaaaagtataccagataccaaaagctagctttcttatgttttcctttaaattttcagatttaccttcattctgttttcactgatgtcttttgcaagcctttgattttttttttttgttacagtttagtaatttatattcaccagtcacttcttatgtcttgaacatctgtatctgtaaacatgaatcaccgtgtgtgtacttacagggctaggatttcagtgttgtcagagtattaccacacagcaacagcaacatacagaagatatgttcactcagataagactgccctaaacaaccattttgtcactcagttatttaactgtgtttagctcatttaaatcaaaatgtgtactttaatctaaaatgttttaataatctgtatttcttataattttaacactatgagctgcctatataagaaatcaagtaaccagaatgcacctataaattatggagcattgtagattttaccacatcaattcatagcagtaactttaagagggcattgtgcaatagttagttgttttcttgttcagctattttaaaggctgctttaacttgtttgtttgtctttgtatataactacttctaatctaatcactagagttattatattctgttatgtttgaccagaattatatgacaagaactggtgacagtttagtgcctctgcccattgtccatgatttacactaattgtgagcagtcttcttatgtgtcagctcattatttttgaaacatttgcctttaggctgttctttgaggtatcaatgaagtgattgaatttcaataccttaattcagtgcacataatactaatgtaacagcagatgaaaattgataaaacccaaaagagagtcatctaaatttgtagttcctatttctgtgggtttgcctggccatggttggagagggaatggtgtttgatggtaaacacagggtgtttggggatcaaggagcctagattctctccctggatctgtcactaacttgctgcgtgacctgaacacgtcactttacctctctgtgcctcagttttcccatgcatgaaaaataaaataaaataaaacggggattctaatgtttgtaagtgctttgagatctttgaccaacaggtgctattggagtgcaaagtgttactcttacgtgtttattttgagtcatgagataatcaattttaacccaaagtcattggattatttatatgaagtccataatgttcgagtacctcagggacatttaagagttggaggtgcaaatatattccaaaagggtgcaacagacacagtgtatccccctgcttctgtttttgtatatttttgctacttggtttttcttgatcatagctattttgtgcttgatctttattgtctaagatgcagtatcctgtactagcttataatattcccataccaaagtcatggggaaacaaacattattttgtttttggtttatttatactatattctgcatacagtactttaaatgccaattacagtgcaatctttatttattgtaaaattttttaagtgtacttatgtactaattttcccttgtagcatgttatatttttgtgttttatacttttgtaattttaggtcagtcttgttccttggcaacatctgtagtattattaatcttctgacattttcttatgtttttaaaaagataagagcatctagtgcattaaatgccaaaaaaaaaatacattatcagtgattgaaacgtttacatgtacccaaaaaccataatcatctcttggaagaaaatgctgagatcaatgaattattctgtgtgcctatattgacgtagtgagtactagagagttctgtattttattattgactataataattagtttaattagctttgcaaactgatggcatcaaggtaaatatatttttgccaaagttctggccttccaaaactcacccccttatttaaatgtgtgctatgacccactatgaccaggatttgcttctaaaaatcagcggtgttgcggacacggcttaaggcaggaatcactggttacaaccccctgggggtggaatctttgaacctaaagtgtaacaaacccatgggcataaaactaggcaatcaatagagaacacattacccagaagggaacagcatcgccagcatccaactcgcggattaaaacacacctagatatcnn

SEQ ID NO: 10922 - DNA, 836 bp, Homo sapiens
  misc_feature 1, 2, 3, 4, 639, 701, 818, 819, 820, 821, 822, 823, 824,825, 826, 827, 828, 829, 830, 831, 832, 833, 834, 835, 836: n = A,T,C or G
nnnnttttttattttttttaacacttctgaagtcctttattgggccggcaaggccgggagctgccctcggagtggggtcccagtccggagtcttcaggtcagtggcagccctgcccgttctggccggggcaggcggcccctgctgactcgctacttggtgcgcgccttcacatactcccagccctccttggagtactcgcgggccttggagggggccaccgacagagctgacatcaccgtcatgatgcctgcattccaggagtcacggatgggaaagtaaatctttggaggggctgggagctggggtatctgcaggcctgtctgctgacacacgtactagaatgttggctataatagttctgttcttacaacacatgaaattttttcgttttattttattttgttttcatagtgcatgttcatttctactcacaaacatgttcttggtgtatttcttatgcaaacaatcttcaggcagcaaagatgtctgttacatctaaacttgaataataaagttttaccaccagttacacataacggcgttggtatggtttatatggattcactttcatccttctaggcaataggaaatacagatcattgtaatatatatatatatatatacaggctctgctgaantgaaatggtgaaatcaaatcaccattctaaaaaattattacttatattgataaagcctggantctctcaacttgttttgctttgctttttttctttaaccaatcaatctcttactgatagattttgtgtaaaaagatatatactagtttcttcagaaagattaacaataaaaattgtgnnnnnnnnnnnnnnnnnnn

SEQ ID NO: 10923 - DNA, 565 bp, Homo sapiens
  misc_feature 276, 277, 278, 279, 280, 281, 282, 283, 284, 285, 286, 287,288, 289, 290, 291, 292, 293, 294, 295, 296, 297, 298, 299,300, 301, 302, 303, 304, 305, 306, 307, 308, 309, 310, 311,312, 313, 314, 315, 316, 317, 318, 319, 320, 321, 322: n = A,T,C or G
  misc_feature 323, 324, 325, 326, 327, 328, 329, 330, 331, 332, 333, 334,335, 336, 337, 338, 339, 340, 341, 342, 343, 344, 345, 346,347, 348, 349, 350, 351, 352, 353, 354, 355, 356, 357, 358,359, 360, 361, 362, 363, 364, 365, 366, 367, 368: n = A,T,C or G
ccgggcaggtacgcggggctcagttaggacccagacggaaccatggaagccccagcgcagcttctcttcctcctgctactctggctcccagatacccccggactaattgtgatgacgcagcttccagccttcctgtctgtctctccaggggagaggggtcaccctgtcctgcagggccagtcacagtgtcggcaagaatgttgcctggtatcatcagaaacctggccaggctcccagactcctcatctatggtgcatcctacagggccactggcannnnnnnnnnnnnnnnnnnnnnnnnnnnnnnnnnnnnnnnnnnnnnnnnnnnnnnnnnnnnnnnnnnnnnnnnnnnnnnnnnnnnnnnnnnnnagcagcgtagcaactggcctccgctcattttcggccctgggaccaaagtggatatcaaacgaaccgtggctgcaccatctgtcttcatcttcccgccatctgatgagcagttgaaatctggaactgcctctgttgtgtgcctgctgaataacttctatcccagagaggccaaagtacctcggccgccaccgcggtga

SEQ ID NO: 10924 - DNA, 1205 bp, Homo sapiens
acactgattgaggccaggagttcatgatcagcctgggcaatgaagtgagaccccgtctctacaaaaaaatatgaaaaaattagcgaggtgtggtgacacatgcctgtagtcccagctactcaagaggctgaggtagaggatcacttgagcctacgagttcaaggctgcagtgagctatgataactccactgcactgccgcctggatgacacagagagaccgtttctaaattaattaattaacaattttaagaaagaaaaagggccattgcttatttttccatacaaaagtaaaataaatcataatggccaataagccaatgtaacttttttttttaagggaaagcaaaacttgtaaaacctaaaatctcttagagttttggcatttacccaaatgttttcagtgattctgagaattggtggatataaaacacatttctcagcaaacactttcttcattttgcatcccttactgtacgtactttcttgtactgaatctttgcttgaccagggaacccacctagcccaacaagaacaatccattctacttcttggaactcactttattttccttttcccccatttcctataagataacctctaaccaatgacaatctcgacagctattcctgcaccaactgacctgaagttcactcaggtcacacccacaagcctgagcgcccagtggacaccacccaatgttcagctcactggatatcgagtgcgggtgacccccaaggagaagaccggaccaatgaaagaaatcaaccttgctcctgacagctcatccgtggttgtatcaggacttatggtggccaccaaatatgaagtgagtgtctatgctcttaaggacactttgacaagcagaccagctcagggagttgtcaccactctagagaatgtcagcccaccaagaagggctcgtgtgacagatgctactgagaccaccatcaccattagttggagaaccaagactgagacgatcactggcttccaagttgatgccgttccagccaatggccagactccaatccagagaaccatcaagccagatgtcagaagctacaccatcacaggtttacaaccaggcactgactacaagatctacctgtacaccttgaatgacaatgctcggagcttccctgtggtcatcgacgcctccactgacattgaagcaccattcaacctgcgtttcctggccaccaca

SEQ ID NO: 10925 - DNA, 595 bp, Homo sapiens
  misc_feature 552, 586, 589, 590, 591, 592, 593, 594, 595: n = A,T,C or G
atttggccctcgaggccaagaattcggcacgaggaggtgcggaggcgtgtggcagttgacttttgctgatggagcctctctgaagggcaaattcaaagtacagctgggtgctgcagcactgcgagtcgagacttgtggctgtggttatgaaggagcctcgtcagctatgcctttagcccctggtgaagcagtgccagtcacactttgccagtcaaacggagaggcagcagtagtaagaccagaccaaatcaaaccaaaccaagcaaaccacggggaatggagacacagagtttcattctgtcacccaggctggagtgcagatgcagtggcatgatgatagtgcactacaacttgggaactcctggggctcaagccatcttccctccactgcctccaagttagctggggactacaggtcatgtgagcacacagcataaaggcagctgcccacaagccaggaagagaagcatcatcagaaaccgaccatactggcttcctgatctcagactttcagcctccagaatgagatgggggggtgttaaagggaatganatccttggggacccctaaacttcatttaagccanaannnnnnn

SEQ ID NO: 10926 - DNA, 962 bp, Homo sapiens
  misc_feature 1, 2, 945, 949, 959, 960, 961, 962: n = A,T,C or G
nngaatttaggtgacactatagaagagctatgacgtcgcatgcacgcgtacgtaagcttggatcctctagagcggccgcctactactactaaattcgcggccgcgtgtgttgtagcttgctatctttatttctttatttgcactgggaaataacatctttgtctactatttctagcatctgagatccaggtcagttgtgattaatttttctctgtattatgcaatgtattttcctgcttttcatgcctctctactggatgctagacattgtacattttaccttcttgggcactgaatatttttgtagtcccagaggtacttttgagctttgtcctaggatgcagtgtgatcctttcaggtcctgctgtatagctgtgtcaggtggcagtgcccatctagggtttctcacttgtgttttctacccagtgccccataaatcatgaggttttccagctagggtggtgggaacaggccctaccctaggtcctgtgtcagcaccactgttccttctaatcttctcacatggctctttctctggcctgaggtggttccttacacacatgcgctgatcagtagggctgtgctgcctagttgagggagctccctctggcccccgacttagatctgtgtgtctctctccagtactgtgaccgcgagttccggccaccttagtctccctggatccctggcattgttttcctactgcagggaggctggcaggctccacctgggttccccccgcatgcacactgcagctgggaccctcctcggagcatgagctggacaatcacagggctcccctccggagtgcgccctctcaagaatcactatccttcactccctggtatttggtggcttgcaaaccgttgtttcacatattttgtccattgtttgcttgtttcatgcaggagggaaaagtccagtacctgtttctccatcttagcnatangagcacatannnn

SEQ ID NO: 10927 - DNA, 1806 bp, Homo sapiens
cgcgtccgcaaggctggccgcacagctttgtccatcgctctgaagtcacccacccatatggaaattgctgggcttctgagagcccacgcggagcagggcaggtccctggggctgtaggggctgcagaagaactggccgtggggaacaaaagccttcttctctggactcctccctcgcccttgaagagggcagaggtcacaggccagagagccacccttctagagaagaaactatgtcaaatatgcacatacattcctgttgtataattctgctcattaggatgctttgtagtttttgccttaggccaagcctgaaaactacacgggcttcagagcagggttcaaggtgcaaggtgaggggtacgtcggtgtcatccaaacatccaaaacatcttcagccttgaattcctcatgactctaccctctgtaacattgtgtagcaagcaggcaggcaggagcacattagcacattagaaaagcaatactttttacatggaattttacagtgcactatctttctgttttttaagcaagtgtatacaaatatgtcccattgatatgcatgtctatagatgggaggggatttaagccaaccccctggcaagcattctgtaggggaccctagaagaatcaccgtgcagactggtgaaactgaacaagcaccatttgggagctttgtttcgatggggttgacagagaaatcttaaaatctgacagggtagaagaagcactttggcatcaatgccatatgtacagtcttgactatttctgagtcatctagtggctccaatttgctccagggaaattggaattaattaagaaatttattatctagtaagttgctatgtaataaagaaaaaaaagaaattcaatccaatgacacacaccacatgtatttgggcagagtcagattctctcagctattttgagtctgtggaagaaacaaaaaaaagcttcctcctgaggatgggttattgtcatcaagaagccacctgcatagccgtatccattacctcatggtaattcccggtgctttcccctcatatcccctagaagcaaatatctgttctgaggttttttgggacttctggctgcaataggagcaagggacccaggcagggcagagcaataccttccgaaggcttccatattccctggggccagcacatgcaaggtttatatggtcagtagctcacgtgaagtcatctgaatctttcttaaatctgctctcttaaaatctcttatgcaaaaaaaaaaaaaaaaagccccttatataaaaaagaagtaatgtcaaagtttgatgagctttacattggaaactcaaaagcttgcactctcattttggctcggatgccaatttgctgggtgcccctgtggtgagtcatgaaacctccttgggccgcaatttcatcatctctaaaaacagaaattatcatacaacctacctcctgggaggtgctgcacaagaagcagctgatggaagtttcaaaatccaatttgtggccgagcgcggtggttcacgcctgtaatcccagcactttgggaggccgaggcaggtggatcacctgaggtcgggagtttgagaccagcctgacatacatggagaaaccccgtctctaccaaaaatacaaaaattagctggggcgtggtggcaggcgtctgtaattccagctacttgggaggctgaggcaggagactcacttgaacccgggaggcggaggtttcagtgagccgagatcgtgccattgcactccagcctgggtaacgagcaaaactctgtctcaaataaagaaatacaacaaaaaac

SEQ ID NO: 10928 - DNA, 1287 bp, Homo sapiens
aatgactcgtgaagaaaaagcatcattggttggcacaaataatgtccagtctccaggttgtgtcaaccaatgatgcttttaagggaatgactagtgaagaaaaagaaattctgatacgggacaaaaatgctcttcaaaacatcattctttatcacctgacaccaggagttttcattggaaaaggatttgaacctggtgttactaacattttaaagaccacacaaggaagcaaaatctttctgaaagaagtaaatgatacacttctggtgaatgaattgaaatcaaaagaatctgacatcatgacaacaaatggtgtaattcatgttgtagataaactcctctatccagcagacacacctgttggaaatgatcaactgctggaaatacttaataaattaatcaaatacatccaaattaagtttgttcgtggtagcaccttcaaagaaatccccgtgactgtctataagccaattattaaaaaatacaccaaaatcattgatggagtgcctgtggaaataactgaaaaagagacacgagaagaacgaatcattacaggtcctgaaataaaatacactaggatttctactggaggtggagaaacagaagaaactctgaagaaattgttacaagaagaggtcaccaaggtcaccaaattcattgaaggtggtgatggtcatttatttgaagatgaagaaattaaaagactgcttcagggagacacacccgtgaggaagttgcaagccaacaaaaaagttcaaggatctagaagacgattaagggaaggtcgttctcagtgaaaatccaaaaaccagaaaaaaatgtttatacaaccctaagtcaataacctgaccttagaaaattgtgagagccaagttgacttcaggaactgaaacatcagcacaaagaagcaatcatcaaataattctgaacacaaatttaatatttttttttctgaatgagaaacatgagggaaattgtggagttagcctcctgtggagttagccctctgtggtaaaggaattgaagaaaatataacaccttacaccctttttcatcttgacattaaaagttctggctaactttggaatccattagagaaaaatccttgtcaccagattcattacaattcaaatcgaagagttgtgaactgttatcccattgaaaagaccgagccttgtatgtatgttatggatacataaaatgcacgcaagccattatctctccatgggaagctaagttataaaaataggtgcttggtgtacctcggccgccaccgcggggagctcc

SEQ ID NO: 10929 - DNA, 321 bp, Homo sapiens
taagttgtccataagtgaacacttcaaaagcaacaattccatcccctggattcaaggaagaatcctatgcataatcattcacatgcatcatgacccagatttttcctggtgtttagaagggtgaagcagtggtcctttgagtgttcagacccagttcccaaggagcacagatccacctgaatcccatcttgggttgcaagccctgttgagtaaaaaagaaaccttctggtttcaacattcatcctttttatgattattgccaaaaaatttttaacaaacattaatatattgcataacatcccagtacctgcccgggcggcc

SEQ ID NO: 10930 - DNA, 563 bp, Homo sapiens
  misc_feature 1: n = A,T,C or G
nagctacgctctggtgctttgggccatgcagtcgggctcgattgccgaggctgccgcgctgcggagagtcagcgtgattctggtggtgctgttcggcatgcgttacctgaaagaacctttcggccgcccacggtctatagcctgtgggttggtgctgatcggcatgttcgtgatgaaactctaaccgtcggacaaaactaaaaaaggaatgggttatgacagtcgctttctggtgtgtgttgatcgctatttttctgccgtatctgtgcacgggcgtggccaagttcagcggtggcaagttcgggccccggcagaaccatgacccccgagctttcctggaaaccctcgaggggttcgccaagcgtgcccacagtgcgcaactcaacagctttgaagtgaccccggccttcgcggcggcggtgatcattgcccatttggccggcgctgcgtcgctggtgacgatcaacgtattggcggtgctgtttattaccagccggctgctttacatcatctgctacctggcggactgggcgattctgcggtcggtggtatgggcggtgggg

SEQ ID NO: 10931 - DNA, 614 bp, Homo sapiens
  misc_feature 1, 2, 3, 4, 5, 6, 7, 8, 9, 10, 11, 12, 13, 14, 15, 16, 17,18, 19, 20, 21, 22: n = A,T,C or G
nnnnnnnnnnnnnnnnnnnnnnccttttgaaggttgaatgcagggttttattgagtggtggaggtggttctctgaaggatggatgcagagctggaagcggggatggcacgggaagataatcttcctgctgggtggccaaacctctccgaccaccctcggctgaactcctctcggcgttcaaatgttcctcttctctctttctctgctgtatcgtttcaccattcatctgcttgtctgggatggtgaagacaactgtttgctcattctaaacgacacggaatagaggcgtctcctcatctgctcatctgcttctggagctgcttggcgataggtgattgcctcgccgctcagctataggcgatggtctcaccactcggtgataggcgattgtcccatctaggtcgccaaaatgtgtctggagttggtgggttcttcgtctcactgacttcaagaatgaagccgcggacactcgcagtgagtgttgcagttcttaaaggcggcatgtctagagtttgttccttctgatgttcgggtgtgttcacagattcttccttctggtggggttcgtggtctcgctggctcaggagtgaagctgtggacctccgcgcccgcgt

SEQ ID NO: 10932 - DNA, 614 bp, Homo sapiens
acttttttttttttttttttggtcttataatatttgtttgacacctcaaacctcttattttcatttcagagactgattaaatacagtctcaaggtgataaaataacacagtaggataaaaataaagtgacaagtggcaagggatggttagtcatctttgatacctgtggatactcaaacccaccatttaaaatgtcttaggtgttagatgtggtaggtgtttctatcaggaacacgtgggaataaaaacaaatttagaactcacatctgggcttctcacttctaaaacaagggtcaggaggccagaaggcggagcagcgcatcagttaggatttgacaggaccaccatgagggctctgaaggcggagagactgccagatgcgataaagcagaagctcacaggactcttttacagggctcctgaggccacgccagcagtgggaaaatctccagagtggaactgaattcaagaaacctgtgtacattgaggactgagaatggccctgcataaaatgaactctgaaaactttaccatctagagtgctcatgcaattaaaacaaaacaaacacaaacaaggaggcactaagcctattctgacaccactggtctgtagt

SEQ ID NO: 10933 - DNA, 1119 bp, Homo sapiens
  misc_feature 1117, 1118, 1119: n = A,T,C or G
ggagtcgaccccgcgtccggtggtttctaatgcagctggtcgtgaggcgcaagggtgagtgtaggcgaagcagctggcagcgtcgctcgctgtgtggcagcgttttaaattagagctggaaaactggaggagggtcaccgtacctgccgcaggaggggaaggatgggcttcctgcaacctcccttgccccacggcttcccatcctacccccggccgcgttagctgaaggccagcagggacgcaaaagtttttaggccccttaggtctttaggttagcatacgtatcaaggacagtaactaccatggctcccgaagttttgccaaaacctcggatgcgtggccttctggccaggcgtctgcgaaatcatatggctgtagcattcgtgctatccctgggggttgcagctttgtataagtttcgtgtggctgatcaaagaaagaaggcatacgcagatttctacagaaactacgatgtcatgaaagattttgaggagatgaggaaggctggtatctttcagagtgtaaagtaatcttggaatataaagaatttcttcaggttgaattacctagaagttgtcactgacttgtgttcctgaactatgacacatgaatatgtgggctaagaaatagttcctcttgataaataaacaattaacaaataaaaaaaaaaaacgacaaaaaaaaaaaaaaaataatcaaaaaaaaaaaaaaagaaaggaaaaaaaaaaaaagagcaagaaacagccatgacgtacaatgaacctatgcaacacgactatcggggctacgaatattcgcgtcgtagataggcgcacctcaacgagactacgacagaacaccaccagactactgccacactgagcaagcacgaacgcacatgaagacgcaagaacacatcacagccccgagcatacacacccgcacgccgcgacgacacagacggagcggcagaagacgagaacggtaacaacaaacacgaaacacgacagaagcaacacgcgcaacagaagaaacgccgcggacagaacacacacccgacaccataagacgagaacggcgagcagaaaagacaacaccgaacacacaagacaggcagcagaagagaacgacaagacannn

SEQ ID NO: 10934 - DNA, 600 bp, Homo sapiens
attaattaaggcgggggtggagatgaagcttcttcatggagtaaaaaatgtatttaaaagaaaattgagagaaaggactacagagccccgaattaataccaatagaagggcaatgcttttagattaaaatgaaggtgacttaaacagcttaaagtttagtttaaaagttgtaggtgattaaaataatttgaaggcgatcttttaaaaggagattaaaccgaaggtgattaaaagaccttgaaatccatgacgcagggagaattgcgtcatttaaagcctagttaacgcatttactaaacgcagacgaaaatggaaagattaattgggagtggtaggatgaaacaatttggagaagatagaagtttgaagtggaaaactggaagacagaagtacgcgggaactcctttgcatatataagatacaagccatctgcacgatcaccctcatttcctatctttgttgacatgttcctcttacaacacaagagcaaattacctctatttgaaagcgccctgtcttcaacacagctcatgacaattttatttaatattgatcctttgaatgagagatcaaaagcatgcacaggtcaatcctctgcac

SEQ ID NO: 10935 - DNA, 542 bp, Homo sapiens
  misc_feature 1, 2, 3, 4, 5, 6, 7, 8, 9, 10, 11, 12, 13, 14, 15, 16, 17,18, 19, 20, 21, 22, 542: n = A,T,C or G
nnnnnnnnnnnnnnnnnnnnnngagttccaggatacaggtgcagagtgtggaggtttgttacataagtagatgtgtgccatggtcgtttgttgcacctatcaacccattatctaggttttaagccccatatatgttagctatttgtcctaatgctttctctcccctcacccaccaaccgccctcaagtcagttttctaagagtattaatcaagaaaccatctcataatcacaccaaagcatatttctacacaagatataaaatactaggatatttgctaaagataaatgcatgccatacactgtaacaatggaaatgacttcctacaggataacaatgctaaaattaaactctttgtaattagtaaagatgaacatgtgggtaatatattggatatattttttaaactattttttgtcctcagtaaagagagagcttagataccttgtgtcataaaataataaaacaaaaataacatttctatgtgaacattttggtttgtttttaaaattcatcctccccaaagtgtatggcttgctcacn

SEQ ID NO: 10936 - DNA, 1381 bp, Homo sapiens
tttttaggcatggaggtgcatcagcagaatgcgttatttcagtattttgcggacacacttactgcagttgttcaaaatgccaaaaaaaatggaagatatgatatgggaatcttagatcttggttctggagatgaaaaagtgcggaaaagtgatgttaaaaagtttctgactccaggatattcaacctctggccacgtagaattatacacaattagtgtagagaggggaatgtcatgggaggaagctaccaagatttgggctgagctgacaggaccagacgatggcttttacttgtcattgcaaagatggtgtctcactatgttgaccaggctggtttgaaactcttggcctcaagtgatcctcccacctctgcctcccaaagtgctgggattacagataaggaacaacaagaaaactgccatcttagttaaagaagtgaatcctaaaaagaaacttttcttagtttatcgaccaaatactgggaagcagctcaaattagaaatttatgctgatctaaaaaagaaatataagaaggtcgtctcagatgatgccctgatgcactggttagatcagtataattcatctgcagatacttgtactcatgcttattggcgcggcaattgcaaaaaagcaagcttggggctagtttgtgaaataggtcttcgttgccgtacatattatgtattatgtggttcagtgctgagtgtctggacaaaagttgagggtgttctagcatctgtcagtggcacaaacgtgaagatgcagatcgtgcggctaagaacggaagatgggcaacggattgtaggtttgatcattccggcaaattgtgtgtcccctcttgtaaatctcctatcaacttcagaccagtctcaacagcttgcggtccaacagaaacagctatggcaacagcatcaccctcagagcatcaccaacttgagcaacgcatgaagaacggacaggtttcaacatggatggatctgaaatgctgttgaagcatatcatttgcataaaaatcagggacagtttccaaagaattatatatttttttcagttgtgctctctagttagtttttttgggagtaaggacaaacctggaatagatagcaaaactgaaaatcagcagtgctgatggtggtacatatgtctttcctttagcttctcccctgataattcccatctgcttttacttcgggtgagcagagggggatgtgtgtgtgcgtgtgtgtcagtctgtttgtgagtgtgttaaaggctacagaccacagttggtttaaaatgcttggaacttcccaaactggctttactttactttatgtttatacagtgctcagggttaacgcagtacatccatgccattgctgtgggaggtatcccccggttg

SEQ ID NO: 10937 - DNA, 610 bp, Homo sapiens
  misc_feature 1, 571: n = A,T,C or G
ngcagaagtggattttattcataatttatgcaacaaatactcatgatgttcaaggttctggtgtgcaacagtaaacttacattccctcactttaggttagtgagaatgaaagataataaaaaacaaaaaatatatataattcaagtggatgtaagtgttgtgaagaaaatacaccagtgatcataatagaaatgtaatctattctcggcttgtcattatattttaatctttttatggccttttgttctgatattggtacataaaagtttaaatcctaatgtattaaaaaagtttaatagcactataatttcagaactttatatcatgcttatcataccatcccatagtatgggaatctttccatttcagtaaatgtagatccacagtaatatttttaagggctatgcattccattgtctagatgaaccacagttcattgaaacaactgtccgatgatgaacgctgaagtcctccgagcggccgcccgggcaggtactgcggcgggtaggcctaggattgtgggggcaatgaatgaagcgaacagattttcgttcattttggttctcagggntttgttataattttttatttttatgggctttggtgaggg

SEQ ID NO: 10938 - DNA, 344 bp, Homo sapiens
  misc_feature 343, 344: n = A,T,C or G
ccgggcaggtacttttttttttttttttttttggagtctttaagattatctctatgttggctggctgcggtggctcatgcctgtaatcccagcactttgggaggccaaagcgggaggccaacactggggctacccaagagttgaccaaaggtgatattaatacatatgcttacttattaccttgttcgcacagttctagtgtaagtcttgaaaatcaagtaaatttggaaacatagttgcacaaactctctcatgagtcacacagttaatccagaatattatttctaagttatcataaagccaacaagcaaatatgatgtacctcggacgctctagaactagnn

SEQ ID NO: 10939 - DNA, 427 bp, Homo sapiens
actactttttactgcatcctgcaacaaatatcactgaaatgattcatttctggaagcattctactggagcatcccgtggcctggaacagagctctggggactggcatccttccactgactttgatgctgatgacagccctgatcgtgtgattcagctggccttaacccgacccacgtgcacgtattcctcagcacatctggagctgaagtcgagagcctctgtgggaacgcttggcagcccatgctgttctaaggctggagcaggatagactgctttcatctctgatgttagaaagcagacctgtttcagggtttggggaaggttgttcgatatgaactgggtcctctctaattatttttactgtatgtgtgacttcttcctagaaagaatggaagaatgtttatgttagaacattttatctattct

SEQ ID NO: 10940 - DNA, 854 bp, Homo sapiens
actttttttttttttttttttttttttgagagtactttcacatgctataccacatttaattaattctaacaacagcactggaaaataagtataattatgctctttagttccttctagacagaaagctttcatggggatgaaagactgttccttagctcagagtagggaatcaaagtaggcggggcttagttcagagtgggcggggcttagctcagaataggccatcaatttgtagaattgaagtgtgaactctgaggatgaagaaacagggctgcaggggtgtgtaacttgcaccaagtcaccctactttacattgcgccacaccgcccagctaagtcttcgaaatgttcataaggtgcttgagcactgattcctttgcctgttcaatgtttgaattccactgtcactggcttttcttttttcctcgtaatgaagcaaaacctggtgggttaattaatccttcttgatgctgggcagcagtaataggatcaagaagaaagcctttctcctcctgtgctcccaaggatgcccagcgggagactgtgaggagatggaacacagccttcactctgttaattgttcaagagcaaatcacctgccgtgaggaccatgacaatcctgggggccatttgtagaatattcatccccagactctgaactgagtcttgaagtctgagtaagaatttgctgggtgaagaaaagggtaacgttctttcaaaaggagagaccagcataaacaagggtcccggggggcagaacatcatgataggagtaggaatgcaggtgaggttttggttttctgcagaatattggtacctcggccgccaccgcggggagctccaattcgccctata

SEQ ID NO: 10941 - DNA, 1485 bp, Homo sapiens
  misc_feature 1, 2, 3, 1464, 1465, 1466, 1467, 1468, 1469, 1470, 1471,1472, 1473, 1474, 1475, 1476, 1477, 1478, 1479, 1480, 1481,1482, 1483, 1484, 1485: n = A,T,C or G
nnncttatgtataactaagtttttaaattatctacatattaaatattctcttctggtcttttactcttctttcactttgtttcccacagcttccccaacagacatacattgccaaacttgtggatttttgataatttttgataagttaaaagtaaaacaggaaatctctggaactagtcttttggaagagggggtagagtttttgactactcttttcattttcttcatcattattggtttatttaaatgtttcttccatttagaccaatgtgtggtaaattatatttttatagttttcagatttattgatataaattatacatggtgatttataattttagaaatatcttccttgtatttgtggttgtatcgtctttgctttcaatatttaattttttcctttttacttatttatatttgctaaaagattacctactttattattactctacaaataaccagcttttgcttttattgcttggcttagttggcttttttaatttgctttttaaaattactgttttttatcataagaaatgtatctggagtgtactttgttttctcttagtaagattttaattacatttaatcggagaactaaatcccttgctaatattttgtataaagattcactaccctccttggcatggtgaaatagaccctgtttagaacctttcatgtacacctgctccctcattaggagaaggaatattcaagatcccaatgcctgaggtttgtccagttggggcacctactttacccttgtgcatatcccctatttatctgtgcccaggacattttgcgtgggctacgtgtagaggtggtggccatacatagttatctttattctggcataaatcagatgtcacgttctcttttgccatatgtaataatcaagagtacccaaaagtgggtcttgaaatataattgtttctgagaggaacttattctcaggatatttttgtaagagggacaaaactacttaacagtgtgtatccttgcaataagtatattaatgaatacgatacaaccattttatacaggcaaaagatggtttaatgccaaagcacaaactcataaacccagttgatgaggagccagaacaatggtcattactgtatagagatgttttaaaaagtcaccatataagctttgaaataattctaatgaaaattatatgaccttgaggctgggcgcggtggctcatgcctgtaatcccagcactttgggaggccgaggtgggtggatcacaaggtcaggagatcgagaccatcctggccaacatggtgaaaccctgtcactactaaaatacaaaaaattagccgggcatgatggtgcatgcctgtagtcccagctacttgggaggctgaggtgggcgggtcgcttgaacctcagaggcagaggttgcaatgggccaagacggtgccactgcactccagcctgggggacagagcaagactctgnnnnnnnnnnnnnnnnnnnnnn

SEQ ID NO: 10942 - DNA, 1416 bp, Homo sapiens
ggcgcccgagtgcactgaagatggcggctgctgtaggacggttgctccgagcgtcggttcctcatgccatgcacctgctgtcacccagcatgcaccctattttaagggtacagccgttgtcaatggagagttcaaagacctaagccttgatgactttaaggggaaatatttggtgcttttcttctatcctttggatttcacctttgtgtgtcctacagaaattgttgcttttagtgacaaagctaacgaatttcacgatgtgaactgtgaagttgtcgcagtctcagtggattcccactttagccatcttgcctggataaatacaccaagaaagaatggtggtttgggccacatgaacatcgcactcttgtcagacttaactaagcagatttcccgagactacggtgtgctgttagaaggttctggtcttgcactaagaggtctcttcataattgaccccaatggagtcatcaagcatttgagcgtcaacgatctcccagtgggccgaagcgtggaagaaaccctccgcttggtgaaggcgttccagtatgtagaaacacatggagaagtctgcccagcgaactggacaccggattctcctacgatcaagccaagtccagctgcttccaaagagtactttcagaaggtaaatcagtagatcacccatgtgtatctgcaccttctcaactgagagaagaaccacagttgaaacctgcttttatcattttcaagatggttatttgtagaaggcaaggaaccaattatgcttgtattcataagtattactctaaatgttttgtttttgtaattctggctaagaccttttaaacatggttagttgctagtacaaggaatcctttattggtaacatcttggtggctggctagctagtttctacagaacataatttgcctctatagaaggctattcttagatcatgtctcaatggaaacactcttctttcttagccttacttgaatcttgcctataataaagtagagcaacacacattgaaagcttctgatcaaacggtcctgaaattttcatctggaatgtcttgtgtattaaactgaattttctttttaagctaacaaagatcataattttccatgattagccgtgtaactcctgcaatgaatgtttatgtgattgacgcaaatgtgaatcgtattattttaaaaagtggcagagtgacttaactgatcatgcatgatcagttaagtttatgtagtcattttacttattttattcattagctaactttgtctatgtatatttctagatattgattagtgtaatcgattataaaggatatttatcaaatccagggattgcattttgaaattataattattttctttgctgaagtattcattgtaaaacatacaaaataaacatattttaaaacatttgcat

SEQ ID NO: 10943 - DNA, 1897 bp, Homo sapiens
  misc_feature 1, 2, 3, 4, 5, 1895, 1896, 1897: n = A,T,C or G
nnnnnacgccagctggcgaaagggggatgtgctgcaaggcgattaagttgggtaacgccagggttttcccagtcacgacgttgtaaaacgacggccagtgaattgtaatacgactcactatagggcgaattgggtaccgggccccccgctgagccgcccggctgagccgacattgccggcgtcttggcgattcggcccgacgagctccgctttcgctacagcatggtggcctactggagacaggctggactcagctacatccgatactcccagatctgtgcaaaagcagtgagagatgcactgaagacagaattcaaagcaaatgctgagaagacttctggcagcaacgtaaaaattgtgaaagtaaagaaggaataatctaccctgactaaagcttgaaatgctacatttccaaggtgaagatgtgtgggcacattcccaacgcgcctgcacacgcactgctgctgcgcaccacccactgcttactgcgccaccgacctctggacacacacgcgcactccttccaactctccccacttgcgcgcagaacacacacaccacacaccatctcccccttgcatccctctgcatcccccacctacaccacttcttcaccccacacctcgatcccacatctacacactctcgcgcacaccacataactcgccggctctccacccttgctctcttacacctctacccatcctgccacacacccacaactacacgacaacacgaacagcacgacaacgagcatcaccacaagcaggacaccaaaacaccacccgctgcctgccgacgacgccgacgccactcctcatccatcgctccattgccgcgcgccggcgtcgcttcgcgcgccgccggcccaccaacaacgaccacgacgtccgccgtccaccacccacagcgacgacacaccgacggtgtcggaccaccacacacgcagtcggcggaccccatcctatccccgcgcgctctgaccatcccatcctcacctatattaataccccaaccacaacggccatttcactactcctacttcctgctcttccatcccaccaaacaacgtaggcggttagatacacacacaaactactacatcctccccacctagacacgacgctttaactaccccacacaccatatcactacaacccgaccacctacaccaaccacaccacatctcctcccacccctccactccctcatactcaacctcaccaccaccactagcaaaagccacactcacacacaccccccatctttgtaccctcttcttactgacttctacaccaccccttccgcgcaaccgacaaatacaccccactccaccatcctccaccctacccacactacacacgacccaacacccccatacacccccccccccacccccaaccacacacacaacacacgacccaccccacctaccacccatcactagaccaccacccatcacctacccatccgcactactcaacccactcacacctacctctgtcatccacctccccaccccaacacaacaccatccaccacacaccctactcaccgtccctatccccagatcacgagcctccaccatcaagcacccacacactcacacccactcaccccacacgtaccatcctacgcccccacccgcacaccctcacatcacactatactctagcaatccaacacacaacacacactgctcctacctcaccaccaccacttccgacactaacacacccactcctccgcactccttcacctccctcctagcagatccgcaccaactcacctccactctctactccactccaaacacaccacacatcacccacccctctacctctctctcactcacactctcatcactcgcaccaccatctagaccaaccaacacnnn

SEQ ID NO: 10944 - DNA, 3398 bp, Homo sapiens
  misc_feature 1, 2, 3394, 3395, 3396, 3397, 3398: n = A,T,C or G
nnagcggccgcggctcccccgcacctgcggccatggatgaggagcgcgccctctacatcgtccgggccggcgaagcaggggctatcgagcgggtcctgagggattacagcgacaagcatagggctactttcaaatttgaatcaacagatgaagataaaagaaagaaactctgtgaaggcatatttaaagtccttataaaggacatcccaacaacatgtcaagtgtcctgcctggaagtactccgcattctctccagagacaaaaaggttttagttcctgtgacaactaaggaaaatatgcagatactgctgcgactagccaagctaaatgagttagatgattctttggagaaagtatcagagttcccagttattgtggagtcattaaaatgtctgtgtaatatagtgttcaacagtcagatggcacagcagctcagcctggaacttaatcttgctgcaaagctctgtaacctcctgagaaagtgcaaggaccggaaatttatcaatgacattaagtgctttgacttgcgcttgctcttccttctgtcacttttgcacaccgacatcaggtcacaattgcgctatgagctccagggactaccgctgctaacgcagatcttggaaagtgcctttagcatcaagtggaccgatgagtatgaatcggccatagaccataatggacctcctctctcacctcaggagacagactgtgccattgaggccctcaaagctctcttcaatgtgacggtagacagttggaaggtgcataaagagagtgattctcatcagttccgtgtaatggcagctgtccttcgtcattgtttactaatcgtaggtccaactgaagacaaaacagaagagctacacagcaatgcagtcaaccttttaagcaatgttccagtctcttgtttggatgttctcatttgtccgttaacccatgaagaaacagcccaagaggcaacgactctagatgaactgcccagtaataaaacagctgagaaagaaacagttttgaaaaacaataccatggtatacaatggtatgaatatggaggccattcatgttttactgaattttatggagaagagaatagacaagggaagcagctatagagagggtctaactccagttctcagcttattaaccgaatgttcccgagcccatcgaaacatccgaaaatttctcaaagatcaggttttaccaccgttgagggatgtgacaaatcgacctgaagttggctcaactgtgagaaataagctggtgcgcctcatgacacatgttgaccttggagtcaagcaaattgctgctgaattcctttttgtcctttgcaaagagagagtggatagtctgctgaaatacactggctatgggaatgctgcaggactgttggcggccaggggcctcttggctggaggaagaggagataattggtactcagaggatgaggacacagacactgaagaatacaaaaatgcaaaaccaaacattaatcttatcactggtcatttagaggaaccaatgccaaaccccatagatgaaatgacagaagaacaaaaagaatatgaagccatgaaacttgtcaacatgcttgataaactttccaggagagcagatgtgaaggacctgcaccaggatggtggttagcaacagtggcccgtgccaaagcacttaccaaagtgatgatgactaagaccctgtcattaattccatgtgtcaatactgccctgtagtacacagagcagacaagaaagaagagcccttgaaaacaagggaatgatttttgagtcgttatcaagctaagtggcaagcgggaagctgaaactcgtatagttgaacattcttggaggcttatctcttccctggccagatgcctgatcagatgagaagcccgccatgatactgtcacagtgcctagaatgggctctttatccagtagacaccactgtactttttgatacgagggcagtcttaacttgtgttaaggcctgtgtgtagcattgaagagaggagttgcttaaaccaatgggactaaaacctgatgggacaataacgcctttggaggaagcactcaaccagtactctgtcatcgaagagaccagctctgacacagactaaaagcatcacctgctcaactctcaatattgctttatcagcatcttttctctgtagctccaggggaatcttttctctaaaacatttatgcccttgctttggctagaaacacattaactggtttactcattgagaatccagcatatttaagaggtgaccctgtgttttttgtgatattgaggcattcatacagagctgcagttagacggggttacgggggctaaaagcagaaaaaaaattccatttcatcgggatggaactgaaggattttattctataaagcggccctggttgaatctggcaattctttttgccaagatccctagcagaagatttagccatgtccttcccctcacttgtgtgagtggccccttctgaatctctccagcagccagaggcacgtgagaagcagaaagagctggtaaataaagccttgggcaagcgacttcttagatcagaactcaccaaatggaagcctagcagctgctccataaacctagccccattcttcatatcaattttgtataaatatatagaaacacacacacagcctcagacttacaaactgattatactctaaaagtttgtatgtcagttagctaaaacttcagaatacatttctccctataaagagttataaatgatggtttagttctcaggcagctacaaatgcctatttattccctaatgtacctgaacactagtaccatagaactgaaccaccatctgtatcagcgcatggggagtgtgcattctgaggtctaacccggggtgccaggaacacacacatcctccatcccagcatagagaatggggactccctgagtaatgggagttctttcatggcctctgcttggggtgggggagtcagcagcacccatttgtacatataggtcattcatacatcacattttaaattggggactgtgtgtgctggtgtgtgtgtgagttctacgtttctaccatatgtgatcagtttaatagtaactttatttatttaaaaaaaagaaacacaattagttactgttaaactgataaagggtgtttatttttacttttagaattggtcctatgaagaagtagaaagtgagtcatgcactagacagtgggcctagctcatcagtggctaaagttgaaaaggggttggtttcctgtatatatatgtatgtatatacacacgtacatacattcatatatatacatatatacataatgtgcttaaccactgccttttaaaactttaaattaaataaaacattggggttgattcaacgcgtgggtcnnnnn

SEQ ID NO: 10945 - DNA, 1791 bp, Homo sapiens
  misc_feature 1, 2, 3, 4, 1778, 1779, 1780, 1781, 1782, 1783, 1784, 1785,1786, 1787, 1788, 1789, 1790, 1791: n = A,T,C or G
nnnncgcagagcgacccacggtgcgagagaaacaataggacggaaacgccgaggaacccggctgaggcggcagcagagcatcctggccagaacaagccaaggagccaagacgagagggacacacggacaaacaacagacagaagacgtactggccgctggactccgctgcctcccccatctccccgccatctgcgcccggaggatgagcccagccttcagggccatggatgtggagccccgcgccaaaggcgtccttctggagccctttgtccaccaggtcggggggcactcatgcgtgctccgcttcaatgagacaaccctgtgcaagcccctggtcccaagggaacatcagttctacgagaccctccctgctgagatgcgcaaattcactccccagtacaaaggtgtggtatctgtgcgctttgaagaagatgaagacaggaacttgtgtctaatagcatatccattgaaaggggaccatggaattgtggacattgtagataattcagactgtgaaccaaaaagtaagctcctaaggtggacaacaaacaaaaaacatcatgtcttagaaacagaaaagacccctaaggactgggtgcgtcagcaccgtaaagaggagaaaatgaagagccataagttagaagaagaatttgagtggctaaagaaatctgaagtcttgtactacactgtagagaagaaggggaatataagttcccagcttaaacactataacccttggagcatgaaatgtcaccagcaacagttacagagaatgaaggagaatgcaaagcatcggaaccagtacaaatttatcttactggaaaacctgacttcccgctatgaggtgccttgtgtccttgacctcaagatgggcacacgacaacatggtgatgatgcttcagaggagaaggcagccaaccagatccgaaaatgtcagcagagcacatctgcagtcattggtgtgcgtgtgtgtggcatgcaggtgtaccaagcaggcagtgggcagctcatgttcatgaacaagtaccatggacggaagctatcggtgcagggcttcaaggaggcacttttccagttcttccacaatgggcggtacctgcgccgtgaactcctgggccctgtgctcaagaagctgactgagctcaaggcagtgttggagcgacaggagtcctaccgcttctactcaagctccctgctggtcatttatgatggcaaggagcggcccgaagtggtcctggactcagatgctgaggatttggaggacctgtcagaggaatcagctgatgagtctgctggtgcctatgcctacaaacccatcggcgccagctctgtagatgtgcgcatgatcgactttgcacacaccacctgcaggctgtatggcgaggacaccgtggtgcatgagggccaggatgctggctatatcttcgggctccagagcctgatagacattgtcacagagataagtgaggagagtggggagtgagcttgctagctgctccagtacttgagagcgactctgtgtcccaggcacagctgtgctgcgtcagggaggaagccagtatggccaggtggtggctcctgcagcctggagctgatgtgcagtggcctctgtgagccccagcctgagccagtcccagctgtgcttggagtctttatttattttaactatttcttcaacattccacatttgatgatgatacctctttcttccctgagtgtatatgttctaatacaaatctttttgtttattgtaaaaaaaaaaaaaaaaaagcttgtnnnnnnnnnnnnnn

SEQ ID NO: 10946 - DNA, 609 bp, Homo sapiens
ataccaaaggtgctacatctatgtgatgggtggggtggggagggaatcactggtgctatagaaattgagatgcccccccaggccagcaaatgttcctttttgttcaaagtctatttttattccttgatatttttctttcttttttttttttttggggatggggacttgtgaatttttctaaaggtgctatttaacatgggaggagagcgtgtgcggctccagcccagcccgctgctcactttccaccctctctccacctgcctctggcttctcaggcctctgctctccgacctctctcctctgaaaccctcctccacagctgcagcccatcctcccggctccctcctagtctgtcctgcgtcctctgtccccgggtttcagagacaacttcccaaagcacaaagcagtttttccccctaggggtgggaggaagcaaaagactctgtacctattttgtatgtgtataataatttgagatgtttttaattattttgattgctggaataaagcatgtggaaatgacccaaacataaaaaaaagtaataaacaacaataacgaagtccctcggcgtgccgctgcggtgtgagctccaattcgccctatagtag

SEQ ID NO: 10947 - DNA, 2377 bp, Homo sapiens
  misc_feature 2375, 2376, 2377: n = A,T,C or G
atttggccctcgaggccaagaattcggcacgagcgcaccggccgcggagctggcaccttggcgctgttggtggcggcggagacagctgtgaagtgtgaggttctttgtctgctggcagctaggggcgacgaggcgggacgtcatggaagtgaaggatgccaattctgcgcttctcagtaactacgaggtatttcagttactaactgatctgaaagagcagcgtaaagaaagtggaaagaataaacacagctctgggcaacagaacttgaacactatcacctatgaaacgttaaaatacatatcaaaaacaccatgcaggcaccagagtcctgaaattgtcagagaatttctcacagcattgaaaagccacaagttgaccaaagctgagaagctccagctgctgaaccaccggcctgtgactgctgtggagatccagctgatggtggaagagagtgaagagcggctcacggaggagcagattgaagctcttctccacaccgtcaccagcattctgcctgcagagccagaggctgagcagaagaagaatacaaacagcaatgtggcaatggacgaagaggacccagcatagaagagcacagctggccccggcgtttcatgaagtcagaaggcctggcagccatttcctggacgttgagaggattgtttatttgatttttatcctcatcccagcaggcctggctttgtggttagttgggtacatcacaaaaataagttaaaaagaaatatttgtgccttggggagaagaaacatggtgaaaacaggctgaggttgtcagggcagagagctgaaggtggggacagtgaccgcggacccctctgcgcttgaaagatttcctccacggcctttgccccagttgtggggaggtctctgtgcacagcggggaaaatgcttgtgtcgcctttggtgggccatgtcctaattagtttcatctgcttccctgggaacttactaaggggcccagagcactgttggaagtctggttagagtccccagagagttactctaagttaaaatgagccactgaccttggctcaccttagaggaatttcctcgagaacaacagagataagaaaagaaccggcctggccaatccttcaacagctctagagccccttttctctgctggcatggggctttgtttaccagctcacctgtgtaggctaaatgttaggggaccaagatcactgcaggttgaaaaccggcacttcaggcttagtgacagtggcgcagaaccaagtgtgggtgccttctgacacccaatttttggcctgagacacggccagggcgtgttctattcgaccggtagcccttgcccccgcaatggtgtccttaaccgttcctttaaaaaggacacaattagcctggccacggtgactcatgcttgtaatcccagcactttgggagggcaaggcaggcggatcacctgaggtcaggagtttgagaccagcctcaccaacgtggaaaaaccccatctctactaaaaaaatacaaaattaaccaggggtgatggcacattcctgtaatcccagctactcgggaggccgaggcaggagaatcgcttgaacccgggaggcagaggttgaggtgagccaagattgcaccattgcactccagcctggggcaacaagagcaaaacttcatctaaagaacagaaaatattaagatgattaccatgtgaaaacctttttaatattcaggatttggaaagtatagttgccccaggcatgtggttgttgccttaggtcctgcgaatattgctgaaaatcggattttccacattcactttcttccctgttttagggaagaaaatgatcatagacattcgattttccaaattggcgctcttattttcaatgctaattggattacttctcttccaaccctcctgcccatccatccatcccagtccccaggcatcttaacctctgcctcccagattcaagcgattctggtgccttagcctcctgagtggctgggacttacaggcacgtaccactataccctgctaaaatttgtatttttagtagagacagggttttgccatattggccaggctagtcgtaatgtctctttttaacactgaatatgttaggtggtttttcttgatggatttagggttaacctagttaataataaattgtttccaggtaattatcaagttttgtcattttataaatctgaagagttaatattgtcatcgatacaaataaagtgaaatctgactgagaaaaaaaaacaaacgaaaaaacggaccaccaaacagactgcgcacactgacacaactacgccaccgacacacagacacagaaaaaactcaaaacactccatgcaaccccaactacataagaacaccnnn

SEQ ID NO: 10948 - DNA, 1697 bp, Homo sapiens
catcaacttcatagtccttgggtctgagagaaggtgctgctactctgaagtctctcaacaaccagattgagacccttcttactcctgaaggctctagaaagaacccagctcgcacatgccgtgacttgagactcagccacccagagtggagcagtggttactactggattgaccctaaccaaggatgcactatggatgctatcaaagtatactgtgatttctctactggcgaaacctgtatccgggcccaacctgaaaacatcccagccaagaactggtataggagctccaaggacaagaaacacgtctggctaggagaaactatcaatgctggcagccagtttgaatataatgtagaaggagtgacttccaaggaaatggctacccaacttgccttcatgcgcctgctggccaactatgcctctcagaacatcacctaccactgcaagaacagcattgcatacatggatgaggagactggcaacctgaaaaaggctgtcattctacagggctctaatgatgttgaacttgttgctgagggcaacagcaggttcacttacactgttcttgtagatggctgctctaaaaagacaaatgaatggggaaagacaatcattgaatacaaaacaaataagccatcacgcctgcccttccttgatattgcacctttggacatcggtggtgctgaccaggaattctttgtggacattggcccagtctgtttcaaataaatgaactcaatctaaattaaaaaagaaagaaatttgaaaaaactttctctttgccatttcttcttcttcttttttaactgaaagctgaatccttccatttcttctgcacatctacttgcttaaattgtgggcaaaagagaaaaagaaggattgatcagagcattgtgcaatacagtttcattaactccttcccccgctcccccaaaaatttgaatttttttttcaacactcttacaaaggttgacattttccataacaggtgtaagagtgttgaaaaatgtcaacctttgtaagaaaaccaaaataaaaattgaaaaataaaaaccataaacatttgcaccacttgtggcttttgaatatcttccacagagggaagtttaaaacccaaacttccaaaggtttaaactacctcaaaacactttcccatgagtgtgatccacattgttaggtgctgacctagacagagatgaactgaggtccttgttttgttttgttcataatacaaaggtgctaattaatagtatttcagatacttgaagaatgttgatggtactagaagaatttgagaagaaatacaccacacgatacaactcaatacaggagtatcgtgtggtgtattttttaaaaaatttgatttagcattcatattttccatcttattcccaattaaaagtatgcagaagatttgggcaaataatctgcatacttttaattgggaataagatggaaaagtatgcagattatttgcccaaagttgtcctcttcttcagattcagcatttgttctttgccagtctcattttcatcttcttccatggttccacagaagctttgtttcttgggcaagcagaaaaattaaattgtacctattttgtatatgtgagatgtttaaataaattgtgaaaaaaatgaaataaagcatgtttggttttccaaaagaacatattgagtaaaaaaaaaaaaaaaa

SEQ ID NO: 10949 - DNA, 2870 bp, Homo sapiens
  misc_feature 1, 2, 3, 4, 5, 6, 7, 8, 9, 10, 11, 12, 13, 14, 15, 16, 17,18, 19, 2870: n = A,T,C or G
nnnnnnnnnnnnnnnnnnnacttgaccgtaggacatattaagatgtttattatttactaagagtaacatgtatacatttgcagtaatttgtacaatccaactacattacaattcacagtaacatacactagctctaacctgccttggatacaattaagtctcctcaacacactattttatcgccaaacttacattctggcttttataatcattttgcaacacctggtacagtatacacctatagctttgccatagaaatgcccctaaatgcccttcagagagcagaggtgaatactttctcatgaagaaacgccaacttttctaagcgagttcgtttcagtagtgggagccattcccagtaggataactctaccacacggtagccaagccgagccagctgccgcctcttcatattgtgcagtccaaggagatccctggagccatagcaatactggttcctgtttgtgaactgaacagccagcttcattcttggggtctgcatgcaggctgcggggcacaggccagccatctccatggcccctgatttatctgctacattgcaaaggaagccccccagaggtacagctgccttattctccaactccatgggctgctgcccaggctctgactcagttttgccctggaaatgtcctcttgctttcccttttagtaacttattcatcaaatcatctgtaaggctgactcccacatgctcaagccttaatttggctacattttcagccggcgtggcttctctattaaatggtaatggcttcaggttaacatcaagctggacctctaagtcagaagatcgggtatgaggcaaaatcatatggtgcttgacgtactggggcccccccagcatggtctccagtaaaaagacagtttctaagaattcaggctttgaattcatatccttctctgctaaataccacagcaattcagacccctcttgctgaaggtgagtactaagacgattgcctctgtaatctggacactcaatgccaactgtaccatcgagggtatatagttccttaaggaggtcaaacttagttctctcctgagctaacctgacaaaccctggactgagagcgaaatcaattaactctactggaaagtactccaaaaatgccaggcccagcaggcaggtgggcaggtgttctgggtactggttgaattcaggcatctttctgtgaatctcacttatcaggctggagtaaaattcttctgcattgggtggcttataattcagagttccaaatgaccacagaatcttggcaacatctttacttcgacagtgtgccactctaggaggcaaagacgcagccactgcattcattactccttcattcaggaagcgtaaggccgagcagtaaagagtcaggtgcatgacaccttgaactcccagggaaggaattcgctgaggagctatctctccaatctgcttcatgaaattgatgtgatccacgtgagtgaaacggaacattttaacaatattcactaaggagcgactactcagatgctgaatgttagcacaagccaagtctccaattttccgcatgacaaattcagagagattagtacttgatttaaagaaccccaaacagatggtaccaacctcctccaaattgatcaaatctatatatttaaggatcaatgattccaatttttgcattaggtcctgggatacctgacgattttcacctataacataaattaagtgaactagctgagacaaggatagatccttccagtgcaaattaagataactagaaaaaatgtttaaaaacctaggtactttgcggcctaagtacctccagagatcagccaccaaaaggagctgatccatattcatctcccatacctgatggcaacacttggtctcatacacatctagcattgaatgggagtgagggattcctaaaatgacaaaagctttcaaaacattgatcagatcttgggtatcaaagagctgtatcttcttcacactcagctggcagagcagagcaaagctggtactgcccagcaagacaggatgctgctctgcaggcaaagagctcagcttacacaaataatcaacaatgacttgagcctggagattattttgattaactctgactttgtgcaaaattagttcaccttctgaaacagacaggagctgagaagtctcagatgcattatagctgtgaacacggtattctggtcttagctgtaggaaaactcgcatgttttcaaaggaatcaaacacttctacgtcctcttcatcaactcctgtggccctgggtgagcccagctgcaatgtactggccttagaggaagaagtcttgctgaattccaaacctgggtgggcactgctggttgtcaggattctccgagaagagaaggtgctacatatgttcttaacttttttggcagaatggcagaggctaatgtgttctggagggtcctgtcccccatgctgtgtgctgctcacattccagtatgacacacttcggactgcaccaaaggcagaaggactgcaaaatgctcggtatcttacaagttttaatgacttgagagtagctgccattctggtgtcagtattgatctctttggcagtcagaatacagtcctcacagatttgaccaggcaatttcttgtttatatggtgcttgattagagctggacggggaggtgttccacaaaaactgcctggaaatcttcagcatatcacaagagccagggatcacaaatgactgggtcagaattggtgccagatactgatcctcccgaaggtgggcgccgcaacaccaaaccggggacgccgcgggcggcggcgacacagatactggctcctccggcgactccgagcctcacagcgtccggacgcn

SEQ ID NO: 10950 - DNA, 638 bp, Homo sapiens
  misc_feature 637, 638: n = A,T,C or G
actattttttttttttttttggatttttagtagagacggggtttcaccacgttagccaggatggtctggatctcctgacctcgtgatccgccagcctcggcctcccaaagtgctgggattgcaggcgtgagccacaccacgcccttcctattcttgagttttaagtgttttttattttttattttttgcatgttttggataccagtctcttatccgttatgtgttttgcaattattttctctcattctgtgccttttctttttattcttttaacagtgtctttgcagttcagaaatgttacttttaacatagttcgactcagcagtttttgctttcatggaccatattttggtttttggtgttgtatcaaaggagacagagtgaaagatactgaaatacacacctgagctgtttcctcgagggctttgactttgtagcatggctgagatttcatatgctctgtagctctgccttcggggttgcagaggatgaagagactttggggaggctggagagttggagaaaaactggcaactaagcatctcgcaagcttcagggttcttcttcttttcttccctaaagggattcctggaaaaggaaagtacctgcccgggcggccggccaccgcggtggagcnn

SEQ ID NO: 10951 - DNA, 1307 bp, Homo sapiens
caccgcagcgggtcgcgcgccctaaggagtggcactttttaaaagtgtttccggagaccagcctacagccgcctgcatctgtatccagcgccaggtcccgccagtcccagctgcgcgcgccccccagtcccgcacccgttcggcccaggctaagttagccctcaccatgccggtcaaaggaggcaccaagtgcatcaaatacctgctgttcggatttaacttcatcttctggcttgccgggattgctgtccttgccattggactatggctccgattcgactctcagaccaagagcatcttcgagcaagaaactaataataataattccagcttctacacaggagtctatattctgatcggagccggcgccctcatgatgctggtgggcttcctgggctgctgcggggctgtgcaggagtcccagtgcatgctgggactgttcttcggcttcctcttggtgatattcgccattgaaatagctgcggccatctggggatattcccacaaggatgaggtgattaaggaagtccaggagttttacaaggacacctacaacaagctgaaaaccaaggatgagccccagcgggaaacgctgaaagccatccactatgcgttgaactgctgtggtttggctgggggcgtggaacagtttatctcagacatctgccccaagaaggacgtactcgaaaccttcaccgtgaagtcctgtcctgatgccatcaaagaggtcttcgacaataaattccacatcatcggcgcagtgggcatcggcattgccgtggtcatgatatttggcatgatcttcagtatgatcttgtgctgtgctatccgcaggaaccgcgagatggtctagagtcagcttacatccctgagcaggaaagtttacccatgaagattggtgggattttttgtttgtttgttttgttttgtttgttgtttgttgtttgtttttttgccactaattttagtattcattctgcattgctagataaaagctgaagttactttatgtttgtcttttaatgcttcattcaatattgacatttgtagttgagcggggggtttggtttgctttggtttatattttttcagttgtttgtttttgcttgttatattaagcagaaatcctgcaatgaaaggtactatatttgctagactctagacaagatattgtacataaaagaatttttttgtctttaaatagatacaaatgtctatcaactttaatcaagttgtaacttatattgaagacaatttgatacataataaaaaattatgacaatgtcaaaaaaaaaaaaaaaaaaaaa

SEQ ID NO: 10952 - DNA, 340 bp, Homo sapiens
  misc_feature 340: n = A,T,C or G
actttttttttttttttttacagcaataaaaacgttttaatacaggaaattattttgctgtacaatataggcagacagtttgccttcagaaatccacaacaattgcagcttttgagggaggtcagcatcattggtctcagctaccattttcctgcagtgatgtttataaatagttcctggcaaaggaggttcgccgtatagggtcctacgagtaacctaggtggccgtcatctccgtcccagcaggcttcaggtcttagcacagcttgttctttctttcacgtcctaccaccgcgtacctgcccgggcggcagtacctcggccgccgctgcggtggagcn

SEQ ID NO: 10953 - DNA, 375 bp, Homo sapiens
  misc_feature 1, 2: n = A,T,C or G
nnagctccccgcggtggcggccgaggtacttttgtgtcatctccctagacagtgaccaaactacatgcaaataaatttgaaaaccggaaaaatttagaacacagtaagcagaataagcatgtagataccagggacaagacagtagttacttacactgtgaactcctaaagctttccagactgcgaagctaatcacaccaaccccacaccatgcatacagggagccccagcccagagctcgcaaggcaagggaagacccgctttccggtaatgcagccgtggccatacttcccttattgaaccattcagggcttttctttttagccaatgataatgttgtaataaatccagctagcattcccgctgcagcaacggt

SEQ ID NO: 10954 - DNA, 490 bp, Homo sapiens
  misc_feature 479, 480, 481, 482, 483, 484, 485, 486, 487, 488, 489, 490: n = A,T,C or G
tgtttgacttctgataacttctaagtcttactcctctgtatgtcttttgttccacatctgagcaagctaataagaaagcctgggtgctttctgctttggtgcttacaggagatccaaaccatacaaccctctgcttgcacacaggaactctcacctcaatctcactttctaaccacaagcaaaacccaaaggcagtctcctttcctttctcccataaaccattgcggacctacttgggaggcctgcaccccattgtccacaaaaacttgaattctgtaagtaataattttttaagctctttcggagtgggtttcacatcctcagtctcaacatctgaattaaatattgactgagagtgaatcctgcaccttcagaatggctacaaaatgctctcttagaggttgtgtgtgtctctgcttacataactatctgttattgaatgttgactactttttttcatgaattcttaacatcttaannnnnnnnnnnn

SEQ ID NO: 10955 - DNA, 269 bp, Homo sapiens
  misc_feature 1, 2, 3, 4, 268, 269: n = A,T,C or G
nnnnctcgggggggggcggtgaggggaggaagagttagagtagaagataaagaaaaagatttttttttaatgcaagcatcaagagccctgaaaatggctaactaggtaaagtataccattcttttctcaagaatcacacactgaaacaacagagagaatcagcctgagagattttcgcaggagccttaaaagcaggagttgtaggtcaatggaaaaacaaatgctatccggtaaagcaccccttcacccatcttcagcaaggacagcnn

SEQ ID NO: 10956 - DNA, 2005 bp, Homo sapiens
  misc_feature 1998, 1999, 2000, 2001, 2002, 2003, 2004, 2005: n = A,T,C or G
cagacagggtcttgctctgttgcccaggctggagtgcagtggtgcgatctcggctcactgcaacttcagcctcctggattcaggcaacactcctgcctcagcctcccacgtggctgggattacaggtgcctgcccccatggctaattttttgtattttttgtagagatggggtttcaccatgttggctgggctggtctcactctcctgacctcaagcaatctgcctgtctcagcctcccaaagtgctgggattacaggcgtgagccaccgcccccagcctgagcctttttttttttctaatgcatccaaggttaaggggaagacgcaaataacaggactactctaaaaggaaacctgtttgaactctgtgagatcagtcatcagtctcagtattccacaggcacaccttaatttcattgtaaaaagatatatatattttggctatttttgtgcttttgggggcctattttgtgcttttttaccttatgtagagatcttaatacaaagtgattttctacattaaaaagagactgaaataaattgtatagttacttaactaatgaagacatttcagaactctgggatgattttaatcttgaagtagtaggtggtatagtcataaaaccattcatccccttcttgattgtatcttaattttctggctttaaggcgacatctgagaggtaatgcattcttttttatattgaaatcataaactatcacccgctgcttctctgagttacttttaattttgccttgtggttatggtttggcgtttccttctgtttggttttcagagccccatgtctatatagtcctgagtgcaagtaattactatacttgcaaatgaagatcagtatttttgcctagatctgataaaaaaattttcttggcttattataaaaattcaaaagaaatgtgtacaaaagaacttagtatagcttctcaggcataacctgagacttggatgaaatttaaacagttcgaattactttgagatcataaggcttttatactcttgtaatcaaaatggcttatttttcaggcactaaggattgttaagagaaaagcttttcaacgaaggattgcctttcttctcccacactggtgtggactaacggagtcgacccacgcgtccgaggcactgtattcattgccaatgttccaaattatcaaattcaagtgaatttatttgtgtgttctttacttatataaaaaaagataactttaaggatgtgcaagtacatttccaactgctagcacaaccagtattttgtaattaaacaaatcgctgtatggtatggcttctacacatttatgtctatagatatctatcgatcatctttctattctgtttcatgactgaataatgtaaaaccagtgttggcaattggtatcatcaatgatactcattttttaataaccaaaggcaggggaaaatcattttacttattaataaatattttatgatgtgaaaaaaaaaaagacaaaataaaagcacactcacaaatttaagcttatttagttagattttaaacgtagaatcattattactaaaaaccaaattttgccttatgtcacgtcccacaaacctaaacagaatacccaagcgggggggggcttctaaaattttttaaaaaaaaaaccttcgacgccccccggggcaagaggaaaataaaaaatttctccttttggggaaaaaacttttttttttcgtccaaacagggcggaaaagaaaagggaatgtgttctccgaaattcttccacaaaaggcgtttttttgctcccggtgttttttggggggtgggcccaaaaaccatagagggtttttttattgtgtcgggaccccggagaccacaagcgaaaaataaagatgtatatccgtcttcctccaaaaaaatacggacgcccccgaaaattgggtgcgcggggggtttattatttactcaagcggggtttaagggttcccaaaaatagggggtttccccgagaaaaccnnnnnnnn

SEQ ID NO: 10957 - DNA, 3541 bp, Homo sapiens
  misc_feature 1, 2, 3, 4, 5, 6, 7, 8, 9, 10, 11, 12, 13, 14, 15, 16, 17,18, 67, 68, 69, 70, 72, 73, 74, 3539, 3540, 3541: n = A,T,C or G
nnnnnnnnnnnnnnnnnnctcccccccttctatgggggggggttttttccccccgggggggggggcnnnntnnnaaaaaaagggccaaatgagggggccccaaacgggggcgggcaaagggggtattttttgttcccccttggtgggtttttttttttttttttcttgtctttacaaaagattattttattaattcaatttttgcataaaagactgttaaaagaacttgctaacttgaaaacaattttgagtatttatgatctttccaacttgaaaacacctgaaccttatagaacagattgtgtaaagcagccagggccacaggagtgaaagaagatggagacccgccgtctggtcatgatatgagaggcctggacagtgacctcacgaacaaaaagaaatgatcctcttcagtccaaagtgtgtttgtgagactaatgactccatgccctcacatggccactcctcttacagcagacagcttcactccgctccagccccggtactgcggtctgtggtaatttacatgggaatgggatgagatctagtagttttagatccaacgcaattctgggaagggttggtaataaaccaaaactcaatctatgcagtatttaaaaaataattgagagttgtgacaacttcgattcttttcaggaggtgctgtcttaagatagaagaaagggatcaagctcttatcttagaaagcacagacacgtttagctcagggtagtgcaattcaatgctaagtggctgctccatgaaatctaagggccgggtaaggggaagaggcccagggatttcttccttgtctgacactctcgggactagcattctggcaggtcttacaagttataatacaaaaccatcagataaattctaatcacgactgtgtagttcctccccaaaataattttcctcttagaagtaaaatcaggaaaggggctgagttctgaaaagaaacatcggggctgtggcccaggccctctgagtgtggacgctgtcccccgtgtctccatgtttactgccttatcgtctcctttgtatgaaagtataatttacgtaattcgtccttggagaatcacagtggtgttcaagaaccttttgaggccatccaagtttttgtccttcagtaccttgaaatcagataatctcaacatccagaaatagcctttgatttgttctttctctgatgtcttgtgtccttgggatcaaagcctctttcactggcaccaaataatgcccagtgaggagttctggccatataatcctttgcgctgaacgtttttgatccaccactatcttcatattcctggatgagctcctggaagcggttataatcgatccatgtccaccattcaccaccaattttaaactttctgtgtgctatcaggaggcaattagagtgttcgtgttcacatgcaatttcatattcggggatcagatccaccaactcgtggacaaactgtaccacttcctcatgccagggcacgtgggccatggtaagactgcttgctgaactttctccgcagtaggtaacgcccttcacttcgatgaagtcaggattccccagggacacgagctgcgcgtaggcctggagctcgtccacgttccatgctttcacgagcgtcagtctgtagacagttcgttgttgcttgactgccaaggcttttaaactgtcaaggaatctctgccagaaatccttgaagagtgggcggtcgattttcttcaggctgtctttggtactggcatccacactgacatacagctgagtaaccggctcgaggttcctgatttccgcaggaaattgtgcgtttgtgaccaggaagctggaaattttacactggtggagtagcttcaaaaacctgttgatctctgggtacattattggttctcccacgagggacaatgcacagtgctttaccgtcattccttcttcaaagcgttctgctttgacgcccggtactcctttaaactgcttaatcatgttctgatggttttcaatggcttccttcaagatcatttcaggctggtccatcttccaccgccactcagtgcccacggggttggtgtggtgccgccaacagaagacacatttattagcacacgccaagctcggggtggtttccatgcagcgatggctctcaattccatagaatgtgtgtttgtaacaacctcctctccctcggagcatggactttgtccacctgcaaagcttcacccccgagtggctcccaatcaactgataaccttgtttagtaagggcttctcggagagcaggagttatcatagctcttctttcaccatcttcattcctccccatgttcctgaacaaaccagacttctcttcctgctgttccttttctctcttttctttcttcacatgatccataattttgcccaaatcttcaacatcaacaatggaatttaggctctgatggtcctcaccaccaaactcttcttcactggagctctcaaagggttcttcctcctcggtgtctctatgatgcaattcatcctgctcatgagatccttcctccctctcctctgagccatgttggtgagattcacatttgcctttcttgcagtggccgccacaggacttctttctctcccctttctgaagtgcctgcagctgggagatgaacttggtcttccatgctctgaagtcggcctcaatgctgccgtgcttgcttttaaccacgtcgcagtcgccctcccctcgactcatcacacgatgcgcgccaagcatccagagccacttgtcaacatttttgccaaccttgttgaagtggctagcataggcagaatttcccaggccaaataccgcatatctcatacccttcaggtaagttttgccaaatcgaaaatcaatggatgcttcctctaaccatttgcagaaccactctgcactttcagttggtaggccgtcagtgtatgtcgcaaccaggaagacacagacatttttactagtcacctcttctatcagatgatcatctggatcatattcttttagattaataatggccacaggcagatccagggatgtaactgcttcagcaagaactgttgcgaatccctttgctgttccagtctgagaaccataaaaaatcttcactccagacacaaagatgtctttctcttgaagggagacataaccatttgtcatcaaatcctgagctgcttttggaacagatttttcctgtaagttcttgccctgcgtcttgatgacaatctggacacaaatccaaaggctaatgctaacagcaaagcccaaataaatgtaaaacctgtttatccataatgatattaaaggtgagaagaggtcccatgtatccgcagaaggatccatcctcctcagagccgacaggagactaggatctcggacctggatagcccgatgattcgcactggtaccgcgagacgcaccgagctacctcgccgcgttagcggcgtaccgagtgcctgcagacctgtgggcagccatgacactgccaggccggtcctgattggttcagaggacgaagaggtcggacgcnnn

SEQ ID NO: 10958 - DNA, 684 bp, Homo sapiens
  misc_feature 680, 681, 682, 683, 684: n = A,T,C or G
aggtactttgtctctgtgtctctttcttttccaagtctctccttccacctaatgagaaacgcccacaggtgtggaggggcaacccatcccttcactgaaccatttttattcttccagaaatgtgattgataacagtaaagccacactcctcaagtgcctgaaatacccctcattgtcttcttcaggtggcaagggctctggaacagccacataaagcccttgaagataaggatggtcaaacaaaataatatcatacctggagaaactcagatcttggtaagatttactggttgggaatccaaagttaatgccaagaagcagccgccagttgggatcaaatgtgagcctatggatcaaggtgcgtactcaaacacagagagctttctgaaagatgctaccagtagtttttccagggcagagatgtgtcctttatttttctctctaatctagcccatatgcttagctgagttttcttcatacattgatatgtccaagaatccctcttagaaatgacgaggcacagatagcaagattatgaaattctttatgcattaggcttaaattgaatgtatcttaaggttttattgcaaaatattgcctgtttcctttttaagatgatacaatttataatatgcaaatttgctgtctgtcccttccctttatgtacatagaaatgggcnnnnn

SEQ ID NO: 10959 - DNA, 603 bp, Homo sapiens
  misc_feature 603: n = A,T,C or G
gatggagtctcgcttttttgcccaggccggactgcagtggcgctatctcagctcactgcaagctccacctcctgggttcacgccattctcctgcctcagcctcctgagtagctgggattacaagcacccgccaccgcgcccagctaaatttttgtatttttagtagagatggggtttcaccatgttagccaagatggtctcgatctcctgacctcgtgatctgcccgcctcggcctcgcaaagtgctgggattacaggcatgagccaccgcgcccggctttactttccgcaacttattgagagatgtcatgatccttatggaccccttcagggtttctacacagaaaagaaagagacaagaaacagagggccctcgaactctcagaaataggccaagatggcataattaagtctatgaatcaagataggttttctaagtggagagcaatactaaatttcttgtaagtgaagactaaaggaaataccaagcctctttattttaacaattctctaagaattagaaaaattaactcatttttaaacatttaaagctaccccaccccatatcatgacttaccaattctttacaaagctcgatcctan

SEQ ID NO: 10960 - DNA, 1587 bp, Homo sapiens
  misc_feature 1, 2, 3, 4, 5, 6, 7, 8, 9, 10, 11, 26, 1587: n = A,T,C or G
nnnnnnnnnnncgaaagtcttctagnattaattaacgccgggaaccaaatcaagtaaattttgatgcataaacattgtaaaagatgagataaaacactcacacccccttttagaaaatgggatgatcctggctcttactgtgaaatattgcaagatgaagtccttcctgctgatggctctcccagtgagagtacatttcttgtttgtcttttttttctttttcttgtcaattcttgggtgggagaaaagccttctaatatttcctcatccaaaaactcatagtctgagatttttgcagttaattttatcatgattagtctagaatacgactgcctttcattttgcattcaccttcttcgtctaataatgattaatgccttctgtcagttttttctctttgccattatgaatggaaaatgaaaaattgtgaattcccatcggtgttcagtgaaagctaaaagtagacaacaggtatgatgtcttgaaagatgatgatgaaatactttggacaatacaatgagaaaactaatatcttaaaaactatttagttatttttagcatagttgagaataatgaattataaataatgaattataaataatgaactattaaaaactattaaaaaacaacagtttttacatttgtttcaaaatgtagggaaaaaatacgctcactaggattccatcatatttcttagatttataagagttcagtggactcatttgataattgcaagatagcatgagttttagtctgttcttttaaaaaataagttttctctttgttctttggaagacttttaagaaagaataaaagtaatgacatctcaatcctaacaagtaactagaactgctaaaaaaaaaaaaaaaagggcacctgaaaagtttaaaattttctctcttaaaagttagctccctggttaaaggcagaatttttaacttcaacttaacaacttgtggctgccatctaagtccagagtactaggtgctctaggacccttacccttgcgaggcagtgggtcctcaaagtgtggcccccagataaattagcatcagcaatccatttaagaatttggttgaaatttcaaattcctagagctccaccccagacccgttgaatctctggggctgtagcccttgcagtctgttttaacaagccctctaggtgacgctgatagaggcaaacttttgaggactcagctctggctgtaggagaactaaaggattctgctgtgaggtaatagaaaaggagtaaatttgaatgtgatgaatatgcttaacttcctaagcaagaaaaatgaacgctgtttatagttacaactgacaggggaaaaaacttgagagttacagcgtagacctttaaattttcggtaatacttaatttttatgccaaacaaaatttattcaaccaatttttttcctaacgggggattctacacatttggggaggccagcagactgggggtactgcacgacagagaacaccaacaaggttctcgaaaacctttggcgtgcacggaaagaaagaaccataccgtatcgactgggtatatggggaaattcacatttcacattctacgttccgaan

SEQ ID NO: 10961 - DNA, 878 bp, Homo sapiens
  misc_feature 878: n = A,T,C or G
actgagtcaaggacgtctttaacgtcatgggcggctcctttacccacgctttctagatcttcgactgcatcttttcctagttttccgagtccccccacagctttttttgctccgtctaggcctttttccagaaggctggatctctgcttccttggctttggtgcctgtctggctaaccctgggtcttcacctgcattttccttttgagctgctgatgcttcatggcaagggttccccgattccgcggggggggcaaggctgggtgctcgcggggacagcggcttccttgatccttgccacccgcgactgaacaccgacagcagcagcctcaccatgaagttgctgatggtcctcatgctggcggccctctcccagcactgctacgcaggctctggctgccccttattggagaatgtgatttccaagacaatcaatccacaagtgtctaagactgaatacaaagaacttcttcaagagttcatagacgacaatgccactacaaatgccatagatgaattgaaggaatgttttcttaaccaaacggatgaaactctgagcaatgttgaggtgtttatgcaattaatatatgacagcagtctttgtgatttattttaactttctgcaagacctttggctcacagaactgcagggtatggtgagaaaccaactacggattgctgcaaaccacaccttctctttcttatgtctttttactacaaactacaagacaattgttgaaacctgctatacatgtttattttaataaattgatggcaaaaaaaaaaaaaaaaaaaaaaaagaaaattccaaaaaaaaaaaggaagtacctcggccgcgaccaccttctcgtgatcctgaaaaataatgtgaatctctgn

SEQ ID NO: 10962 - DNA, 1195 bp, Homo sapiens
  misc_feature 1, 2, 1170, 1171, 1172, 1173, 1174, 1175, 1176, 1177, 1178,1179, 1180, 1181, 1182, 1183, 1184, 1185, 1186, 1187, 1188,1189, 1190, 1191, 1192, 1193, 1194, 1195: n = A,T,C or G
nncacgaggcgccagtcccctaaccctgaggctgccgcgcggcggtcactgcgccggggtagtgggccccagtgttgcgctctctggccgttccttacactttgcttcaggctccagtgcaggggcgtagtgggatatggccaactcgggctgcaaggacgtcacgggtccagatgaggagagttttctgtactttgcctacggcagcaacctgctgacagagaggatccacctccgaaacccctcggcggcgttcttctgtgtggcccgcctgcaggattttaagcttgactttggcaattcccaaggcaaaacaagtcaaacttggcatggagggatagccaccatttttcagagtcctggcgatgaagtgtggggagtagtatggaaaatgaacaaaagcaatttaaattctctggatgagcaagaaggggttaaaagtggaatgtatgttgtaatagaagttaaagttgcaactcaagaaggaaaagaaataacctgtcgaagttatctgatgacaaattacgaaagtgctcccccatccccacagtataaaaagattatttgcatgggtgcaaaagaaaatggtttgccgctggagtatcaagagaagttaaaagcaatagaaccaaatgactatacaggaaaggtctcagaagaaattgaagacatcatcaaaaagggggaaacacaaactctttagaacataacagaatatatctaagggtattctatgtgctaatataaaatatttttaacacttgagaacagggatctgggggatctccacgtttgatccgttttcagcagtgctctgaaggagtatcttacttgggtgattccttgtttttagactataaaaagaaactgggataggagttagacaatttaaaaggggtgtatgagggcctgaaatatgtgacaaatgaatgtgagtaccccttctgtgaacactgaaagctattctcttgaattgatcttaagtgtctccttgctctggtaaaagatagatttgtagctcacttgatgatggtgctggtgaattgctctgctctgtctgagatttttaaaaatcagcttaatgagagtaatctgcagacaattgataataacattttgaaaattggaaagatggtatactgtttttagaggaataaacgtatttgtggnnnnnnnnnnnnnnnnnnnnnnnnnn

SEQ ID NO: 10963 - DNA, 577 bp, Homo sapiens
  misc_feature 1, 577: n = A,T,C or G
naggtaccagttttaaacctgttctattctaaccttggaatggagtcacatgtttcagcagcaatatgctgtttcccttcctcggtttctcacatcaccctctggagaatggtgtggaaactgccctgtttttacatcaagataaaagcttcaggaagttactggagagtggaatgcaggggtcattctggataacacaaaataactatttgattagaccaaccatttggtctctaaaattgggtgctaaagacaaagataggaaattcaaaaaaatcaccacctgtagaagaaaaatcagttaataatttgacagatttaagggcctcacctttctctcacagaactttacctcataacaccctgtttgggaaaattggaaaatatcttctccttacctcctaggggataaacaagagtttaaatgttgccaccaactcaaacaaaacacacctcattctttatgttctggagggagagggagtccttattttgcttcaaagtttcctttctggagcttcttttttttaagaaaaaaaaaaaaaaaaaaaacagaagtacgtcggccgccaccgcn

SEQ ID NO: 10964 - DNA, 343 bp, Homo sapiens
acagtgatgtgatctcctgacgtcaagtgatccattcgcctcggcctcccaaagttctgggattacaagtaatacaaaatacagttaaaataaaatgtcaacctcctggagtgatcggttacagaatgcagcagatatgtctgctaacatggataagcatgccctgaaaaagtatcgtcgagaagcctatcatcgggtgtttgtgaaccgaagtttagcaatggaaaagataaagtgttttggttttgatatggattatacccttgctggagagccagtgtaactccttcaagactggagtgacacacactgcatctgcatctgcctcattgtacctgcccgg

SEQ ID NO: 10965 - DNA, 2827 bp, Homo sapiens
ccacgcgtccggctttgtttaggcttccatgaaactaagctggaatagaaactacacactagacacagcagtagtcatagtcttcacaggtttaggagctactggaccaacattcttgtttttgcttttgtttttttaaataattctagtctggagctaactgtggagcagccaaatagtagctggcatgttgattcaaaccatgggctgaatttgctcataggctgtgcatcagacaaaagcttgaatatttgtgttgtatgcttgttccaaccaccgcttgtgtgagcatttttgtggcttgtacagaaagtacacttttaaattgtctcttgcatcactaaaatttttttaaaatgagcataacaacgaaaggcatccagctgactttttgattccaagattattgattggattgacttttttgcattaaatttttcccagcaaaataaatcatatggcgagtcagggaataaaaagtcaaaagaaacaaatagaagctttttttttaaaaaaatgtattgcttctgaacttttttctgccactgctccctagccctgtttagtttgttattgctgcttttcttttttctttctgtatctatgcctttttttcacagtagtccttggctctgcacggaataaatgataccctcaaatctaattggatgtgctttcgcctttgcatgtaagtacggtagtaagaaacctttgagatctttctgacttttcaaaattagagaaagcaaatgggatggatagattttttttttcttttcaaggggggcaggaaggtaatggtttgagtagcctttgtttaaaaaaaagactaaatatatttaaaaggccacatttatatttttttcacaagaaccacataataaattccacttcttgacctgaatttggaaatccgaaattactaatccaggccaggtgtggtggctcatgcctgtaatcccagcactttgagaggccgaggtgggcagatcacttgaggcctggagttcaagaccaccttggcgaacacggtgaaaccccgtctctacaaaaaatacaaaaattagccaggcgtggtggcacgtgcctgtagtcccagctacttgggaggctaagtcaggagaattgcttgaacttgggagatggaggttgcagtgagccaagattgcaccactgcattccaacctgggtgatgaagtgagactctccaaaaaaaaaaaagaaattattaatccctgcctgtgctctacatagcctcatgggcatcattggatagctcagagggcccttgattctggcaaggcaaataaagccagaatgagaaattaccatcttctactagagaaaaccaagagaaaaatttttatgctaggatgcctttatgaccacttaattttttaatcttagtttaatggtctctccctggtgctaactgctgacagtggccacctcttttttggggattgaggggcctacataactagctggccttaccccatatcttttgttcaaacataataccatctttttgcttcttctgaactttagatctccataacacatgtactgtagaatgtgatggaaaagcattgatgagaatttattggcagttcagattgtgttttcccaacttaggctctttattaattggttaaggttttctccaaaaagggcatttcaacaatgggaattatttaatgtaacagtgggcacagattacttatcttccttctctgctttgtgactcaccagcagtaacacacacaatccacatcttgtgcacctcaaatgaacagacttggtttccttgctttcttgacatttccatgactgtttcacatacaaactattgggtgaggtttttcagctgttaccgacccacgtcctgctgtctctgtgtggtcctacaaaaactgtccattcccacccctttgctttgccatttgcaagagtctggaattgtcaggtctcagcttcgaaaagtcctggttccactgacaggacacattctttagtgggaattaagacctacaaagtctagtttgtatgtaggtatgaagggaattttttaaataaattgaaaagctgtgaacagcattagaactttgtctatttcttaattttaaaatatgctgatatgccttaaactgtagttgtagatccttgtcattttgctgtttgaaaataaccaatgtgttttctaaaactgtcgtgtaatctactttcattgttaatgcagaattgtcatatatgtaagctgcatgttagacatttgtcttttttaaactaaagtaattgtattgatgtgaagcatatcattttttcaaatatgaaagtgatcacttagcaacatgcttggtaatttggcatctgttaaggtaggagagtggtgaacagataatctatgcatatatcactagtgccaagacataaagcgggggaaaatatatttttacccaaacattatttgtgtgcccttttttgtgagttctttttagtcactgcttggtttgcatatgtacacgtgcttactggataaaagaaatagggataagagtctcatgctttcctgcctcgtgtggtagacttcaaatggctgccgtctgggttacaccagtttctcaaagatacgtgccatgtggtgtcctgtacttcacatatcatgttatcaccctttttcccccatgcctgtccctgtccaccctgccaattcatgtgccttggtgcccagctgaggcatcgtcttcttcactggcctcctcttccctgctgctgctcaccctcccgtcgagctcgaggaagtcaccccattaactgaccggacgcg

SEQ ID NO: 10966 - DNA, 788 bp, Homo sapiens
  misc_feature 1, 168, 169, 170, 171, 172, 173, 174, 175, 176, 177, 178,179, 180, 181, 182, 183, 184, 185, 186, 187, 188, 189, 190,191, 192, 193, 194, 195, 196, 197, 198, 199, 200, 201, 202,203, 204, 205, 206, 207, 208, 209, 210, 211, 212, 213: n = A,T,C or G
  misc_feature 214, 215, 295, 296, 297, 298, 299, 300, 301, 302, 303, 304,305, 306, 307, 308, 309, 310, 311, 312, 313, 314, 315, 316,317, 318, 319, 320, 321, 322, 323, 324, 325, 326, 327, 328,329, 753, 754, 755, 756, 757, 758, 759, 760, 761, 762: n = A,T,C or G
  misc_feature 763, 764, 765, 766, 767, 768, 769, 770, 771, 772, 773, 774,775, 776, 777, 778, 779, 780, 781, 782, 783, 784, 785, 786,787, 788: n = A,T,C or G
nccttattcccgctacttgaccgatattatttgttcttatattttataatcactatataatcattattgttcatgcatagtttttacacttgccattacttaattatactatgtatagttacatttttctcattatgtcatttatttagttttgtggttgatgcctgnnnnnnnnnnnnnnnnnnnnnnnnnnnnnnnnnnnnnnnnnnnnnnnnagttgcctcttttaggaatctctttggaattgggagcacgatgactctgagtttgagctattaaagtacttcttacacannnnnnnnnnnnnnnnnnnnnnnnnnnnnnnnnnnccggtatttaatgatgttttcttcgatttattatattattgtcttatctgttttatctctgttgattattatgatattttcaattactttcttttttagcttttatcttctatactcttggtgttggacgctatatatatgttattatgtcttttatctcttatgttttctgtataatctattcatccatccttctatatataatatatgtatttattataatctttgttgctctatatatgtattcaataagatatctcttttttttatatcctattcttttttatttatcctattctatctctcttctatgcactcttttctttcttctttgctcttttgacgtaatatacttcttacatttctctattatctatctatctcaatatcattgtatcatatgtatatgtttatctctgaatcnnnnnnnnnnnnnnnnnnnnnnnnnnnnnnnnnnnn

SEQ ID NO: 10967 - DNA, 412 bp, Homo sapiens
  misc_feature 1, 409, 410, 411, 412: n = A,T,C or G
ntttcatttactccattatgttacgcttatgcttgggatttcattttcgacatattgcaaaatttatactgtggtcagaattattcaggtgtatctcctgaacttggaactacttactactttaccctaaattttaataaacttaaccttcaggatagctcccaacacactctacatgaactacctcaaaaaaattagccaattattataaactttcttaactttgttgaaggactttgtctttttctactgtaatttttactttatctttctcattgatagcataaaaaactcataaaatttaagacttcatgcctttctttgagaaattaagacatattttaatgaccaaaatagattaaatcatttggaagtaagtatttaaaaacatacaacaacactaatatannnn

SEQ ID NO: 10968 - DNA, 520 bp, Homo sapiens
  misc_feature 1: n = A,T,C or G
nacgttttaaggctcttgtcctaaatggattttctattaaatatcgggctttttttttttctaatgaagtatatataattatgaatcgttgtccaaaggaatgtatttgttcatctgccctgaatgatagaccaatgaatgaattaaaaggaactacatttagaaaagcaggataagtatgattttagaaaacttgaaggaagaaaacaagaaagaagggcacttgtagagatgtgaaggggcagaaaacagaggtgaaagggtttcctggacccacgtctgtagtagagaccactactgagttacagttctctaagcccatctgggatcctttggtgacatgaattttgctctagtggtttatgacatcactggaaccccgttggtggaattacaacttcataattcacagttagctcttgtttattttatatttaatcatttgtggagcatactggcagcatactcaggggaactatgtggttatgctcctgcaaatcttgttgttgcataattaagt

SEQ ID NO: 10969 - DNA, 2163 bp, Homo sapiens
  misc_feature 1, 2, 3, 4, 5, 2135, 2136, 2137, 2138, 2139, 2140, 2141,2142, 2143, 2144, 2145, 2146, 2147, 2148, 2149, 2150, 2151,2152, 2153, 2154, 2155, 2156, 2157, 2158, 2159, 2160, 2161,2162, 2163: n = A,T,C or G
nnnnncatttacatgtcatttgactgtctcactttttacccagaacagtaacaacccacaccgtcttccttcagggatttccaactggcactctgtgggtgctacacagaatgcaatttaatggatatttctcagcctggttcagaataaattgatcctttgatcccagaaagtatatactgaagtgtgggataaagattatgattaggggagggttggagacaaaagctgtaaattactatggctgatttatttctactatatacatatatattttttgcttttgtatatcctatataggaaactaagcattgtattttttttaacaaatctaaaaaagcactatgaactacaggtgtttgactttcaaaatatattttgtattgttaatatcttcacattgtgtgaatactggaagctgcagatctttgctaggacgcaataaatttatatactttttgaggggttcttctggggtgctaatcaggcccctgttatgcttagggggagccctggtgctacttgcttgaagttttcagtgtaagtaccctgatgccttttggaccttgggatcagatcaagagttttggagatcaggtaccaaggaaataaggacagtctagctgcctcaagtgaggggccctttgcatagctctccttccccctcactgaagctgggtagcctattggggttgagagggaaaatgtgaaatctcagaatttatctcccttagaagagagccagtaacttatgtacaaggatgaaagaaaggtcgcagcagtagctttggggaaagggaggaagatatggcacttctccaaccccggaaaacattgcttttgaaaactgctgataaaatatgagccggttattacttctgtttgggagactgtgctctctgtggtgcctctcttggctctactccacagataccagacctcttctaagaggatgagcagaccagctttgaggttgacctgtttctctttgtctgccttcccaaaacaccagcccccaggaagacattaagcagccttaagcttaaattcctactccctcttccaaatttggctcacttgccttagatccaaggcagggaaaggaaaagaaggggggtctctggctttattactcccctaagtctttactctgacttccccaaacccagaaagattttctccacagtgttcatttgaaagaggagtattttgtcccattttccccttcctcattatcaaacagccccagtcttccttgtctctgctaagaaagtagaggcatgatgatctgcctctcaactgccctaagtcctagctaagtatcaggggaaaaaaaaaaaaaaaaaagcctaacaaatgggattagactagggctgcaagtagtgaggattttgttgatacctctgctgggatgtgtgctttcccatatcttgccttcaggaattacactgtgccttttccccagggatatgggctctgtctacccagtgctccagtttcccggtaactgctcttgaacattgtggacaagggcaggtcttcatatttttgatcatccctttctcccagtgaaatcccatagcccttacctagagtctagggcacaaagacttcggggaagatacactgagattgacctgaggagacatctacacacaccagtggcagctgccccagggcctgcttccccttcctaagtctgtcatcctctggaagggatgggtggtgctccaatctctggtgcctaaaaacccaagtttatttctctcttaacactggcaataaccagtccacaccactgttgccttttaaaacctcttaataatctcatgctgtgtttgttttgattccaatccaattatcaccagggctgtgtgggtaaatgcttttaaatgctctctcatcttgttcttccccctcaccccccactcttaggtatgtatgatgctaatcttgtccctaagtaagtttcttcctgctccttttgtatcttcctttcttgtctttcctcctaccttttgtctcttggtgttttgggactttttttttttttttttggccttttgtacaaagattagtttcaatgtagtctgtagcctcctttgtaaaccaattaaaaagttttttaataaaannnnnnnnnnnnnnnnnnnnnnnnnnnnn

SEQ ID NO: 10970 - DNA, 1232 bp, Homo sapiens
  misc_feature 1232: n = A,T,C or G
acgcggggccttcagcataaaagctgatccacaaacacgaggagaccagacctcctcttggcttcgagatggcttcgccacaccaagagcccaaacctggagacctgattgagattttccgccttggctatgagcactgggccctgtatataggagatggctacgtgatccatctggctcctccaagtgagtaccccggggctggctcctccagtgtcttctcagtcctgagcaacagtgcagaggtgaaacgggagcgcctggaagatgtggtgggaggctgttgctatcgggtcaacaacagcttggaccatgagtaccaaccacggcccgtggaggtgatcatcagttctgcgaaggagatggttggtcagaagatgaagtacagtattgtgagcaggaactgtgagcactttgtcacccagctgagatatggcaagtcccgctgtaaacaggtggaaaaggccaaggttgaagtcggtgtggccacggcgcttggaatcctggttgttgctggatgctcttttgcgattaggagataccaaaaaaaagcgacagcctgaagcagccacaaaatcctgtgttagaagcagctgtgggggtcccagtggagatgagcctcccccatgcctccagcagcctgaccctcgtgccctgtctcaggcgttctctagatcctttcctctgtttccctctctcgctggcaaaagtatgatctaattgaaacaagactgaaggatcaataaacagccatctgccccttcagaaaggacttctaccatgtttttatagacttctgaatcacaaaggaggaaggtaacattgagtgaacactcactgggtagttccaacaatttctagccgggtgactttaaaaaagggctcttggttctcagaacctcaattcttccatgtcaagtgatgtcaggaggatcacctacgataatgcatacacgacacccagcactatgtctgatatgtaacagatggtcaaggaattggctttatcattctacacagacataacaacgacataaatggatggcattaaatttactctcagggaagccgaaaaaaacctaattacctttcgggatcgcttcatgggggcttaaatccccttaaacaactacacatttaccaaattttcccagtacctttctaaatgggccttttttaaaaaggttttttacttaaagggttagttttaccactggactactgatgggtan

SEQ ID NO: 10971 - DNA, 3461 bp, Homo sapiens
  misc_feature 1, 2, 3, 4, 3457, 3458, 3459, 3460, 3461: n = A,T,C or G
nnnngggtttgtttctatcccggggtggggaattcccctgggagcgccggtgcgatttgggcgggagacaccgttccgattaccccatggcccggattcctggccaaactggcggacagtagccgtgccatcataccgttcgcccccgaaaagacccggattttttttttttctgggaaggaatgtacttttattgaaaatgaaaaaatataaaagtaccatcttcaaagagcatctcacaaacactgtacagcaggtgaagcattgcagtaacatacattgaaacatacagagtcgagttatacaggactagccatctaacaggtcatctggtctccgacggttgtttaacgacacacagtagaaatagagaatagaacccatatctgtttccagagtccaaagtagtatatcaggctgacagcactcaatcagtgagggctcctgaggttgcaatgattctgcaacggagtagattctctaggaaaaaagaccttgctgctaaggaaagagaattaaaaacaaaacaaaacgaaaagctccccaaagaggtactctgctcaaaatggctggtgctactggtgcactaagttgtgaggaattacctctgctcgggacagaataaaaaatcctaggcctcaaggaaaaactggtggcatccttctgggtcttttcaagtccttgcatctaaaaatcaatcttgacaaaaataaaacaaaaaaccacaacaaaagaaagccaaaccaatcccccaccctaaaggaagaaaaaaattgatgtgaagcccatccacccttctacccaggtgccttatagcaaaggtgactgcagctgtaagtcagagctgaatgacagacaaaaatggaggccagacaccacggtctggaggtagctacgctgaattccagaacccagactctctctgggttaatttcttgtttttcctgagattaaattaataccagatgtccactaggtcctaggagatccccaccaatcagatttttgccaagtcccaggaaataacctgatcaaataggagacttcagattccaagaactactgtattccacctctcccctccctcagatttttaggtttatatccattgcttgggtcaccactgtatacagccgggttgctggtttactagcaagaagattggcttcttttccagtatgcaatccaaaatgtggaactgagtcacagggccaaagcccccttttcctcacgtgaagcaactcagtaagatggcggtgcagtgaagcctgttcccacacacctcggcactgatggagcagtctccaaaggaaggctgaaaggacagcaggtggttgccttgggctccttccttcccatacctttagagtgccatttttcagcactgggtaatagcatcagcgcctcccagatgggaggagcagggaaggtaaaagacatagtgaatgtttacactatgcgaaactttcaaagggggggaaaaagaggaaacagcagattaaagaagttccaacacatcgggtttttaaataacaatgacatttcaaaccattttttaggggataaagaaaaaagaggttttcatgaaaaatccaaccaaaatttagtttttaaaaagttacaaatgtatcatttaaatctaaacaaactggaagaaaacttgagactgttagcatagctgtctggctgtggaaagcattcccagtgaataaacattaccttacctgaactcttggcgagagattctgcccagcttgactctctcattctgaccgcagaatacagccatcctgaaaattctaaagaacagcttctgtcactggttccactacagagagactccccccaaatccagatcctgacagcaccaagcaagctgcaggtggagagaggttggaagggtgggaaacttacctctctaagggttttacactgtcctttccccaaaaggccctcgagcagagttagcattcaccaagagagagcactgcaggaggcggccttctcttgcagatctacagtgcgatgctaattctttatacacagatcataggtgaggcctggtcttttagaactgtcttaatccaaaaaggccccaaagcatctctgtaagtgtagcaatgtggctacacaggaccacactgttagagattctggtactccattaacattactatgacccccgggcaccctgcacatatagcggcagtccccaccggcgtcaccaaaaccttggatcatcttggtgtataaatgtcagcatcagctggctggcaggtaaaaacaaacagaacacaacaacttgactgtgtttcatttgttctgattatggctaccaaggttcggtgaaacccgagcagggacaagaaataaaaatgccattttatttggggagcccgtatgtgggcagtctgtccttacacaggtttctgtaagaacagattaagctagtttgaaagtcgtgccagattagaaaacttgtaaaaatctaaaacgaaatgttcctcaaaaggatttaagtccacagacaggaggtttactcactgctagtactaatctcaaaaccagcctggtttttcaatttccaatgaaaaagaaacatattagaattggagttccaaaaaaggaagtgtgtattgtttacactttcaaatctataaaagagattatggatgagtccattactttctcagctctagggcagaatcccatgaaataacactggccttaaggtgctcttccctgaaacggcagagagaagaaaaagcatgctgctgctttcctgttaaaggagggctcttagctttccctggcagctagaacagtttcctagaggttagtaccccagtgttctgcaccataaatgagagaataaggaatatacggatgttcaggggagggactgtgaagccaccaagctgaatacggataggtaccatttttttcaaaaaataaaaaataaaaatcccagcaatccatggaattttttttagaggggagccaatgaagttcttgcattggccaaatggaatcaagaaagcccatgatcactttattcgcaaagcctgcatatggtgctacccagaggaatgaattctatgagatcagagcagccaccagccctgtagtgaaacaatgacagaagctcttcttgggggaagctggctctatgaaaatgtttgccattttggtaaattacataacacaacatttcagttacatggtccttcttacttaaaacttttatataaagtatgttagttggtcaattattaataatatacccacccaataccagaaaagtacgtgttctctgcttcagaaaagagatcaaaactttaacaagaggcatcaaacgttaaaaaaataaaaacaaaaacaaaactgcaaattagttttacctaattgccatgcatcttaggcacatacttaccaaaaccatgaacctccagcttannnnn

SEQ ID NO: 10972 - DNA, 1586 bp, Homo sapiens
  misc_feature 1581, 1582, 1583, 1584, 1585, 1586: n = A,T,C or G
ccaagggcgccggccgtggaggcgccacgtcccttgcggcggcgggagagaaatcgcttggacttcggggcggcctcggacggccatggcctttaccctgtactcactgctgcaggcagccctgctctgcgtcaacgccatcgcagtgctgcacgaggagcgattcctcaagaacattggctggggaacagaccagggaattggtggatttggagaagagccgggaattaaatcacagctaatgaaccttattcgatctgtaagaaccgtgatgagagtgccattgataatagtaaactcaattgcaattgtgttacttttattatttggatgaatatcagtggagaaaatggagactcagaagaggacatgccagtagaagttattactttggtcattattggaatatttatatcttagctggctgaccttgcacttgtcaaaaatgtaaagctgaaaataaaaccagggtttctatttatctgtttttttttttaatgttgcacttgtagtttcattacaaaagatcagatcatgaaaggcagtaactctccaggactggaatatctgattgctcagtgttaatagtagttcatgctgtggtgagattgttaaaagggtgcaagactgttgcttctctttttttagatatttttctatctctcacttctcagggatgaaattctttttcaaagttttgaagttccttgcaacttagccatgatgtgagtggttatccctagataaaattaaaaggatttttaaaaagtaattactgcacataaaatgataaataggtaatttgaataattttattttaagctccttggttaattattttgtctattgtctcagctataaattcaaatttatacatactattgagtattaatattctctgatttcagggagaattctgtcagtcacatgatgattatgtttttgtttaacattctttccatgcacttgttattttattaatttgcctgaatgatgagaccagaccagtgtctacagattttcattgtcagaaaaatctataagtctgccctttttacaatgatgatttaaaaaaaacaacagcgtaaatattagcccacaagagcagtcctaaacaatcacaattacactgtactacccaagaagactgtttattgtgaagcatttacctttcaaaaaatcattacatttctatttcttggtggagcagcacattgtggagtgtgattcttaattcttcattgagtttgtcaataggacattgatgctggataggttgtcttttgtttttatgtctcagaccatcttgtgagattgtttgcctatctcataatacagttttatgcagaaaggttgaaactatgtaaatggtttttatggaaattatcagttacaatattttaaaggtgtagaatggcatctttgtttataggagaacatttgtaaataaagttaaatttctaagcctataaaatattgtaactgataatttccataaaaaccatttacatagtttcaacctttctgcataaaactgtattatgagataggcaaacaatctcacaagatggtctgagacannnnnn

SEQ ID NO: 10973 - DNA, 1244 bp, Homo sapiens
  misc_feature 1, 2, 3, 4, 5, 6, 7, 8, 9, 10, 11, 1215, 1222, 1241, 1242,1243, 1244: n = A,T,C or G
nnnnnnnnnnngccgtctggggtttttttttgccggcgcctgtgtttgcctttctgtttgtttgttctcctgttgttctccactacgcctccccttgctggtgttttctatctcgccgcgttgttccccccccgccttttttttttttgttggtaccccccccccttgtttttctgcccgcagtgtgtgttgtgtgaccgcctgttgtggtccttttcgtgctctgttcttcttgtggggctccccccccccccccgtgggtgtgtagcgtcttcgggggcgcgggggccccccacgacgttttttttttttttttttttttttttttttgtttttttttttttttttttttttttttttttttttttttttttttttttgcaaaatgaaacaagtttattttctccaataacttctgtaaattacaaagacaaaatactaaaaactacagcatataacttttcaatatttaaccagagtactcgtaataaatatgcatccggaaacaagataaaaggctacacctcgtcaggcatcctacaaaaatgtctcaagttttatatactctgcagcatttctgtgcgggggcagaaggggctgttgtgtattttctgaagtgctgtgacaaaaggtcctttcacatttctttggagcatttttgaaattgcttaactataattaaacaacttaagaaaagtaacaccaagctttaaagccatttttgctttgctgtcattggtccttatccaatacagatcaacatatcatccagcacagccaagcacccactgaggccaagcagccttgtgggacatgggccctgtcagagcaggccctactttcagttaaatactttggagagtccaggattctgtctctctccctcaacaagattaatgccataagggaagttgcaagcgtgttagaaacatttttaacctgaaagtaaagtgaacagaaatattttttttccgagacctctgctatgcaccataatattaccatatcagggtttttagcttcaaagttgaaaaacagattggtactaacagtccttctagagatcatttatgggcgctggtagagtcagggcattcaaaacattcaacgggtaaaaggaggatttgctagattcagaaatgcgctacaattctgaagacaccatggctgaaagttctaggggtgttggtggcagctcatattaggtctggcatncataacnaccttttgttatagctcgnnnn

SEQ ID NO: 10974 - DNA, 3085 bp, Homo sapiens
aaagaagacaggagaagcaattcatggttcaaatggtcacccaattccctgccaacccccccactctgtaaaatatacattatcacctactctcagcatctcacttttgacactaaaacttaaaataattttatttaataggagaatttatattatagttttatttcaaaaaaaaaaaaaaaacacaacagaaaccctacaactggttgcaaactcaggctttccccagtgaccaacaattttaattccaagaggtgaggatctcaggaggtggcattcacccaccagggagctagggaaagggaaccaagctgtctccacacccaggagaggtgctgacggtgttcagaatttcaaattttaattaaaatgaaaaaaaaatgtcaacttggaatgtcatgattttcttcaaacaagcatcgacaacatactggaagagatatagggtattggcaatttgcctgccttgtacaaaagctcaggtgaaagactgagatgaatgtctttcctctccctgcctcccaccagacttcctcctggaaaacgctttggtagatttggccaggagctttcttttatgtaaattggataaatacacacaccatacactatccacagatatagccaagtagatttgggtagaggatactatttccagaatagtgtttagctcacctagggggatatgtttgtatacacatttgcatatacccacatggggacataagctaatttttttacaggacacagaattctgttcaatgctgttaaatatgccaatagtttaatctcttctattttgttgtcgttgcttgtttgaagaaaatcatgacattccaagttgacatttttttttcattttaattaaaatttgaaattctgaacaccgtcagcaccctctcttccctatcatgggtcatctgacccctgtccgtctccttgtccctgcttcatgtttgggggcctttctttaactgccttcctggcttagctcagatggcagatgagagtgtagtcaagggcctgggcacaggagggagagctgcagagtgtcctgcctgccttggctggagggacacctctcctgggtgtggagacagcttggttccctttccctagctccctggtgggtgaatgccacctcctgagatcctcacctcttggaattaaaattgttggtcactggggaaagcctgagtttgcaaccagttgtagggtttctgttgtgttttttttttttttttttgaaataaaactataatataaattctcctattaaataaaattattttaagttttagtgtcaaaagtgagatgctgagagtaggtgataatgtatattttacagagtgggggttggcaggatggtgacattgaacatgattgctctctgtctcttttttcagcttatgggtatttatcttctattagtatttgtatcttcagttcattccactttaggaaacagagctgccaattgaaacagaagaagaaaaaaaaaaaaagcagcagacaacacactgtagagtcttgcacacacacaagtgcccaggcaaggtgcttggcagaaccgcagagtgggaagagagtaccggcatcgggtttccttgggatcaatttcattaccgtgtacctttcccattgtggtcatgccatttggcagggggagaatgggaggcttggccttctttgtgaggcagtgtgagcagaagctgatgccagcatgtcactggttttgaagggatgagcccagacttgatgttttgggattgtccttattttaacctcaaggtctcgcatggtggggtccctgaccaacctacacaagttccctcccacaagtggacatcagtgtcttctctgtgaggcatctggccattcgcactccctggtgtggtcagcctctctcacacaaggaggaacttgggtgaaggctgagtgtgaggcacctgaagtttccctgcggagtcgataaattagcagaaccacatccccatctgttaggccttggtgaggaggccctgggcaaagaagggtctttcgcaaagcgatgtcagagggcggttttgagctttctataagctatagctttgtttatttcacccgttcacttactgtataatttaaaatcatttatgtagctgagacacttctgtatttcaatcatatcatgaacattttattttgctaaatcttgtgtcatgtgtaggctgtaatatgtgtacattgtgtttaagagaaaaatgaaacccacatgccgccattttcctgaatcaaattctgcagtggaatggagaggaaaatacttctaggcaagcagctagactggtgaattgggggaaacagaaggaactagtaactgagactcctccagcctcttccctattggaatcccaatggctcctggagtaggaaaaaagtttaaactacattcatgttcttgttctgtgtcactcggccctgggtagtctaccatttacttcaccccaagtcctgctgcccatccagttgggaagccatgattttcctaagaatccagggccatgggagatacaattccaagttctcgcttcctcctttgggcatctcttctgcctcccaatcaaggaagctccacgctcaggctctcagctctcgggccagtgctctgctctgtccagggtaggtaatactgggagactcctgtcttttaccctcccctcgttccagacctgcctcatggtggcaacatggttcttgaacaattaaagaaacaaatgactttttggaatagccctgtctagggcaaactgtggcccccaggagacactacccttccatgccccagacctctgtcttgcatgtgacaattgacaatctggactaccccaagatggcacccaagtgtttggcttctggctacctaaggttaacatgtcactagagtatttttatgagagacaaacattataaaaatctgatggcaaaagcaaaacaaaatggaaagtatgggaggtggatgtgacaacaacttccaaattggctctttggaggcgagaggaaggggagaacttggagaatagtttttgctttgggggtaaaggct

SEQ ID NO: 10975 - DNA, 2525 bp, Homo sapiens
  misc_feature 2522, 2523, 2524, 2525: n = A,T,C or G
gggctcgggctggcgggtcgcgggttccttatcctccgccttggcgcctctccgcccaccgcccaccgcccctccctggcattggttggcgccagggaagccgaggctccatcctttctgcgcaggttccgcggggactcgcgcagacctagcgcgtccaggtgggaggttagtgtggcccgggcgtccgctcctcagcggatgtggcagccccgagccatggctctcgccgtccgagtcgtttattgtggcgcttgaggctacaagtccaagtatcttcagctcaagaagaagttagaagatgagttccccggccgcctggacatctgcggcgagggaactccccaggccaccgggttctttgaagtgatggtagccgggaagttgattcactctaagaagaaaggcgatggctacgtggacacagaaagcaagtttctgaagttggtggccgccatcaaagccgccttggctcagggctaatgcgccctgaaggcagagtccagggaccttgacccagcccctctcagcagacgcttcatgataggaaggactgaaaagtcttgtggacacctggtctttccctgatgttctcgtggctgctgttgggggcagagattgacgcccccggtctttgcctctgagcgggagagtctgtgtgtatgtgtcttccccggaatccacaccaccccaccctcctcctgtcccgtggtttcatcatatctctttgcataccccatgtcttccccagttgtcccctggagtttggggggacatcccgcctcaggcatccttctcaaggggaagccaagagaggcatcaggatgggtgggtttctgattgtggcaacgtttgcaaccgttcacgattcaataaatattggatgaatttaaccgaaaaaaaaaaaaagaacaacaacacacgcaccaaccacacgaacaaccagcggcgggcgcccgcacccacaagaacacccccggagagggaggcccccacacagcatcgcgcgcacccccacagcatctctccgcgacacacaagcgggacgggcccacaacaacgaggagagccgcacacaacagaacgcgaacaccaaccacggggcccggagcagcatacaccaacccaacgcacgcgacccgtggcgcccacacccactcgccgcacgcaggggaccacctcggggaaaccgacacaccctcaactctccggggcggcggacccacacagtggcgcccagaccgtcgagcacatatagacaggcgcgaagcgcgacaagaacaaactcaaacgggcgtcacagtggtaacaccacaccccaacgacgcccgcgcaggcaacacaagcgcaacgcacacgactgacacaatccgcaccgcgcaaatcaacgcacccaccacgaccacaacacgaagcagcacccacccaggacccgccccaccgaccctaagcccatccaccgacctacgacagccacccccgtaaccgcacgccgcagccagcaaacagcacccaccacgctcgcaaccacacagcgccacaggcccacgcacccacacacgacaaaccaacacacaacactaccccaaccacacacgacaccacacacacacagccacccacaccgaccaacacaaccacgaacaaaacacacacaccaggcaggacagcagaggagacaagacgcacacacgagacgcggcgagacgcgggcggagcggcgcgaccgagccgtgcggggaacacaggagacgacagcgcccgcgagcccggcaagcgagggcaacgagcgatgacagcggcgcgagacgatagcacgaggagcgcacgcacgaccgagcagagcaggagaacgaccacggccacacaagccacgacgaggagaagcacgagcagagcaaccacggcagggaaaagcggagtacggaacgaccatcgagcacaacagcagcagcgagaagaggaacgacagagaagagagagcgcagcacaccaaagagagacgcaaaaacgcagcacgcagagccagggaacggcaccgaacccagcgcactacaagacacggagagcgagagacgcggcgacgcgagggccaacccgacggcacggaacgagctgacggcacgcagagcgacagacgacacagagaccgagacacgcgacaccgagcgacggctgagaacagacacacgacgcgcagcagtgagagcacgacacacacaacagcgcagcaaggagcggcgacgagcagcacgcgcgcgccgggagacgagagtagcgggaggacagcagcagcagcagcggcagaaacgaacgaggccagacgcacgaggagagtcagaggcgaagcgcaagagcggcgcagagcaccaagcaagcgaaagacgacaagcaccacgcgacagacaacgcgcacaccggcgcgaccgcggaggcaaccgacagagagaacgagaacagcacacgacgcacgcgcagaagccggaaaccagggaagcgagacaaacgcgagcataggacannnn

SEQ ID NO: 10976 - DNA, 8232 bp, Homo sapiens
acgcgtcggcccacgcgtccggcggctggagcggtggcggcggcagaggcggcggctccagcttcggctccggctcgggctcgggctccggctccggctccggctccggctccagctcgggtggcggtggcgggagcgggaccaggtggaggcggcggcggcagaggagtgggagcagcggccctagcggcttgcggggggacatgcggaccgacggcccctggataggcggaaggagtggaggccctggtgcccggcccttggtgctgagtatccagcaagagtgaccggggtgaagaagcaaagactcggttgattgtcctgggctgtggctggctgtggagctagagccctggatggcccctgagccagccccagggaggacgatggtgccccttgtgcctgcactggtgatgcttggtttggtggcaggcgcccatggtgacagcaaacctgtcttcattaaagtccctgaggaccagactgggctgtcaggaggggtagcctccttcgtgtgccaagctacaggagaacccaagccgcgcatcacatggatgaagaaggggaagaaagtcagctcccagcgcttcgaggtcattgagtttgatgatggggcagggtcagtgcttcggatccagccattgcgggtgcagcgagatgaagccatctatgagtgtacagctactaacagcctgggtgagatcaacactagtgccaagctctcagtgctcgaagaggaacagctgccccctgggttcccttccatcgacatggggcctcagctgaaggtggtggagaaggcacgcacagccaccatgctatgtgccgcaggcggaaatccagaccctgagatttcttggttcaaggacttccttcctgtagaccctgccacgagcaacggccgcatcaagcagctgcgttcaggtgccttgcagatagagagcagtgaggaatccgaccaaggcaagtacgagtgtgtggcgaccaactcggcaggcacacgttactcagcccctgcgaacctgtatgtgcgagtgcgccgcgtggctcctcgtttctccatccctcccagcagccaggaggtgatgccaggcggcagcgtgaacctgacatgcgtggcagtgggtgcacccatgccctacgtgaagtggatgatgggggccgaggagctcaccaaggaggatgagatgccagttggccgcaacgtcctggagctcagcaatgtcgtacgctctgccaactacacctgtgtggccatctcctcgctgggcatgatcgaggccacagcccaggtcacagtgaaagctcttccaaagcctccgattgatcttgtggtgacagagacaactgccaccagtgtcaccctcacctgggactctgggaactcggagcctgtaacctactatggcatccagtaccgcgcagcgggcacggagggcccctttcaggaggtggatggtgtggccaccacccgctacagcattggcggcctcagccctttctcggaatatgccttccgcgtgctggcggtgaacagcatcgggcgagggccgcccagcgaggcagtgcgggcacgcacgggagaacaggcgccctccagcccaccgcgccgcgtgcaggcacgcatgctgagcgccagcaccatgctggtgcagtgggagcctcccgaggagcccaacggcctggtgcggggataccgcgtctactatactccggactcccgccgccccccgaacgcctggcacaagcacaacaccgacgcggggctcctcacgaccgtgggcagcctgctgcctggcatcacctacagcctgcgcgtgcttgccttcaccgccgtgggcgatggccctcccagccccaccatccaggtcaagacgcagcagggagtgcctgcccagcccgcggacttccaggccgaggtggagtcggacaccaggatccagctctcgtggctgctgccccctcaggagcggatcatcatgtatgaactggtgtactgggcggcagaggacgaagaccaacagcacaaggtgaccttcgacccaacctcctcctacacactagaggacctgaagcctgacacactctaccgcttccagctggctgcacgctcggatatgggggtgggcgtcttcacccccaccattgaggcccgcacagcccagtccaccccctccgcccctccccagaaggtgatgtgtgtgagcatgggctccaccacggtccgggtaagttgggtcccgccgcctgccgacagccgcaacggcgttatcacccagtactccgtggcctacgaggcggtggacggcgaggaccgcgggcggcatgtggtggatggcatcagccgtgagcactccagctgggacctggtgggcctggagaagtggacggagtaccgggtgtggtgtgcgggcacacacagacgtgggccccggccccgagagcagcccggtgctggtgcgcaccgatgaggacgtgcccagcgggcctccgcggaaggtggaggtggagccactgaactccactgctgtgcatgtctactggaagctgcctgtccccagcaagcagcatggccagatccgcggctaccaggtcacctacgtgcggctggagaatggcgagccccgtggactccccatcatccaagacgtcatgctagccgaggcccagtggcggccagaggagtccgaggactatgaaaccactatcagcggcctgaccccggagaccacctacttccgtactgttgctgcctataccaccaagggggatggtgcccgcagcaagcccaaaattgtcactacaacaggtgcagtcccaggccggcccaccatgatgatcagcaccacggccatgaacactgcgctgctccagtggcacccacctcaaggaactgcctggcgagctgctgggctaccggactgcagtactgtccggcccgacgaggcgcggcccgacaccatagatttcggcaaggatgaccagcacttcacagtcaccggcctgcacaaggggaccacctacatcttccggcttgctgccaagaaccgggctggcttgggtgaggagttcgagaaggagatcaggacccccgaggacctgcccagcggcttcccccaaaacctgcatgtgacaggactgaccacgtctaccacagaactggcctgggacccgccagtgctggcggagaggaacgggcgcatcatcagctacaccgtggtgttccgagacatcaacagccaacaggagctgcagaacatcacgacgagacacccgctttacccttactggcctcaagccagacaccacttacgacatcaaggtccgcgcatggaccagcaaaggctctggcccactcagccccagcatccagtcccggaccatgccggtggagcaagtgtttgccaagaacttccgggtggcggctgcaatgaagacgtctgtgctgctcagctgggaggttcccgactcctataagtcagctgtgccctttaagattctgtacaatgggcagagtgtggaggtggacgggcactcgatgcggaagctgatcgcagacctgcagcccaacacagagtactcgtttgtgctgatgaaccgtggcagcagcgcaggggggcctgcagcacctggtgtccatccgcacagcccccgacctcctgcctcacaagccgctgcctgcctctgcctacatagaggacggccgcttcgatctctccatgccccatgtgcaagacccctcgcttgtcaggtggttctacattgttgtggtacccattgaccgtgtgggcgggagcatgctgacgccaaggtggagcacacccgaggaactggagctggacgagcttctagaagccatcgagcaaggcggagaggagcagcggcggcggcggcggcaggcagaacgtctgaagccatatgtggctgctcaactggatgtgctcccggagacctttaccttgggggacaagaagaactaccggggcttctacaaccggcccctgtctccggacttgagctaccagtgctttgtgcttgcctccttgaaggaacccatggaccagaagcgctatgcctccagcccctactcggatgagatcgtggtccaggtgacaccagcccagcagcaggaggagccggagatgctgtgggtgacgggtcccgtgctggcagtcatcctcatcatcctcattgtcatcgccatcctcttgttcaaaagaaaaaggacccactctccgtcctctaaggatgagcagtcgatcggactgaaggactccttgctggcccactcctctgaccctgtggagatgcggaggctcaactaccagaccccaggtatgcgagaccacccacccatccccatcaccgacctggcggacaacatcgagcgcctcaaagccaacgatggcctcaagttctcccaggagtatgagtccatcgaccctggacagcagttcacgtgggagaattcaaacctggaggtgaacaagcccaagaaccgctatgcgaatgtcatcgcctacgaccactctcgagtcatccttacctctatcgatggcgtccccgggagtgactacatcaatgccaactacatcgatggctaccgcaagcagaatgcctacatcgccacgcagggccccctgcccgagaccatgggcgatttctggagaatggtgtgggaacagcgcacggccactgtggtcatgatgacacggctggaggagaagtcccgggtaaaatgtgatcagtactggccagcccgtggcaccgagacctgtggccttattcaggtgaccctgttggacacagtggagctggccacatacactgtgcgcaccttcgcactccacaagagtggctccagtgagaagcgtgagctgcgtcagtttcagttcatggcctggccagaccatggagttcctgagtacccaactcccatcctggccttcctacgacgggtcaaggcctgcaaccccctagacgcagggcccatggtggtgcactgcagcgcgggcgtgggccgcaccggctgcttcatcgtgattgatgccatgttggagcggatgaagcacgagaagacggtggacatctatggccacgtgacctgcatgcgatcacagaggaactacatggtgcagacggaggaccagtacgtgttcatccatgaggcgctgctggaggctgccacgtgcggccacacagaggtgcctgcccgcaacctgtatgcccacatccagaagctgggccaagtgcctccaggggagagtgtgaccgccatggagctcgagttcaagttgctggccagctccaaggcccacacgtcccgcttcatcagcgccaacctgccctgcaacaagttcaagaaccggctggtgaacatcatgccctacgaattgacccgtgtgtgtctgcagcccatccgtggtgtggagggctctgactacatcaatgccagcttcctggatggttatagacagcagaaggcctacatagctacacaggggcctctggcagagagcaccgaggacttctggcgcatgctatgggagcacaattccaccatcatcgtcatgctgaccaagcttcgggagatgggcagggagaaatgccaccagtactggccagcagagcgctctgctcgctaccagtactttgttgttgacccgatggctgagtacaacatgccccagtatatcctgcgtgagttcaaggtcacggatgcccgggatgggcagtcaaggacaatccggcagttccagttcacagactggccagagcagggcgtgcccaagacaggcgagggattcattgacttcatcgggcaggtgcataagaccaaggagcagtttggacaggatgggcctatcacggtgcactgcagtgctggcgtgggccgcaccggggtgttcatcactctgagcatcgtcctggagcgcatgcgctatgagggcgtggtcgacatgtttcagaccgtgaagaccctgcgtacacagcgtcctgccatggtgcagacagaggaccagtatcagctgtgctaccgtgcggccctggagtacctcggcagctttgaccactatgcaacgtaactaccgctcccctctcctccgccacccccgccgtggggctccggaggggacccagctcctctgagccataccgaccatcgtccagccctcctacgcagatgctgtcactggcagagcacagcccacggggatcacagcgtttcaggaacgttgccacaccaatcagagagcctagaacatccctgggcaagtggatggcccagcaggcaggcactgtggcccttctgtccaccagacccacctggagcccgcttcaagctctctgttgcgctcccgcatttctcatgcttcttctcatggggtggggttggggcaaagcctcctttttaatacattaagtggggtagactgagggattttagcctcttccctctgatttttcctttcgcgaatccgtatctgcagaatgggccactgtaggggttggggtttattttgttttgttttttttttttcttgagttcactttggatccttattttgtatgacttctgctgaaggacagaacattgccttccccgtgcagagctggggctgccagcctgagcggaggctcggccgtgggccgggaggcagtgctgatccggctgctcctccagcccttcagacgagatcctgtttcagctaaatgcagggaaactcaatgtttttttaagttttgttttccctttaaagccttttttttaggccacattgacagtggtgggcggggagaagatagggaacactcatccctggtcgtctatcccagtgtgtgtttaacattcacagcccagaaccacagatgtgtctgggagagcctggcaaggcattcctcatcaccatcgtgtttgcaaaggttaaaacaaaaacaaaaaaccacaaaaataaaaaacaaaaaaaacaaaaaacccaagaaaaaaaaaaagagtcagcccttggcttctgcttcaaaccctcaagaggggaagcaactccgtgtgcctggggttcccgagggagctgctggctgacctgggcccacagagcctggctttggtccccagcattgcagtatggtgtggtgtttgtaggctgtggggtctggctgtgtggccaaggtgaatagcacaggttagggtgtgtgccacaccccatgcacctcagggccaagcgggggcgtggctggcctttcaggtccaggccagtgggcctggtagcacatgtctgtcctcagagcaggggccagatgattttcctccctggtttgcagctgttttcaaagcccccgataatcgctcttttccactccaagatgccctcataaaccaatgtggcaagactactggacttctatcaatggtactctaatcagtccttattatcccagcttgctgaggggcagggagagcgcctcttcctctgggcagcgctatctagataggtaagtgggggcggggaagggtgcatagctgttttagctgagggacgtggtgccgacgtccccaaacctagctaggctaagtcaagatcaacattccagggttggtaatgttggatgatgaaacattcatttttaccttgtggatgctagtgctgtagagttcactgttgtacacagtctgttttctatttgttaagaaaaactacagcatcattgcataattcttgatggtaataaatttgaataatcagatttcttactaaaaaaaaaaaaaaaaaaacaaatccctgcggaaaggggattttcagcttcatatcatcgtattactcccctcgcaacggatccccctctgtggttgggggcgccatggaataagcatgcgggaaatctcctcctaatatagaactcacagggccccacttcagctttcaagaaaacccccccgctatcttgtggagggagtagtcagtgacactccaaaaatgacgaaacgccgtgcaggaccaggggcacaaaaaggggctgctcgtgaaaaaccacaacactttggggtgggaccggggaagacccaatacggccaatattgggggaaagggggaatcatgcaggggggaaccgagacagacgtggcgcgggcatcgcataaaacatctaggaaagcggggcgaacaaagcagcccagtcgcacgaatagggaccgggcgccgtgtgaaaacacgaagtgaacaagcccgtggtggggaa

SEQ ID NO: 10977 - DNA, 1399 bp, Homo sapiens
  misc_feature 1, 2, 3, 4, 5, 1226, 1394, 1395, 1396, 1397, 1398, 1399: n = A,T,C or G
nnnnnccccccctcggggtacttctagaattaattaacgcgggggggggttgtggagtggatgctttggcaagatggcggggagcggcgtccgccaagctacttctaccgccagcaccttcgtgaagcccattttcagtcgggacatgaacgaggccaagcggagggtgcgcgagctctaccgcgcctggtatcgggaggtgccgaacactgtgcaccaattccagctggacatcactgtgaaaatgggacgggataaagtccgagaaatgtttatgaagaatgcccatgtcacagaccccagggtggttgatcttctggtcattaagggaaagatcgaactggaagaaacaattaaagtatggaagcagcggacacatgttatgcggttcttccatgaaacagaagcgccaaggccaaaggatttcctatccaagttctatgttggccacgatccatgaagtcattcagtggaaagatgcacgttgatactattttagagcacaaataaactcactatacaatggtcactttgtgatagaattccattgatgaaccaattttctgcagcctctttttgcctgagcaagtgggaccttggtatacacatcacctgttctttcccttttcttgaaatgtggtgtttgctgtaaattggattgaattatttttctcagagccttgcatgtcagtaaacaggaaggaaggaggccatctgttcaaaaattgtgacattgggcatgaggctggacgacttgttaatgtagttgtttctatagcccctatgattagacacttcagtgtcagggcacagattatctaaaattagccagctcttcctgtcagggatcagggcagcactaacaggcgcaaaagtagagctgtcaagatgggctagttttccttgggttctgaagaaaatggatgtgcaaaggcttggctccgctacttgtaacaagctccagcccttaaaatgaaattaacttcctactcaggcaccctgcttaggtgcacagctgttcaatatacacagagaacagaaatattcctactgtctttggaaaccctggtgtacctctcagtggcagaataaacatcaacacaggttcaagaacttaaaaaaaaaaaaaaaaaaaaaaaaaaattgtgggggggcgcgggcaccgagaaaaagtttctgaaacccaacgttgggggcgcggcgcccaatgttaagtgacacttgtncaaggttgccaaggaaccggccggatatgggggttttccccaaaaaaccgggcgcgcggtcgacatccagtgctcgcggtcggtctcaacgggcgcacgcttaccccgcccggggggagagaagagaaaaacaagataaccgactcacgacagagagagagtactgcnnnnnn

SEQ ID NO: 10978 - DNA, 579 bp, Homo sapiens
  misc_feature 579: n = A,T,C or G
actttaatttgttcttatctttttgcccttccttttaatcgcctaggctattttcctgcattattcatttttaaacttttaaaatccagagtgggttaaaatgcttattttactcaaagactgtttacactgcactgttgaaacatcagattatcaagttcaagtctttaagggaacatctcttttgacatcttaaaatttaactcgaaaagagtttctttaagctgttaggtgtaaaaatattttaactttcttatttcaaattttaaaaactcatacatatcagttcatgtattcatttcattcagtaagtatgcaatgtgcatatactgtataccaggcattgtgctaagtgctgaggcttctaaggtgaacacaatttttggtctttagatagttgagattaagaaagttgtgcttttagtcactgttttctttgccgataactgagcccattgtcacaaacacaggcatggtcactctttgtccaatataccaaacattaagtcttgattatatgggataaatgttctcttatataatttgatgttatttggatgggttaatgtatacatgacn

SEQ ID NO: 10979 - DNA, 2827 bp, Homo sapiens
  misc_feature 1, 2, 3, 2826, 2827: n = A,T,C or G
nnngccaggcgtgggcacacgagttggtttgggagctgccagtctcctgggaggatcgcagtcagcagagcagggctgaggcctgggggtaggagcagagcctgcgcatctggaggcagcatgtccaagaaagggagtggaggtgcagcgaaggacccaggggcagagcccacgctggggatggaccccttcgaggacacgctgcggcggctgcgtgaggccttcaactgagggcgcacgcggccggccgagttccgggctgcgcagctccagggcctgggccacttccttcaagaaaacaagcagcttctgcgcgacgtgctggcccaggacctgcataagccagctttcgaggcagacatatctgagctcatcctttgccagaacgaggttgactacgctctcaagaaccttcaggcctggatgaaggatgaaccacggtccacgaacctgttcatgaagctggactcggtcttcatctggaaggaaccctttggcctggtcctcatcatcgcaccctggaactacccactgaacctgaccctggtgctcctggtgggcgccctcgccgcagggaattgcgtggtgctgaagccgtcagaaatcagccagggcacagagaaggtcctggctgaggtgctgccccagtacctggaccagagctgctttgccgtggtgctgggcggaccccaggagacagggcagctgctagagcacaagttggactacatcttcttcacagggagccctcgtgtgggcaagattgtcatgactgctgccaccaagcacctgacgcctgtcaccctggagctggggggcaagaacccctgctacgtggacgacaactgcgacccccagaccgtggccaaccgcgtggcctggttctgctacttcaatgccggccagacctgcgtggcccctgactacgtcctgtgcagccccgagatgcaggagaggctgctgcccgccctgcagagcaccatcacccgtttctatggcgacgacccccagagctccccaaacctgggccgcatcatcaaccagaaacagttccagcggctgcgggcattgctgggctgcggccgcgtggccattgggggccagagcaacgagagcgatcgctacatcgcccccacggtgctggtggacgtgcaggagacggagcctgtgatgcaggaggagatcttcgggcccatcctgcccatcgtgaacgtgcagagcgtggacgaggccatcaagttcatcaaccggcaggagaagcccctggccctgtacgccttctccaacagcagacaggttgtgaaccagatgctggagcggaccagcagcggcagctttggaggcaatgagggcttcacctacatatctctgctgtccgtgccattcgggggagtcggccacagtgggatgggccggtaccacggcaagttcaccttcgacaccttctcccaccaccgcacctgcctgctcgccccctccggcctggagaaattaaaggagatccgctacccaccctataccgactggaaccagcagctgttacgctggggcatgggctcccagagctgcaccctcctgtgagcgtcccacccgcctccaacgggtcacacagagaaacctgagtctagccatgaggggcttatgctcccaactcacattgttcctccagaccgcaggctcccccagcctcaggttgctggagctgtcacatgactgcatcctgcctgccagggctgcaaagcaaggtcttgcttctatctgggggacgctgctcgagagaggccgagaggccgcagaacatgccaggtgtcctcactcaccccaccctccccaattccagccctttgccctctcggtcagggttggccaggcccagtcacaggggcagtgtcaccctggaaaatacagtgccctgccttcttaggggcatcagccctgaacggttgagagcgtggagccctccaggcctttgctctcccctctaggcacacgcgcacttccacctctgccccatcccaactgcaccagcactgcctcccccagggatcctctcacatcccacactggtctctgcaccacccctctggttcacaccgcaccctgcactcacccacagcagctccatccactgggaaaactggggtttgcatcactccactgcacagtgttagtgggacctgggggcaagtcccttgacttctctgagcctcagtttccttatgtgaaagttgctggaaccaaaatggagtcacttatgccaaactctaataaaatggagtcggggggccacatagaagccctcacacacacatgcccgtaacaggatttatcacaagacacgcctgcatgtagaccagacacagggcgtatggaaagcacgtcctcaagactgtagtattccagatgagctgcagatgcttacctaccacggccgtctccaccagaaaaccatcgccaactcctgcgatcagcttgtgacttacaaaccttgtttaaaagctgcttacatggacttctgtcctttaaaagcttccccttggctgtggccctctgtgtatgcctgggatccttccaagcactcatagcccagataggaatcctctgctcctcccaaataaattcatctgttctggagagcaaaaaaaaaaaaaaaaaagaaaaaaaggtccccccggcccctttaaaaacaaggggaccccccgggggggggaaatttaatttaaccttttttaacccccccccccctgggggggggccccgccccccctttttttcccttttaaggggggtaaaatcccccctggggaaaaaaaggggaaaaagggnn

SEQ ID NO: 10980 - DNA, 736 bp, Homo sapiens
  misc_feature 735, 736: n = A,T,C or G
cgcgtccgctgaggctcggccgcctgagccgcggacggtttgctgagcccgttagtgcgcccggccgagacacgccgccgccatgtcccgctacctgcgtccccccaacacgtctctgttcgtcaggaacgtggccgacgacaccaggtctgaagacttgcggcgtgaatttggtcgttatggtcctatagttgatgtgtatgttccacttgatttctacactcgccgtccaagaggatttgcttatgttcaatatcctttcttcagatggctgattagtgaggggtgttgaagtttgaaattcaagtttatagaatgtaaagctgtacagttatggcgaccccaaagagaaagcatgaaagaacctttagagtagagttcaacacttaaggcaagtagacaagccaaagacctcttaaggatcaggcttgaagagaagggagagtttgggaaaaaaaaaaataaaaaatagctgggcggccgccatgcgagctcacttggccaattcgccctatagtgagtcgtattacaattcactggccgtcgttttacaacgtcgtgactgggaaaaccctggcgttacccaacttaatcgccttgcacacatccccctttcgccagtggggtatagcaaagaggcccggaccgatcgcccttccaacagttgcgcaacctgatgggcaatggaaattgtaagcgtaatattttgttttcgcgtatttttgttcagctcann

SEQ ID NO: 10981 - DNA, 428 bp, Homo sapiens
  misc_feature 1, 2, 9, 26, 27, 28, 423, 424, 425, 426, 427, 428: n = A,T,C or G
nnaattggnagccctccaccgcggtnnnggcggcccgccctcgggcaggtaccagcacctctgagaaagaaaaagccagacaaacatgaggataacagaagaagttgggcaagcccggtttatacagaagcagatggaacattttcaagactctttcaaaagatttatggtgagaatgggagtaagtccatgagtgatgtcagcgcagaagatgttcaaaacttgcgtcagctgcgttacgaggagatgcagaaaataaaatcacaattaaaagaacaagatcagaaatggcaggatgaccttgcaaaatggaaagatcgtcgaaaaagttacacttcagatctgcaaaaaaaaaaagaagagagagaagaaattgaaaagcaggcacttgagaagtctaagagaagctctaagacgtttaannnnnn

SEQ ID NO: 10982 - DNA, 1163 bp, Homo sapiens
  misc_feature 1, 2, 3, 4, 5, 6, 7, 8, 9, 10, 11, 12, 13, 14, 15, 1163: n = A,T,C or G
nnnnnnnnnnnnnnngagacggatcttgctctgtcacccaggctggagtgcagtgactcatctcaaaaaaataaaaaggtgcttccagataattaaccaaacacctccactttagagttgaagaaggggaagaaaaacaaaaggagggaggttaaatgagtggcccggcagaggcacgggaacttgaatgtacccctcctaatctcactctgatttccccccatcggctactcagcttagtgcggcattgggagaaggccacaggacaggggaaagagttctcttcactttggtttgtttgcctggtttctcccacattttacacaggtttaaagggaagagataatgggcagggtattgtggaaaaacagtgaaaaaaaagggaacaggagtaagtgcaggataaaggaggaaagacagacactgggaatggtggttgaatcatgaattttctagtttctcatttccctcttgtcacaggcaccttgacaaatgctagaatttaaactgctgatttgtagctcttaaaggattcagggagccaacagcaaaatacctaccagttttggggttcgccttctccatctccctcagcctctgccgctcctggaggatctgcaatcctgtcatgagctgatactctgcaggttctgtgctggtgttcctttgaaccagtcgcaggtctcgctcatccataagtctaatcacatttgctcggtgcatgtttcccaaatcattgcccttctcatcaaataagtgaataactcgctgactaatttttcttccaacgttactaaaagctgttttattcttttttgtcttttttccttcattctgggtgtcttcagcggtactaaaggcttttgcatgaattaggaaggagagtcttggggcagaagcaataggggacaactgtgctggtgctgtcttttgcaggatgtgtttaccaaaacatctaatgcaactattttcagactttacagtttgtagtgttaacctctttagaaaaagagcagccatccttttttaggaagaactgtaatcatccccagttgatgaggagaagctcttctgtagagaagaatgacagctgtgctggggcaagcgattgacatactgtagcggacgcaagtacagcggatctgcggcgagtcccccggacn

SEQ ID NO: 10983 - DNA, 503 bp, Homo sapiens
  misc_feature 502, 503: n = A,T,C or G
acgcgggaccaacaatgttagacaaatgtagccaaaccaaaaaatacacatgttctatgaatccatatatgcaaggttcacaataggtgatagtagctactcttttgggaaggagtgaggaaaggactgacagagtattgcagagggggctccggggtgtttgtaaatgtctatttcccagaggcaagtgtggtttcgcatgagcattgttcaactttgtggaaaattcaattgagcttggaacttaattttaccgaacttatttaattaaatgaaaaaggaattctttatatcaattggggaacacctgggaaggatatggcaaggaaggttggggggaaactttaaaaaacacatagaggtggccgaatggcttatacaaatttgttaatgggaaagagaatgggatttacccgggtgggggtggattggaacctgggcccactttataaaaataaaggggattccccccgggttttgggggaattttaaaatttaaacnn

SEQ ID NO: 10984 - DNA, 3516 bp, Homo sapiens
  misc_feature 1, 2, 3511, 3512, 3513, 3514, 3515, 3516: n = A,T,C or G
nnagcgcccggctgcgctggagccgcccggagctaggggctccccggggcgcaggagagacgtttcagagcccttgcctccttcaccatgccggttgccgccaccaactctgaaactgccatgcagcaagtcctggacaacttgggatccctccccagtgccacgggggctgcagagctggacctgatcttccttcgaggcattatggaaagtcccatagtaagatccctggccaaggtgataatggtattgtggtttatgcagcagaatgtctttgttcctatgaaatacatgctgaaatactttggggcccatgagaggctggaggagacgaagctggaggccgtgagagacaacaacctggagctggtgcaggagatcctgcgggacctggcgcagctggctgagcagagcagcacagccgccgagctggcccacatcctccaggagccccacttccagtccctcctggagacgcacgactctgtggcctcaaagacctatgagacaccaccccccagccctggcctggaccctacgttcagcaaccagcctgtacctcccgatgctgtgcgcatggtgggcatccgcaagacagccggagaacatctgggtgtaacgttccgcgtggagggcggcgagctggtgatcgcgcgcattctgcatgggggcatggtggctcagcaaggcctgctgcatgtgggtgacatcatcaaggaggtgaacgggcagccagtgggcagtgacccccgcgcactgcaggagctcctgcgcaatgccagtggcagtgtcatcctcaagatcctgcccaactaccaggagccccatctgccccgccaggtatttgtgaaatgtcactttgactatgacccggcccgagacagcctcatcccctgcaaggaagcaggcctgcgcttcaacgccggggacttgctccagatcgtaaaccaggatgatgccaactggtggcaggcatgccatgtcgaagggggcagtgctgggctcattcccagccagctgctggaggagaagcggaaagcatttgtcaagagggacctggagctgacaccaaactcagggaccctatgcggcagcctttcaggaaagaaaaagaagcgaatgatgtatttgaccaccaagaatgcagagtttgaccgtcatgagctgctcatttatgaggaggtggcccgcatgcccccgttccgccggaaaaccctggtactgattggggctcagggcgtgggacggcgcagcctgaagaacaagctcatcatgtgggatccagatcgctatggcaccacggtgccctacacctcccggcggccgaaagactcagagcgggaaggtcagggttacagctttgtgtcccgtggggagatggaggctgacgtccgtgctgggcgctacctggagcatggcgaatacgagggcaacctgtatggcacacgtattgactccatccggggcgtggtcgctgctgggaaggtgtgcgtgctggatgtcaacccccaggcggtgaaggtgctacgaacggccgagtttgtcccttacgtggtgttcatcgaggccccagacttcgagaccctgcgggccatgaacagggctgcgctggagagtggaatatccaccaagcagctcacggaggcggacctgagacggacagtggaggagagcagccgcatccagcggggctacgggcactactttgacctctgcctggtcaatagcaacctggagaggaccttccgcgagctccagacagccatggagaagctacggacagagccccagtgggtgcctgtcagctgggtgtactgagcctgttcacctggccttggctcactctgtgttgaaacccagaacctgaatccatccccctctgacctgtgacccctgccacaatccttaccccatatctggtgtccttggtaacagctccacacaggccctaagtctggcttcagcacagaggcgtgcactgccagggaggtgggcattcatggggtaccttgtgcccaggtgctgcccactcctgatgcccattggtcaccagatatctctgagggccaagctatgcccaggaatgtgtcagagtcacctccataatggtcagtacagagaagagaaaagctgctttgggaccacatggtcagtaggcacactgccccctgccacccctccccagtcaccagttctcctctggactggccacacccaccccattcctggactcctcccacctctcacccctgtgtcggaggaacaggccttgggctgtttccgtgtgaccaggggaatgtgtggcccgctggcagccaggcaggcccgggtggtggtgccagcctggtgccatcttgaaggctggaggagtcagagtgagagccagtggccacagctgcagagcactgcagctcccagctcctttggaaagggacagggtcgcagggcagatgctgctcggtccttccctcatccacagcttctcactgccgaagtttctccagatttctccaatgtgtcctgacaggtcagccctgctccccacagggccaggctggcaggggccagtgggctcagcccaggtaggggcaggatggagggctgagccctgtgacaacctgctgttaccaactgaagagccccaagctctccatggcccacagcaggcacaggtctgagctctatgtccttgaccttggtccatttggttttctgtctagccaggtccaggtagcccacttgcatcagggctgctgggttggaggggctaaggaggagtgcagaggggaccttgggagcctgggcttgaaggacagttgccctccaggaggttcctcacacacaactccagaggcgccatttacactgtagtctgtacaacctgtggttccacgtgcatgttcggcacctgtctgtgcctctggcaccaggttgtgtgtgtgtgcgtgtgcacgtgcgtgtgtgtgtgtgtgtgtcaggtttagtttggggaggaagcaaagggttttgttttggaggtcactctttggggcccctttctgggggttccccatcagccctcatttcttataataccctgatcccagactccaaagccctggtcctttcctgatgtctcctcccttgtcttattgtccccctaccctaaatgcccccctgccataacttggggagggcagttttgtaaaataggagactccctttaagaaagaatgctgtcctagatgtacttgggcatctcatccttcattattctctgcattccttccggggggagcctgtcctcagaggggacaacctgtgacaccctgagtccaaacccttgtgcctcccagttcttccaagtgtctaactagtcttcgctgcagcgtcagccaaagctggcccctgaaccactgtgtgcccatttcctagggaaggggaaggagaataaacagaatatttattacaaaagttagaatatatttcttatactaggaatctcatttgcatttgcatagactatacacannnnnn

SEQ ID NO: 10985 - DNA, 3337 bp, Homo sapiens
  misc_feature 1, 2, 3, 4, 5, 3058, 3059, 3060, 3061, 3062, 3063, 3064,3065, 3066, 3067, 3068, 3069, 3070, 3071, 3072, 3073, 3074,3075, 3076, 3077, 3078, 3079, 3080, 3081, 3082, 3083, 3084,3085, 3086, 3087, 3088, 3089, 3090, 3091, 3092, 3093: n = A,T,C or G
  misc_feature 3094, 3095, 3096, 3097, 3098, 3099, 3100, 3101, 3102, 3103,3104, 3105, 3106, 3107, 3108, 3109, 3110, 3111, 3112, 3113,3114, 3115, 3116, 3117, 3118, 3119, 3120, 3121, 3122, 3123,3124, 3125, 3126, 3127, 3128, 3129, 3130, 3131, 3132: n = A,T,C or G
  misc_feature 3133, 3134, 3135, 3136, 3137, 3138, 3139, 3140, 3141, 3142,3143, 3144, 3145, 3146, 3147, 3148, 3149, 3150, 3151, 3152,3153, 3154, 3155, 3156, 3157, 3158, 3159, 3160, 3161, 3162,3163, 3164, 3165, 3166, 3167, 3168, 3169, 3170, 3325: n = A,T,C or G
  misc_feature 3326, 3327, 3328, 3329, 3330, 3331, 3332, 3333, 3334, 3335,3336, 3337: n = A,T,C or G
nnnnnccggcgaataaaacgagcggcgaaagaaccgaaaaaaggctcgacgctaccgtgtatgaggaactttgatccttgcgggccaccattccggaagtagaatttagaggaagaaaataccggagttgcagggtataggtaaatttctcaaggttataggttggggttcttagaactttttgtggtgtgtgttggcctagagcgactcagaagcgttagtgacttcacctaaaaaagctaacctctctgctgagcgcgaccggtatgcggcgcaggatgagcctcagggcttctgttaagagtctgtctgagaaagccggtctgcgctgttcctcggtggcgaccttaattatgagatgagctaatgctttactgacttaaccatggcgcagcgggcagtgtggctcataagccacgaaccgggaactccactttgtggcaccgtgagattctccagacggtatccaactgttgaaaaacgagccagagtcttcaatggagcaagttatgtgcctgttcctgaagatggtccctttcttaaagcactgctctttgaacttagattattggatgatgataaagacttcgttgagagtcgtgatagctgttcacgcatcaataaaacatccatttatggactcctgataggaggtgaagaactctggccagttgttgcttttctgaagaatgacatgatatatgcttgtgttccactagttgaacaaactctgtcccctcgtccgccactaattagtgtcagtggagtttcacaaggctttgaatttctttttgggatacaggattttctttattcaggtcaaaaaaatgactctgagctgaatacaaaattgagccagttgcctgacttgcttctgcaggcttgtccatttggtactttattagatgccaacttacagaattcattagataataccaattttgcatctgtgactcagccacagaaacagccagcttggaaaactgggacgtacaaaggaaaaccacaagtttctatttctatcactgaaaaggtaaaatccatgcaatatgataaacagggtatagcagatacatggcaagttgttggaacagtgacttgcaagtgtgatttggaaggaatcatgccaaatgttaccatcagcttgagtctccccaccaatggatctccacttcaggatattctagttcacccttgtgtaacttctcttgactctgcaattctgacttctagtagtattgatgcaatggatgactctgcatttagtgggccttacaaatttccattcactccacctttagagtcattcaacttatgcttctacacttcccaggtccctgtcccaccaattttgggtttttatcaaatgaaggaggaagaagtacaactaagaataaccattaatttaaaacttcatgaaagtgtgaaaaataattttgaattctgtgaagcccatatacctttttacaatagaggtccaattacacatttggaatacaaaactagttttggccagcttgaagtatttcgagagaaaagcttattgatctggattattggccagaagttcccaaaatcaatggaaattagtctttctggaactgtaacttttggagccaagagccatgagaagcagccatttgacccaatttgtactggagaaacagcatatttaaagcttcattttaggatcttagattacacacttactggatgttatgcagatcagcattcagttcaagtttttgcatcaggaaaaccaaaaataagtgcacaccggaaactaatttcttctgattattacatctggaattctaaagcccctgctccagtaacatatggatcattattattgtaatagtctcatgtttaaatgggattatataatgataacagtttaaagaaaatcataatcttatatttttaatgtggatgcatataacctgtgagtgaaaaatcactgaatgatttaattgtaaaagtagtcttatgtggtgtttgtagtctgatagagcttgaaaggacattttaaaagctaatgtctccaattttgttaaccttcgattttatgccagtataattcagaacatagaaaagtaatgattcacttgggctcattttagactggtcctgggtcaccctgccacacttgtttcctagtgtttctgtggcagacattgctaatcaattacagcccttttctgtactgagccttggataaagggtcaggctcctttttagttcagagattcaggcagccactcccagtgggttgtagataatgtgcaagataaaaactattttctcttccaaatctaagtactaagctcctagtataaggtgttgttacagaataccagagaccatgttagagacaactacatctcttcaaaaaacagccaacagagacaaaggaaaagtgtttaaatagtaagctgttcttcttaatcagaactatcctattgactaataaataatctgcataattctacttaaggtgtgtaatctctgttctagagttagtttttaagtaagcttgttaatctgccactttgacattttgcttaggatgtcagtagccatattaagatgtgtagaataccttcagaagatgatcatagtgttttgtaatcatttaatgtctgcagccaaatttttaaaggtaatttagacctaatactgctcttgctgtgtcttattaagttaaaattaatgaatgaattctggtaaaaattcaaaaggcactctgtgagtagagagtatcatttaagcttattttagtcacatgtagtatatatctccttaaagctgtcactctcactttcttaccattctcttgatttcttcagaaaccatctagtcatcatctttatactctacctgcttctgcaattatatatcatattatgttttcagagcagttcattgtcaagttggactttaagtgaccattcaagaaaagatgaaatctcacgaacctcaaaacttcattcatgtctttttacaaatgagaaaaaaaaatgcattaaagattaatactcaatttgaaaaaaaaagnnnnnnnnnnnnnnnnnnnnnnnnnnnnnnnnnnnnnnnnnnnnnnnnnnnnnnnnnnnnnnnnnnnnnnnnnnnnnnnnnnnnnnnnnnnnnnnnnnnnnnnnnnnnnnnnngggggggcccttaacttatttaaaaaaaaaacccccccccccccccccgggccccgaaaaaaaaaaagaagcccaagggggggggaaacccgtttattggcccttttaagggggccaaaaaaaagaagggccctcaaaattttccaaaaaaagcnnnnnnnnnnnnn

SEQ ID NO: 10986 - DNA, 394 bp, Homo sapiens
  misc_feature 1, 2, 3, 4, 5, 6, 7: n = A,T,C or G
nnnnnnncaggtacatttacaaactttggaaacaagtttgatggtgtctttaaaagttaagcatacacttaccataggatccagccatacttccccggagagaagaaagtgtgcctctcagcaaggcttacacacgaatattcacagcagctttatttataaaagctgaaaaatgaaaacagcccaaccgccatccacatgcaaatggataacccacggtgatgtgttccatccatgccgaggaataccattcagccataaaaaggaacggatcagaaacgcatgcaacagtgtggaccaatcttaaaatagttgtgtggactagaatgagccagtccaaaacagaatcctgaaactcccctactctgctaacgggagaaagtgatttccatgt

SEQ ID NO: 10987 - DNA, 427 bp, Homo sapiens
  misc_feature 425, 426, 427: n = A,T,C or G
actgctgtggacctcttgaaacaaattgtaaaagcttgacttgaaatgatcaaactgtttgacagcaacttgactgccttcctgaacaaaactcaaagttatagggacacaaaaatatgcagcaaccaacaaagtaaaattcacagtgtctggttttctatcaaacttttgagccacactaaaacagggaaatgaccataatgaagggataaatcaatcatgttaaactgactcagagctgacacaggtgtaagaattaccagaaaagaacattaaatcagtttttataactgtatactgtacatcccccaaattaagtagacaaaaaaaaagatataaaaatattcaagctaacattaagaaagaaaaactggggcttggtgctgtggcttatgcctataattccagcattttgggaggcctannn

SEQ ID NO: 10988 - DNA, 1068 bp, Homo sapiens
  misc_feature 1064, 1065, 1066, 1067, 1068: n = A,T,C or G
aggtacgcggggagatatttactttatgaattaaagctggagtcagtgtcagcccgaaggctgaaggaaaaagagcaacagatccagggagcattcacctgccctgtctccaaacagagccaccaaggaggagcagggggagcgacggccggggcagaagttgagaccacccagcagaggagctaggccagtccatctgcatttgtcacccaagaactcttaccatgaagaccctcctactgttggcagtgatcatgatctttggcctactgcaggcccatgggaatttggtgaatttccacagaatgatcaagttgacgacaggaaaggaagccgcactcagttatggcttctacggctgccactgtggcgtgggtggcagaggatcccccaaggatgcaacggatcgctgctgtgtcactcatgactgttgctacaaacgtctggagaaacgtggatgtggcaccaaatttctgagctacaagtttagcaactcggggagcagaatcacctgtgcaaaacaggactcctgcagaagtcaactgtgtgagtgtgataaggctgctgccacctgtttttgctagaaacaagacgacctacaataaaaagtaccagtactattccaataaacactgcagagggagcacccctcgttgctgagtcccctctttccctggaaaccttccacccagggctgaatttccctctctcataccctccctccctaccctaaccaagttccttggccatgcagaaagcatccctcacccatcctagaggccgggcaggagcccttctatacccacccagaatgagacatccagcagatttccagccttctactgctctcctccacctcaactccgtgcttaaccaaagaagctgtactccggggggtctcttctgaataaagcaattagcaaatccccttacaaaaaaaaaaaaaaaaaaccaaagaagggggggccaaaaaaaaattattaaattaataaatttccggcgcgtcggtaaactcgtcaaaaaaaaaaccattgcacccgtccccgtgaccctgaaaaatgaannnnn

SEQ ID NO: 10989 - DNA, 187 bp, Homo sapiens
catcaccatgcaggttacattcatcttccactggaatgactagagccctccaggtagtagcctgactacagaagaacacaggactggctcctgggggcaaacaggctctcttgcttctcctcattggccatgccttagcatggttcctccctatctcctactcaagcaggtcctcagtacctgcccg

SEQ ID NO: 10990 - DNA, 5220 bp, Homo sapiens
  misc_feature 1, 5205, 5206, 5207, 5208, 5209, 5210, 5211, 5212, 5213,5214, 5215, 5216, 5217, 5218, 5219, 5220: n = A,T,C or G
ngctgcgaggatgctgcctgggcggctgtgctgggtgccgctcctgctggcgctgggcgtggggagcggcagcggcggtggcggggacagccggcagcgccgcctcctcgcggctaaagtcaataagcacaagccatggatcgagacttcatatcatggagtcataactgagaacaatgacacagtcattttggacccaccactggtagccctggataaagatgcaccggttccttttgcaggggaaatctgtgcgttcaagatccatggccaggagctgccctttgaggctgtggtgctcaacaagacatcaggagagggccggctccgtgccaagagccccattgactgtgagttgcagaaggagtacacattcatcatccaggcctatgactgtggtgctgggccccacgagacagcctggaaaaagtcacacaaggccgtggtccatatacaggtgaaggatgtcaacgagtttgctcccaccttcaaagagccagcctacaaggctgttgtgacggagggcaagatctatgacagcattctgcaggtggaggccattgacgaggactgctccccacagtacagccagatctgcaactatgaaatcgtcaccacagatgtgccttttgccatcgacagaaatggcaacatcaggaacactgagaagctgagctatgacaaacaacaccagtatgagatcctggtgaccgcctacgactgtggacagaagcccgctgctcaggacaccctggtgcaggtggatgtgaagccagtttgcaagcctggctggcaagactggaccaagaggattgagtaccagcctggctccgggagcatgcccctgttccccagcatccacctggagacgtgcgatggagccgtgtcttccctccagatcgtcacagagctgcagactaattacattgggaagggttgtgaccgggagacctactctgagaaatcccttcagaagttatgtggagcctcctctggcatcattgacctcttgccatcccctagcgctgccaccaactggactgcaggactgctggtggacagcagtgagatgatcttcaagtttgacggcaggcagggtgccaaaatccccgatgggattgtgcccaagaacctgaccgatcagttcaccatcaccatgtggatgaaacacggccccagccctggtgtgagagccgagaaggaaaccatcctctgcaactcagacaaaaccgaaatgaaccggcatcactatgccctgtatgtgcacaactgccgcctcgtctttctcttgcggaaggacttcgaccaggctgacacctttcgccccgcggagttccactggaagctggatcagatttgtgacaaagagtggcactactatgtcatcaatgtggagtttcctgtggtaaccttatacatggatggagcaacatatgaaccatacctggtgaccaacgactggcccattcatccatctcacatagccatgcaactcacagtcggcgcttgttggcaaggaggagaagtcaccaaaccacagtttgctcagttctttcatggaagcctggccagtctcaccatccgccctggcaaaatggaaagccagaaggtgatctcctgcctgcaggcctgcaaggaagggctggacattaattccttggaaagccttggccaaggaataaagtatcacttcaacccctcgcagtccatcctggtgatggaaggtgacgacattgggaacattaaccgtgctctccagaaagtctcctacatcaactccaggcagttcccaacggcgggtgtgcggcgcctcaaagtatcctccaaagtccagtgctttggggaagacgtatgcatcagtatccctgaggtagatgcctatgtgatggtcctccaggccatcgagccccggatcaccctccggggcacagaccacttctggagacctgctgcccagtttgaaagtgccaggggagtgaccctcttccctgatatcaagattgtgagcaccttcgccaaaaccgaagcccccggggacgtgaaaaccacagaccccaaatcagaagtcttagaggaaatgcttcataacttagatttctgtgacattttggtgatcggaggggacttggacccaaggcaggagtgcttggagctcaaccacagtgagctccaccaacgacacctggatgccactaattctactgcaggctactccatctacggtgtgggctccatgagccgctatgagcaggtgctacatcacatccgctaccgcaactggcgtccggcttcccttgaggcccggcgtttccggattaagtgctcagaactcaatgggcgctacactagcaatgagttcaacttggaggtcagcatccttcatgaagaccaagtctcagataaggagcatgtcaatcatctgattgtgcagcctcccttcctccagtctgtccatcatcctgagtcccggagtagcatccagcacagttcagtggtcccaagcattgccacagtggtcatcatcatctccgtgtgcatgcttgtgtttgtcgtggccatgggtgtgtaccgggtccggatcgcccaccagcacttcatccaggagactgaggctgccaaggaatctgagatggactgggacgattctgcgctgactatcacagtcaaccccatggagaaacatgaaggaccagggcatggggaagatgagactgagggagaagaggaggaagaagccgaggaagaaatgagctccagcagtggctctgacgacagcgaagaggaggaggaggaggaagggatgggcagaggcagacatgggcagaatggagccaggcaagcccagctggagtgggatgactccaccctcccctactagtgcccaggggtctgctgcctggcccacatgtcccttttgtaaaccctgacccagtgtatgcccatgtctatcatacctcacctctgatgtctgtgacatgtctgggaaggccttctccagcttcctggagcccaccctttaagccttgggcactccctgtgtttcatccatggggaagttccaagaagcccagcatggccatcagtgaggacttcagggtagactttgtcctgtagcctccacttctgccctaagttccccagcatcctgactacctgtctgcagagtttgcctttgttttttcctgcagggaagaaggcccacctttgtgtcactcacctccccaggctcagagtccccaaggccctggggttccaactcactgtgcgtctcctccacacagaccagtaggttctcctatgctgactccaggttgcttcatacaaggagggtggttgaacttcacacacgtaaggtcttagtgcttaacagtttaaaggaaagtccttgttgaggcagaactaagtttacagggaaaggtacacacattctctctctctctctctctctgtctatctagttccccagcttggagagcctttccccttgcttctttctgaggccatataagcttataagaaaagtcccaaaccaagaataggtccttggccacaagcagggtctgatcccccatcagagctatctgagcctgcctgtctgggcacctgctgcaaccatgcagctaccctgccaggggcactcagcaaacagaaccacagggcccaggaggcattccacacaggcactgccccaggacaacacaacaaggacagtcacaacaaggacaacaaggacacaacacaacacacaacaaggacagtcacaacaagcctagagccagaaagcagatggaaatgctaatgaggtcaaacgtaggcttcatggtgggtggagtgggggtggctgggctcccccaggacagaggggaccctgaggttggcaaggctctcaccactcagccttatggtcccttatctcctatcttccctcttgagaaaatacacgctttctgcatgtattagaaacgcacgagctccaccaagtctacaatgaaagtttgaaatttaactgcaaggaattagaagcatatttgcaatcattgcagcttcttctttcttctgctcataaaaggaggaacactttagatagagggcaaatatatctgaaaacctaatttctttctttttttgataaggaaatcttttccatctccatcctaacatgcacaacctgtgaagagaattgtttctatagtaactggtctgtgatcttttgtggccaagagaatagcaggcaagaattagggccttgacagaatttccacgaagctctgagaacatgtttgtttcgaatgtctgattcctctttgtcatcaatgtgtatgctctgtccccatccttcactcctcctcaagctcacaccaattggtttggcacaggcacagagctggtccctagttaagtggcatttatgttaaaaaaaaatagttcagaatctcagccttttctttgtgtcatcaaaacagcttaagaaggggactactgccaatgtcctctagtctgacctccacccagggaggacccatggcaggtcttttcaactttctgattcatgagaacaaccttgtgaagcttttcccacctcctaaagtgttttctgcatctgttccttcctttggacctcacaacaaatcctgtgaagtaactgagacatctgttgttagatacatttttgtgatgagtaaactgaggcttcgtgattcaatgtcttgttcagagtcattcaaaagtatagacaagaccagtctccccaacttccactcctggtgcaggattctacttatgttcataggtatgcacctaacagacactgctgcaaacctactatgtgctaagcatcctaccaatagctgtgagaaaaagaaaagctgaataagataagctccttccctacattatatttgcagacgggaaataaacaggcctagaaattacacaagagacaaatgaagaggaagagaagtcacaagagaagaaggatgcggtcacaaacttaaccagtgctcttatttttcccttctcagggaaaaacaccagaagaagctggggttttatattcattggatggaaacagatatttctcctgggaattctcccaaccaaatagcccttttctattaggctgtgtctgcacatccacaagaggaaagtctataggactgattagttttcacaatcccatttaaataaaaaaaagatctttaggtnnnnnnnnnnnnnnnn

SEQ ID NO: 10991 - DNA, 1427 bp, Homo sapiens
  misc_feature 1, 1412, 1413, 1414, 1415, 1416, 1417, 1418, 1419, 1420,1421, 1422, 1423, 1424, 1425, 1426, 1427: n = A,T,C or G
nctcggtaccccccttgacacttccgcctgggccaccgagactctgtttccagcagcagtcatatcagatgaatgaaaatatgaaatatataaactagtatccatttatttgcatttattgtgggatttcagatatgaacggtgtaaatttgagaagcacttatgcatacatgtgggtgaaaaaccaatctaattttgtataaataaaaacaggctcctggaaggtgaaaagtagtcatttgttctaaatctatacatattacttgtatctagtgcagaataagctataacatcccattgaggaatcttaaatttcatagacatgtaaagctgaagtaactctaaagagcagatgcttcagaaccatcagaaggttctggtcaacagtcagtattatctcttaaatgtatatgttggtcactaattgcacaaaatctataatttgccagggctttagagattgagtcaatatgtcatttaccatggttttcccactgaaggctttaacttttctgataaaataatattttaaattttcaaaaacccattcctgaggagaactacttctagcattccttttcatgatgtgcttttgtgcagtaagtagcattttcggctacttaactttacattcctcttatttttcagtttccagtcaagattataaaaagcaaatgattgatataatttgatattcatagagttgtgcctacctttaatggaaaaatacatgtcagatacttagatgtttattgatatgagactatgtggttaaaaaacccaagtatgtccatgtgtttcttataaggtacacttgaaactagtgagtgtttgtcacatttcactttcatggtatataaaatgcagtttgcatatataacttgaatatctggtactagttttttcacgcctgcaatcttggagtctaggttgccttgtctctcctatttttaaataagtgaaatttgggagattgtaaaatctgtaaagtttgttttgtgaaaataaaatgttcacagtagaaattctccctcagcaaaaaagaaaccaaaccaaagggggaggcggacagaaatcaccaccgggggccacattaacggatcacacatttctgtataagggggccccggcctcgaaaaagctaaaaccaccctttttgggaaaaggtgggataaaacctttcccttttttgtccagggaaatttccctttcaaatttccctttcaaccggggggagtaaaaaccagccctttttcccattttatttgttaaaaactttttcaaaaaaaaaaaaaaagggggggttttttttaaaaaaaaaaaaaaaaggaatcctggttaaaacccacaaaaaaaaacctaattgggaccaaatgggggtcctttttccttaacagaaagccccgggtccnnnnnnnnnnnnnnnn

SEQ ID NO: 10992 - DNA, 1791 bp, Homo sapiens
  misc_feature 1, 2, 3, 4, 5, 6, 7, 8, 9, 10, 11, 12, 13, 14, 15, 16, 17,1789, 1790, 1791: n = A,T,C or G
nnnnnnnnnnnnnnnnntttttctttcgcaaaataatggaagatccttttgaaacttagtatcttcagttatcaatattactgcattatggagctagtgcaatcctgcatagccttggtcaaaatgacaaggcacaataaaaaaaaattaaagtattatatgaacaagagaagtcattgaagataatttaaggccttgaagtgaattaatcagtctaatttaaagctgaagaataaaccataaattatccacctgaaatgcaagcaatatgctttttcagcttctgttctgtggacaaaataacagaaacaactcttgcttatggtttgtgtattagaatccttctggacctggaggagtgaaagtcaattccatttttcaactgttcatggaagatttcaggactgttttagccgtttgcgtggaatgccaaactgtggacactgtgcagatgctagtgctcgaaaggcttctgctactaaatgagggtgagactgaatcatggacttccaccctgatgtttccattatgtcggttgcttggttgctgttccagtttttcccatctttacacccaagttgtcgaagtacactgcacctattaataaagtctatggcttgtgctttcaactgttctgcactgtgcaaatctgcaaggacaagggtatctgcaacattctctactgagaggttactacacaaagcttcttcgcacatgaccttcagccgttccagtgcatatttgtctgcagctgccaacaagttgtcagccattttgtcaaggtttggtgctctccctgtgtaaatgaatctcatcatttctttaaaaacttcagggtctaaatcatttatttccactcgattctttttgctttcttccatttcatgttcaaacatggcgttaaaaactggagatcgagctgcaagcacagatttatgagctttaaattcttgtcctctcacgaaaaaactgcagtctgtaaatcttgtgttttcccagagattacctaaatcttctgctagacgacactcaggcaccttcaaagtatttgtattagtatgtcctgatatgtttactgaatcttggaccacactcacctcacaaaataatgtaagcttgtcatctggtaaaagaccattagcttcatcaagcaaaaagtcccttctaatgaattttttaaaaccccagtccttcccttgcacaaatcgatatgctctttggctttccattgcttttgtttcttcccttttagcattcagaagggaaaatttgaattttgctcgaacttcacttttggggcagctgactaaaagcaaatataaggacaagtagtctttactttcatcatctaatccctttgggtttaccctcaggcaccatttcattttgtcacttgggccagatgaaaatgttgaactttttaacacttcacccatttcctctcgacaaaaactgaagttattaatggtccacatataggaaaattttactactttaacctgtgtgtaacaccagctttctgctatgggaccagtagacatatctccaggtagaggtggggtgggttcccgagacatcaccactttattgtagtctttcaggatttatgtagtaccccacacagttgagtaccttacctggacgtgctgggcggcagcggtcagtcctggtggagactcctctcccgctgaggcggtggccgtgtccgccctgggagcccgaggctgcggtggtggcagcaggggtgatggcggcaagtccctggtgcggcccctccgccgaaccgcannn

SEQ ID NO: 10993 - DNA, 741 bp, Homo sapiens
  misc_feature 1, 2, 3, 4, 5, 741: n = A,T,C or G
nnnnngagtgtctgctgctgatacacatgattgtgtttaggtttgaaattgctcaagtgtctggctcaggtggtggttctgagacacatcgtcctgctgagagcccagatgcttaggtccactagggcccatctagggaagggaaaggagatttcagcggcttccccgaaaggaacgggactgtcgggatgcttcccggatgtctacagttgccccttcctgcagtgagattactgcttcctgtttccctccagctcttcccagcagcagtgagggagtataagagggatctgtagtcgctgcctggctctgtgggcggcccctttaagactcaggtgagctcagccagtcccgctgcgccaggcttgaatcaaaggtgtcagcaagctagatgtcaaaacatttcgagagagaggcagcttgcagaaaagcagaaaggttgaattcaggggtcagcaaactatggcatgtggccccgtgagctaggaatggtttttcctctttaagacagggcctggctctgtcacctaggctggagtacagtagtgcaatcatgactcactgcagcatcaacctccctggctcaagcgatggcttttacctttttaaggagttgtaaaaaaaaaaaaaaatatgtgacagaattcatgtggcccacaaagcctgaggtacttactgtcaggccctttgtagaaataagttgctgaccctggtttgatttgtcatcacagggctgctcan

SEQ ID NO: 10994 - DNA, 383 bp, Homo sapiens
  misc_feature 325, 327, 380, 381, 382, 383: n = A,T,C or G
actagaggtaaatttttaataacatactaatgtgaaatggtatctggtttttattcagactttttgtgagcatattcttatagacactagaaataaatacatagaaggagactttgagcacaagggagaagagagttattagcactcctgaggcctctggaatgctgcttttctatccaggtatcttgcttgctaccagcagaattgactggtattggttctcactggccagggagcctctgctctgttcctggaatataaggcttttattcaggagcaaatcattgatagtaactttgctttatctagccattgacttcagcananaaaaaaaaaaaaaaaaaaggtccttggccggtttaaaaccaggggatcccccnnnn

SEQ ID NO: 10995 - DNA, 878 bp, Homo sapiens
  misc_feature 869, 870, 871, 872, 873, 874, 875, 876, 877, 878: n = A,T,C or G
acgcggggattgtgtgcaaaatcagagaggggtgcaagatcctgatttttcaggagttcaagcgacaatggcagcccaatacggcagtatgagcttcaaccccagcacaccaggggccagttatggtgagagggcattcagtgctccccataccaggctgcagggagggcctggaaggcaagagcccagaaattcccaattgagaattgtgttagtgggtaaaaccggagcaggaaaaagtgcaacaggaaacagcatccttggccggaaagtgtttcattctggcactgcagcaaaatccattaccaagaagtgtgagaaacgcagcagctcatggaaggaaacagaacttgtcgtagttgacacaccaggcattttcgacacagaggtgcccaatgctgaaacgtccaaggagattattcgctgcattcttctgacctccccagggcctcatgctctacttctggtggttccactgggccgttacactgaggaagagcacaaagccacagagaagatcctgaaaatgtttggagagagggctagaagtttcatgattctcatattcacccggaaagatgacttaggtgacaccaatttgcatgactacttaagggaagctccagaagacattcaagacttgatgtacattttcggtgaccgctactgtgcgttaaacaacaaggctacaggcgctgagcaggaggcccaagagggcaccgttgatgggcctgatccagcgcgtggtgagggagaacaaggaaggctgttacactaataggattgtaacacaggaatcagaatgaaactcgagtacgaaactacgaactcaggtacagtaccattagttaatatgtagagaatatacnnnnnnnnnn

SEQ ID NO: 10996 - DNA, 686 bp, Homo sapiens
ccgcccgggcaggtactttgggaggccaaggcaggtggatcaactgaggtcaggagtttgagaccagcctagctaatgtagtgaaatcctgtctctactaaaaatacaaaaattagctgggtgtggtggtgcatgcctgtaatcccagctactcaggaggctgaggcaggagaattactggaactcaagaggcagagactgcagtgagccaagatcgtgccatggcactcctgcctggacaacagagcaagactccatccttaagctccctgacttgctgctcgtcctttctctggcaaaatctcatccttggatgagcccgacttcgtgtttgctcaatgacaccactcacctgaaccagaaaaaaaaatcaaaaagtggtcagagatatcatcataaattcaaattatttacataaaaaattggccctaaatgtttccagaaatcaataaaagttttgtttctccaaagacatcatttcttcagaaacccaacgtgtataacctattttttctatgttcttctaacatttattcaacttctctcatctgatatcttgccaaatcactcaaagagaaaatatatcccattaggcaagagccgaccatattcccatcacctgagaaaatcatatgcacaggatgcgcccacctcacctttctctgcctcatcatgtcagaaaaagt

SEQ ID NO: 10997 - DNA, 1211 bp, Homo sapiens
cgtaatacgactactatagggcgaattggagctcaccgcggtggcggccgaggtacagggtgacctactcgagccctgaggatggaatccatgagctattccctgcacctgatggtgaagaagacactgcagagctgcaaggcctcagaccgggttctgagtacacagtcagtgtggttgccttgcacgatgatatggagagccagcccctgattggaacccagtccacaggtatatggttaatttgaccaccaggtgcccatgggagcagcggctttatgccctactgaatgaattatgcttcactgggctattgattcccgtgtaagggtgaaaaagaattattaggaaagatcctctttaaagaggaatggtaagaaacaataaaacttaggtgatatttaaggaaacaagtctgattaaaagaaattttggagtatcctggcttatacacaagaccataaagcaagacatttgaagaggatactaaagttgtggattatttcctaagctctgactccctgtgattaccctcactatgtataaagaaaagaagtttggcattacagagcttacttataaaaaggaacccaaactcgggcatttcatagcagcatgattctgagcacacgtgggtaagacctttcttctctggttagatatcatatgctggtgtataattagcttaaatgattgtgatttagacacctaggaaataatcaatagggcaattgctttccataatactttatcttcttgtgctttatttctgaagcagagtagaatgctaaagatgtatcctagtgacagcataaaccctagaggtgacagtctgtattattgcttttcgcttctcttttctgcttctgttgggagccagttttcttcttacgccgcattacagagagaacgtcaaatttagcagccatatctgccatagggtccaaataaagagacaataaaaacattattctctcttttttggatggaatactgcgtgaaatggttatccatacaaagatactttatgtagaatagaaaaaggaggccgggtgcagtggctcacacatgtaatcctagtgctttgggaggctaagccgggagcactgattgaggccaggagttcatgatcagcctgggcaatgaagtgagaccccgtctctacaaaaaaatatgaaaaaatagcgaggtgtggtgacacatgcctgtag

SEQ ID NO: 10998 - DNA, 1810 bp, Homo sapiens
  misc_feature 1, 2, 3, 827, 857, 858, 898, 899, 912, 913, 922, 923, 949,950, 966, 967, 968, 977, 978, 990, 991, 1015, 1016, 1024,1025, 1042, 1043, 1044, 1068, 1069, 1074, 1075, 1083, 1114,1115, 1116, 1123, 1126, 1127, 1149, 1150, 1157, 1158: n = A,T,C or G
  misc_feature 1171, 1175, 1177, 1240, 1259, 1267, 1268, 1269, 1278, 1279,1285, 1286, 1291, 1292, 1310, 1311, 1322, 1324, 1351, 1353,1412, 1413, 1458, 1534, 1624, 1665: n = A,T,C or G
nnnggcaggtactgttttctttattacctcacgtctgggaatatctggaatttaaactagtaattcagctcctcttcagcactcacaatataatctgttgccaatgcctgatgagacacatagctatgaccatggcacttctctttttttccatggttcgcattcaggaggtaatttccttcagctactacaggatatccttcctcatcaattaaaagaaatattcggtcaaatgatttttaaataaaaaacggttcttaccttctaattgtccatttatttcatctatcacttttggaggcgcacccttgggtaaacacacatgcttctgtgaaacagtctcacagagactctcagaatcccaagaactttcttcatagtccttttgctttggattctggagggaggatctaatctgctctcaatgtttgttcattcttcaattccaagggctttatttggaacagacttttgcatttcaatggcagggctcaaagcagatggcctcttgggaggctctgctttgcaaggtgggatgtcccataaattcttaaggctttacttgggaataagaaactatcatttccgcagttagcccttcagaaagacccatttttaacaaggagacccttttcatttggagagaaaggttctaaaattcaacacgcaatttgaccttctaaagttgccaattacattgaagccatatcctttgggaggggtacccttgggtaaacacacatccttctgggaaacagttctcacagagaactctcagaactcccaagaactttcttcattagtcctttggtttggattccgatggngagtatctcatctgctctcaatggtttgtnntcattcttcaattccaagggcgtttatttggaaccagacnnttttgcatttcannatggcaggnnctcgaaggggcagtatggctttctcnngggagggcttctgctnnnttgaaagtnnttgcatgtcccnnttcaattctaagcggcgtttagtnntggaatanngaaacctttctattctnnngcagttagccccttcagaaagacnncatcnntttaacgnaggagacctcttataaagaaagaggggacannntatatanatnnttattgggtatgcccaagcctnntgacaannagacctactcganacantnttcacgccaacttgttcaacaattgaaaagattgaatatccttcattgctttggggattgcanaaaagggggattaccaccntaagcttnnnttgggggtnncttttnngggtnntattgggcatttttgttnnatcatgcccananccgtgacaagaaaattattactctaangnaaaaatttgaaaaacctatgattttcatttcaaaccatgccttgtgaagggattttcannacatttgaaaaataatattttaaaggggtgacaaatatacctaanaggcaagaaattatccctacttatcaagtaaagaagaaaagccggcccgcttcttagaaactaggtgggatccccnccggggcttgcaagggaattccgattatcaaagccttaattcggatacccggtcgaaccttcgaggggggggggcccccggttacaccangctttttggttccccttttaagtggaggggttaaattggcngcgcctttggcggtaatttcatggggccataacttggttttcttgttgtgaaaaattggtaatcccggttaacaaatttccacaaccaacatatcgaggcccggaagcataaaagtgtaaagccctggggtggcctaatagatga

SEQ ID NO: 10999 - DNA, 1469 bp, Homo sapiens
agacgtctagtacgttcccaggttctgaaatacatggttccaggagctcgtgttatcagaggcctggattggaaatggcgagatcaggatggcagcccacagggagaaggcactgtcacaggagaactacacaatggcacaacgcaatcatggagcagcttggtgaaaaacaactgtccagacaagacatctgctgctgcaggctcctcaagtagaaaaggaagcagcagttctgtgtgtagcgtggccagtagcagcgacatcagcttgggttcgaccaaaacggaacggagatcagaaattgtaatggaacacagtatagtttcaggagctgatgtccatgaaccaattgttgttctttcatctgctgaaaacgtccctcaaacagaagtagggtcatcttccagtgcaagcaccagcaccttaacagcggaaacgggaagtgaaaatgctgaaaggaagttaggccctgatagttctgttcgtactcctggggagtctagtgcaatatccatgggaattgtcagtgttagttctcctgatgttagttcagtatctgaattaactaataaagaagcagcttcacaacgacctcttagctcttcagcaagtaacagactgtcagtgagttctttgttggctgctggggcccctatgagctctagtgcaagtgtacctaacctgtcctcaagagaaacatctagcttggagagttttgtaaggagagtggcaaacatagcacggactaatgccacgaacaacatgaatctaagccgaagcagcagtgataacaacactaatactttggggaggaatgtgatgagcacagcaacttctcctcttatgggtgctcagagtttccctaatttgaccacacctggtactacatcaacagtgactatgtcaacatccagtgttactagcagcagcaatgtagctacagcaacaatagttttatcagttggtcaatctttaagtaacactttaaccaccagcctcacatcaacttccagtgagagtgacacaggtcaggaagcagaatattccttatatggtaagttgtaatttaaaatgaaagtatttagatactttcataatgatgcttttattatgttttctcctgatattttaaactttggtttaaagagaattattctctcttcttataaatatgaaatcttcgggccaggcacagtagctcacacctgtaatcccagcactttgggaggccgaggcaggtggatcagttgaggtcaggagttcgagaccagcctgaccaacatggtaaaaccccatttctactaaaaatacaaaagaaaattatccgggagtggtggcacacgcctgtaatcccagctactcaggaggctgaggcagaagaattgcttgagcccaggaggcggaggttacagtgagcagagatcgcgccattgcactccagcctgggcaacaagagcgaaactccttct

SEQ ID NO: 11000 - DNA, 1102 bp, Homo sapiens
accaagaaagtcgggatcgtcggtaaatacgggacccgctatggggcctccctccggaaaatggtgaagaaaattgaaatcagccagcacgccaagtgtaccaaagagggcataataatcagtctcacagtagggttcaccatcctccaagtgaaaaacattgttccgaatgggctttccacaggctacacacacaaaacaggaaacatgccaagtttgtttcaacgcattgatgacttctccaaggatcttcctttggcatcgaccacattcaggggcaaagaatttctcatagcacagctcacaatacagggctcctttctcctctacaaatccaatgtaggccattgtatttttgcagtgagcgcagttgaattcttctgggtgccaagatttccccagtgccactaagaatggtcctctgacagaagaaaaagaggccaactaagtttgagaataaaatttctagagttagcctggatatggacctcttttatgcaatgtccaaccaattaaatacttgctcaattttccttcttaaggactgaactcatgggtgttgggtgttgtaaattcacagagggactctgcattgatgtgtccccgcgtacctgcccgggcggccgcccgggcaggtacagatctgggaactaaatattaaaaatgagtgtggctggatatatggagaatgttgggcccagaaggaaccgtagagatcagatattacaacagctttgttttgagggttagaaatatgaaatgatttggttatgaacgcacagtttaggcagcagggccagaatcctgaccctctgccccgtggttatctcctccccagcttggctgcctcatgtcatcacagtattccattttgtttgttgcatgtcttgtgaagccatcaagattttctcgtctgttttcctctcattggtaatgctcactttgtgacttcatttcaaatctgtaatcccgttcaaataaatatccacaacaggatctgttttcctgcccatcctttaaggaacacatcaattcattttctaatgtccttccctcacaagcgggaccaggcacagggcgaggctcatcgatgacccaagat

SEQ ID NO: 11001 - DNA, 1511 bp, Homo sapiens
  misc_feature 1, 2, 3, 1510, 1511: n = A,T,C or G
nnnggaaccccctttcgccttcttgccttccctttctcctgcccccccaattgtctaaactttcggcccaccccacaatttttttcttttcattccaagagcagccgaaaccagctcactcatttatttgactgagaacattaagaaggacaacaaaattaaacattctttaataaaattcctatagaaagctcagtcatagggcaaatactcagttctctttcccatatcaccgaggattgagagctcccaatattctttggagaataagcagtagttttgctggatgttgccaggactcagagagatcacccatttacacattcaaaccagtagttcctattgcacatattaacattacttgcccctagcaccctaaatatatggtacctcaacaaataacttaaagatttccgtgtggcgtgaaaccatttcaatttgaactaatatccttgaaaaaaatcacattattacaagttttaataaatacagtaagaagagctggcatttttctaaaatactgaatttcagatctggagtttattccataaataggtttcttttcatttgcttgctttcttggatacatttgctcaagtattattctctatgaagtgaactctttcatagataccatataaaaactgtattaatatgtgcctcattatagaagcagctggaagaactggatcacacagttacctaactgaaaagtaacttaggaaaaagctctgctttttgtaaaactttaaatcacaggctgaagaataccaaagaaacatttatatagaactcccactagaaattttataaatatatatgtagcatatttatatatattatatttgcctcaccagtagattttcagcaagtctggctggaatgatgctatcatggaaataaatattaacaaaagaattaatgagtatccacaggtttacaagatttcttctggaaaataatcataaattcaaattatattataatttgcagtttacacaattttaaaagggaagaaagatgcctttctttttagcttcatttggacagtaagaacagccaccaacccccaggtgtggaaaagttgttggctgagtgacaatacttggtcacaacattgaaaagaagtatttacaccattctgggaagtaccaaatattagaaaaaacaaacaaaaacggaaacaatccctagtagcattccttggcgtgcaaagtcagcaggaaatgattatccattgacagttttcatgataagtcttggaagcattcaaaaagcagagggaatcatcggggattgttcagattaggttctgtgggatgccttgttcttaatttaactctgagttccaggatttcattccctttataacatctctaacagggtcatgttcaatttagtgcaagtgcaaaatgaaaatgaaatgaaaccaacaaatacattaggagcgaaggctgatcgttaagatctgtagtccccgcgtacctcggccgcgaccagctctagaacnn

SEQ ID NO: 11002 - DNA, 609 bp, Homo sapiens
  misc_feature 1, 603, 604, 605, 606, 607, 608, 609: n = A,T,C or G
ngtcatggtttctgagtggctaaacaaactgaatctagaggagcctcccagctctgttcctaaaaaatgcccgagccttacctagaggagcagggcacaagaggagcaggttccacaagcctggacagcaggcacatcttcagattcgatggcccaacctccccagactccagagacttcacctttcagaaaccagatgcccagccctacctcaactggaacaccaagtcctgcaccccgagggaatcaggtgagacattgacaggatttggggatgcactaagagtcctatagatgctgcccccttgccagtgaaaacttggggctgagaggagtgcagtgggagtgccaggctccagggcagaactggatgctctgtgctgtttgcagggggctgagagacaaggcatgaactggtcctgcaggaccccggagccaaattcagttacaggtacccattctctacctttttcttttacctgttcaattcttgcaccagactcctcctacagacctatatctagattcagggtactttgtggaggggaggggagaagatgatctaacttaaccttctgaattcataaatgggaaaaccgacannnnnnn

SEQ ID NO: 11003 - DNA, 978 bp, Homo sapiens
  misc_feature 1, 2, 978: n = A,T,C or G
nnacgggaaagagtgagcccatggatactatctggcaaacatcaaagtataaggatacgacatccttgccagagggaaataccttggtttggtttagaagatcccccttcctttgacccgacatgaatttcaaaccagatcccaggtgaagacttagggtcataacacacataaggctggccccttcctgggtcacagactgagtaggttgtcgggttgtgagtacaagttcctaggcaggtcccagcacactcataataagtgtgatacaacagggttttagtcatgatgttccccgaccacgtagtgtgggtgcagtggaggcatccctcccagggttctccttttaacatggataaggggagtagcaagaacaaagtgatgagtagcatgttcatacccagcatggacagaaaaggctttttcctggggggagaaggctaagcaaagtgacagcttaatagcaaagtaattaatatgacaaggaaaattactggacttcagatttctaaccacatttacttccctgatgatgactcaagcttcggccgtgcatagactagtcagcttctggggtgactagagcagggctgttgtctcctcaagcttcagccgtgcgtggactggtcagcttccggagtgaccagagcagggctgttgtcatctcactggcaccttggttccatcgtaggatcagctgggttgcatggtctaggtcctgttggctggtccacttgtcctgggctgctggtttcagctgactggatggatggatccaaggcacaattcctgcaacatttctaggcttccagtgggtcctggcgtcttagctgtggatctcccaatacctgcaggtaacgaggccacagaagctgggcctctaggagcagaagacacagagcagtgaagactacaccagaagctccggctgccgccagagacaaaggccccgccccccgcgtacctcggccgctctan

SEQ ID NO: 11004 - DNA, 1789 bp, Homo sapiens
ccatgaggcattttatttgtaaatatatgtattacatccctagaaaaagaatcccaggattttccctcctgtgtgttttcgtcttgcttcttcatggcccatgatgccagctgaggttgtcagtacgcgggaggcattgaggcagccagcgcaggggcttctgctgagggggcaggcggagcttgaggaaaccgcagataagtttttttctctttgaaagatagagattaatacaactacttaaaaaatatagtcaataggttactaagatattgcttagcgttaagtttttaacgtaattttaatagcttaagattttaagagaaaatatgaagacttagaagagtagcatgaggaaggaaaagataaaaggtttctaaaacatgacggaggttgagatgaagcttcttcatggagtaaaaaatgtatttaaaagaaaattgagagaaaggactacagagccccgaattaataccaatagaagggcaatgcttttagattaaaatgaaggtgacttaaacagcttaaagtttagtttaaaagttgtaggtgattaaaataatttgaaggcgatcttttaaaaagagattaaaccgaaggtgattaaaagaccttgaaatccatgacgcagggagaattgcgtcatttaaagcctagttaacgcatttactaaacgcagacgaaaatggaaagattaattgggagtggtaggatgaaacaatttggagaagatagaagtttgaagtggaaaactggaagacagaagtacgggaaggcgaagaaaagaatagagaagatagggaaattagaagatattgcttagcgttaagtttttaacgtaattttaatagcttaagattttaagagaaaatatgaagacttagaagagtagcatgaggaaggaaaagataaaaggtttctaaaacatgacggaggttgagatgaagcttcttcatggagtaaaaaatgtatttaaaagaaaattgagagaaaggactacagagccccgaattaataccaatagaagggcaatgcttttagattaaaatgaaggtgacttaaacagcttaaagtttagtttaaaagttgtaggtgattaaaataatttgaaggcgatcttttaaaaagagattaaaccgaaggtgattaaaagaccttgaaatccatgacgcagggagaattgcgtcatttaaagcctagttaacgcatttactaaacgcagacgaaaatggaaagattaattgggagtggtaggatgaaacaatttggagaagatagaagtttgaagtggaaaactggaagacagaagtacgggaaggcgaagaaaagaatagagaagatagggaaattagaagataaaaacatacttttagaagaaaaaagataaatttaaacctgaaaagtaggaaggtgattaaaagaccttgaaatccatgacgcagggagaattgcgtcatttaaagcctagttaacgcatttactaaacgcagacgaaaatggaaagattaattgggagtggtaggatgaaacaatttggagaagatagaagtttgaagtggaaaactggaagacagaagtaacgatggtttatacaaggctcagtgcaaaggtttatcctaaagaaccatgtttatcaacaaattaggggccgggcacagtggctcatgcctgtaatccaagcactttgggaggctgaagcaggtggatcacctgaggtcaggagttcaagactggcctggacaacatggagaaaacccatctctactaaaagtacctcggccgccagcgc

SEQ ID NO: 11005 - DNA, 535 bp, Homo sapiens
  misc_feature 534, 535: n = A,T,C or G
tccaccgcggtggcagcggccgcccgggcaggtacgcggggacctcaagccatgggcctctgcgaaggcgccggcgtgcccacggctaagaaacttcctctttctgctcccgggaacgaaggctgtagcagagaaggccttcaagtttcgagacccagttccagccgcagccgagcactggtgaccttgaattaagtctaatgttgggattggaagacgcttcagacatccgctgccgccctgggcaagcgaccagctcaaggttaccccacagggacgtgctctggtcccacggtccagtgctcttttgtcggttagttttgtcatttgtaaaataggaacagtagatagtggtaggaaagtggttgtgaaaacttaatagaaagctaagcgccttggtcgggcgcagtggcatgtcacccctgcaattctatcactttgggaggctgaggcgggcggatcgtttgagcccaggaattcgaaaccagtctgggcaatatgaaaccccatctctgcaaataaagtacaaacaann

SEQ ID NO: 11006 - DNA, 9647 bp, Homo sapiens
gaagctgcgaagcgcttttggagcctgtgaatgaaccttcctcctttccctcctccttcttctggttgagtctcctcctcggctctgacggtacagtgatataatgatgatgggtgtcacaacccgcatttgaacttgcaggcgagctgccccgagcctttccggggaagaactccaggcgtgcggacgcaacagccgagaacattaggtgttgtggacaggagctgggaccaagatcttcggccagccccgcatcctcccgcatcttccagcaccgtcccgcaccctccgcatccttccccgggccaccacgcttcctatgtgacccgcctgggcaacgccgaacccagtcgcgcagcgctgcagtgaattttccccccaaactgcaataagccgccttccaaggccaagatgttcataaatataaagagcatcttatggatgtgttcaaccttaatagtaacccatgcgctacataaagtcaaagtgggaaaaagcccaccggtgaggggctccctctctggaaaagtcagcctaccttgtcatttttcaacgatgcctactttgccacccagttacaacaccagtgaatttctccgcatcaaatggtctaagattgaagtggacaaaaatggaaaagatttgaaagagactactgtccttgtggcccaaaatggaaatatcaagattggtcaggactacaaagggagagtgtctgtgcccacacatcccgaggctgtgggcgatgcctccctcactgtggtcaagctgctggcaagtgatgcgggtctttaccgctgtgacgtcatgtacgggattgaagacacacaacacacggtgtcactgactgtggatggggttgtgtttcactacagggcggcaaccagcaggtacacactgaattttgaggctgctcagaaggcttgtttggacgttggggcagtcatagcaactccagagcagctctttgctgcctatgaagatggatttgagcagtgtgacgcaggctggctggctgatcagactgtcagatatcccatccgggctcccagagtaggctgttatggagataagatgggaaaggcaggagtcaggacttatggattccgttctccccaggaaacttacgatgtgtattgttatgtggatcatctggatggtgatgtgttccacctcactgtccccagtaaattcaccttcgaggaggctgcaaaagagtgtgaaaaccaggatgccaggctggcaacagtgggggaactccaggcggcatggaggaacggctttgaccagtgcgattacgggtggctgtcggatgccagcgtgcgccaccctgtgactgtggccagggcccagtgtggaggtggtctacttggggtgagaaccctgtatcgttttgagaaccagacaggcttccctccccctgatagcagatttgatgcctactgctttaaacgtcgaatgagtgatttgagtgtaattggtcatccaatagattcagaatctaaagaagatgaaccttgtagtgaagaaacagatccagtgcatgatctaatggctgaaattttacctgaattccctgacataattgaaatagacctataccacagtgaagaaaatgaagaagaagaagaagagtgtgcaaatgctactgatgtgacaaccaccccatctgtgcagtacataaatgggaagcatctcgttaccactgtgcccaaggacccagaagctgcagaagctaggcgtggccagtttgaaagtgttgcaccttctcaaaatttctcggacagctctgaaagtgatactcatccatttgtaatagccaaaacggaattgtctactgctgtgcaacctaatgaatctacagaaacaactgagtctcttgaagttacatggaagcctgagacttaccctgaaacatcagaacatttttcaggtggtgagcctgatgttttccccacagtcccattccatgaggaatttgaaagtggaacagccagaaaaggggcagaatcagtcacagagagagatactgaagttggtcatcaggcacatgaacatactgaacctgtatctctgttctcctgaagagtcttcaggagagattgccattgaccaagaatctcagaaaatagcctttgcaagggctacagaagtaacatttggtgaagaggtagaaaaaagtacttctgtcacatacactcccactatagttccaagttctgcatcagcatatgtttcagaggaagaagcagttaccctaataggaaatccttggccagatgacctgttgtctaccaaagaaagctgggtagaagcaactcctagacaagttgtagagctctcagggagttcttcgattccaattacagaaggctctggagaagcagaagaagatgaagatacaatgttcaccatggtaactgatttatcacagagaaatactactgatacactcattactttagacactagcaggataatcacagaaagcttttttgaggttcctgcaaccaccatttatccagtttctgaacaaccttctgcaaaagtggtgcctaccaagtttgtaagtgaaacagacacttctgagtggatttccagtaccactgttgaggaaaagaaaaggaaggaggaggagggaactacaggtacggcttctacatttgaggtatattcatctacacagagatcggatcaattaattttaccctttgaattagaaagtccaaatgtagctacatctagtgattcaggtaccaggaaaagttttatgtccttgacaacaccaacacagtctgaaagggaaatgacagattctactcctgtctttacagaaacaaatacattagaaaatttgggggcacagaccactgagcacagcagtatccatcaacctggggttcaggaagggctgaccactctcccacgtagtcctgcctctgtctttatggagcagggctctggagaagctgctgccgacccagaaaccaccactgtttcttcattttcattaaacgtagagtatgcaattcaagccgaaaaggaagtagctggcactttgtctccgcatgtggaaactacattctccactgagccaacaggactggttttgagtacagtaatggacagagtagttgctgaaaatataacccaaacatccagggaaatagtgatttcagagcgattaggagaaccaaattatggggcagaaataaggggcttttccacaggttttcctttggaggaagatttcagtggcgactttagagaatactcaacagtgtctcatcccatagcaaaagaagaaacggtaatgatggaaggctctggagatgcagcatttagggacacccagacttcaccatctacagtacctacttcagttcacatcagtcacatatctgactcagaaggacccagtagcaccatggtcagcacttcagccttcccctgggaagagtttacatcctcagctgagggctcaggtgagcaactggtcacagtcagcagctctgttgttccagtgcttcccagtgctgtgcaaaagttttctggtacagcttcctccattatcgacgaaggattgggagaagtgggtactgtcaatgaaattgatagaagatccaccattttaccaacagcagaagtggaaggtacgaaagctccagtagagaaggaggaagtaaaggtcagtggcacagtttcaacaaactttccccaaactatagagccagccaaattatggtctaggcaagaagtcaaccctgtaagacaagaaattgaaagtgaaacaacatcagaggaacaaattcaagaagaaaagtcatttgaatcccctcaaaactctcctgcaacagaacaaacaatctttgattcacagacatttactgaaactgaactcaaaaccacagattattctgtactaacaacaaagaaaacttacagtgatgataaagaaatgaaggaggaagacacttctttagttaacatgtctactccagatccagatgcaaatggcttggaatcttacacaactctccctgaagctactgaaaagtcacattttttcttagctactgcattagtaactgaatctataccagctgaacatgtagtcacagattcaccaatcaaaaaggaagaaagtacaaaacattttccgaaaggcatgagaccaacaattcaagagtcagatactgagctcttattctctggactgggatcaggagaagaagttttacctactctaccaacagagtcagtgaattttactgaagtggaacaaatcaataacacattatatccccacacttctcaagtggaaagtacctcaagtgacaaaattgaagactttaacaggatggaaaatgtggcaaaagaagttggaccactcgtatctcaaacagacatctttgaaggtagtgggtcagtaaccagcacaacattaatagaaattttaagtgacactggagcagaaggacccacggtggcacctctccctttctccacggacatcggacatcctcaaaatcagactgtcaggtgggcagaagaaatccagactagtagaccacaaaccataactgaacaagactctaacaagaattcttcaacagcagaaattaacgaaacaacaacctcatctactgattttctggctagagcttatggttttgaaatggccaaagaatttgttacatcagcaccaaaaccatctgacttgtattatgaaccttctggagaaggatctggagaagtggatattgttgattcatttcacacttctgcaactactcaggcaaccagacaagaaagcagcaccacatttgtttctgatgggtccctggaaaaacatcctgaggtgccaagcgctaaagctgttactgctgatggattcccaacagtttcagtgatgctgcctcttcattcagagcagaacaaaagctcccctgatccaactagcacactgtcaaatacagtgtcatatgagaggtccacagacggtagtttccaagaccgtttcagggaattcgaggattccaccttaaaacctaacagaaaaaaacccactgaaaatattatcatagacctggacaaagaggacaaggatttaatattgacaattacagagagtaccatccttgaaattctacctgagctgacatcggataaaaatactatcatagatattgatcatactaaacctgtgtatgaagacattcttggaatgcaaacagatatagatacagaggtaccatcagaaccacatgacagtaatgatgaaagtaatgatgacagcactcaagttcaagagatctatgaggcagctgtcaacctttctttaactgaggaaacatttgagggctctgctgatgttctggctagctacactcaggcaacacatgatgaatcaatgacttatgaagatagaagccaactagatcacatgggctttcacttcacaactgggatccctgctcctagcacagaaacagaattagacgttttacttcccacggcaacatccctgccaattcctcgtaagtctgccacagttattccagagattgaaggaataaaagctgaagcaaaagccctggatgacatgtttgaatcaagcactttgtctgatggtcaagctattgcagaccaaagtgaaataataccaacattgggccaatttgaaaggactcaggaggagtatgaagacaaaaaacatgctggtccttcttttcagccagaattctcttcaggagctgaggaggcattagtagaccatactccctatctaagtattgctactacccaccttatggatcagagtgtaacagaggtgcctgatgtgatggaaggatccaatcccccatattacactgatacaacattagcagtttcaacatttgcgaagttgtcttctcagacaccatcatctcccctcactatctactcaggcagtgaagcctctggacacacagagatcccccagcccagtgctctgccaggaatagacgtcggctcatctgtaatgtccccacaggattcttttaaggaaattcatgtaaatattgaagcgactttcaaaccatcaagtgaggaataccttcacataactgagcctccctctttatctcctgacacaaaattagaaccttcagaagatgatggtaaacctgagttattagaagaaatggaagcttctcccacagaacttattgctgtggaaggaactgagattctccaagatttccaaaacaaaaccgatggtcaagtttctggagaagcaatcaagatgtttcccaccattaaaacacctgaggctggaactgttattacaactgccgatgaaattgaattagaaggtgctacacagtggccacactctacttctgcttctgccacctatggggtcgaggcaggtgtggtgccttggctaagtccacagacttctgagaggcccacgctttcttcttctccagaaataaaccctgaaactcaagcagctttaatcagagggcaggattccacgatagcagcatcagaacagcaagtggcagcgagaattcttgattccaatgatcaggcaacagtaaaccctgtggaatttaatactgaggttgcaacaccaccattttcccttctggagacttctaatgaaacagatttcctgattggcattaatgaagagtcagtggaaggcacggcaatctatttaccaggacctgatcgctgcaaaatgaacccgtgccttaacggaggcacctgttatcctactgaaacttcctacgtatgcacctgtgtgccaggatacagcggagaccagtgtgaacttgattttgatgaatgtcactctaatccctgtcgtaatggagccacttgtgttgatggttttaacacattcaggtgcctctgccttccaagttatgttggtgcactttgtgagcaagataccgagacatgtgactatggctggcacaaattccaagggcagtgctacaaatactttgcccatcgacgcacatgggatgcagctgaacgggaatgccgtctgcagggtgcccatctcacaagcatcctgtctcacgaagaacaaatgtttgttaatcgtgtgggccatgattatcagtggataggcctcaatgacaagatgtttgagcatgacttccgttggactgatggcagcacactgcaatacgagaattggagacccaaccagccagacagcttcttttctgctggagaagactgtgttgtaatcatttggcatgagaatggccagtggaatgatgttccctgcaattaccatctcacctatacgtgcaagaaaggaacagttgcttgcggccagccccctgttgtagaaaatgccaagacctttggaaagatgaaacctcgttatgaaatcaactccctgattagataccactgcaaagatggtttcattcaacgtcaccttccaactatccggtgcttaggaaatggaagatgggctatacctaaaattacctgcatgaacccatctgcataccaaaggacttattctatgaaatactttaaaaattcctcatcagcaaaggacaattcaataaatacatccaaacatgatcatcgttggagccggaggtggcaggagtcgaggcgctgatccctaaaatggcgaacatgtgttttcatcatttcagccaaagtcctaacttcctgtgcctttcctatcacctcgagaagtaattatcagttggtttggatttttggaccaccgttcagtcattttgggttgccgtgctcccaaaacattttaaatgaaagtattggcattcaaaaagacagcagacaaaatgaaagaaaatgagagcagaaagtaagcatttccagcctatctaatttctttagttttctatttgcctccagtgcagtccatttcctaatgtataccagcctactgtactatttaaaatgctcaatttcagcaccgatggccatgtaaataagatgatttaatgttgattttaatcctgtatataaaataaaaagtcacaatgagtttgggcatatttaatgatgattatggagccttagaggtctttaatcattggttcggctgcttttatgtagtttaggctggaaatggtttcacttgctctttgactgtcagcaagactgaagatggcttttcctggacagctagaaaacacaaaatcttgtaggtcattgcacctatctcagccataggtgcagtttgcttctacatgatgctaaaggctgcgaatgggatcctgatggaactaaggactccaatgtcgaactcttctttgctgcattcctttttcttcacttacaagaaaggcctgaatggaggacttttctgtaaccaggaacattttttaggggtcaaagtgctaataattaactcaaccaggtctactttttaatggctttcataacactaactcataaggttaccgatcaatgcatttcatacggatatagacctagggctctggagggtgggggattgttaaaacacatgcaaaaaaaaaaaaaaaaaagaaattttgtatatataaccattttaatcttttataaagttttgaatgttcatgtatgaatgctgcagctgtgaagcatacataaataaatgaagtaagccatactgatttaatttattggatgttattttccctaagacctgaaaatgaacatagtatgctagttatttttcagtgttagccttttactttcctcacacaatttggaatcatataatataggtactttgtccctgattaaataatgtgacggatagaatgcatcaagtgtttattatgaaaagagtggaaaagtatatagcttttagcaaaaggtgtttgcccattctaagaaatgagcgaatatatagaaatagtgtgggcatttcttcctgttaggtggagtgtatgtgttgacatttctccccatctcttcccactctgttttctccccattatttgaataaagtgactgctgaagatgactttgaatccttatccacttaatttaatgtttaaagaaaaacctgtaatggaaagtaagactccttccctaatttcagtttagagcaacttgaagaagagtagacaaaaaataaaatgcacatagaaaaagagaaaaagggcacaaagggattggcccaatattgattctttttttataaaacctcctttggcttagaaggaatgactctagctacaataatacacagtatgtttaagcaggttcccttggttgttgcattaaatgtaatccacctttaggtattttagagcacagaacaacactgtgttgatctagtaggtttctatttttcctttctctttacaatgcacataatactttcctgtatttatatcataacgtgtatagtgtaaaatgtgaatgactttttttgtgaatgaaaatctaaaatctttgtaactttttatatctgcttttgtttcaccaaagaaacctaaaatccttcttttactacacaaaacaacaaacaaacaggcgccgacaaaattccccaggcccattacggaccattctacaagcgcccaaaaaagaataaaaaacggccctaaacgtgtggaagcatggctgaagacctgggtaaggacacaaaccagaaatgc

SEQ ID NO: 11007 - DNA, 1274 bp, Homo sapiens
  misc_feature 1, 2, 3, 4, 1272, 1273, 1274: n = A,T,C or G
nnnnagttttagtgtacaccttagaggggaaattttttagggggttggagaactaaccaagttaggggaccagggcaagaggaattattttggggccattggttctgaaacatgttttggagcccaagcgggtttgcctttggaacaattccgaagacttggggggaaccccttgcccaaggcaatatgggccagtcctacaaccagtattctcagagatccatcagaggaccaacactattgttaattgcccaattgagtgcttcatgcctttagatgtacaggctgacagagaagattcccgagagtaaatcatctttccaatccagaggaacaagcatgtctctctgccaagatccatctaaactggagtgatgttagcagacccagcttagagttcttctttctttcttaagccctttgctctggaggaagttctccagcttcagctcaactcacagcttctccaagcatcaccctgggagtttcctgagggttttctcataaatgagggctgcacattgcctgttctgcttcgaagtattcaataccgctcagtattttaaatgaagtgattctaagatttggtttgggatcaataggaaagcatatgcagccaaccaagatgcaaatgttttgaaatgatatgaccaaaattttaagtaggaaagtcacccaaacacttctgctttcacttaagtgtctggcccgcaatactgtaggaacaagcatgatcttgttactgtgatattttaaatatccacagtactcactttttccaaatgatcctagtaattgcctagaaatatctttctcttacctgttatttatcaatttttcccagtatttttatacggaaaaaattgtattgaaaacacttagtatgcagttgataagaggaatttggtataattatggtgggtgattattttttatactgtatgtgccaaagctttactactgtggaaagacaactgttttaataaaagatttacattccacaacttgaagttcatctatttaaataagacaccttcgagggaaataattcctgtgaatattctttttcaattgagcaaacatttgaaaatctatgtgtgaaaaataatgtatttcaccactcttcctaaacctgaacaaaaaagaatgccctggtgggtggcctttttattgcccttaaaaaggttccaacaagcagtggccttcaaatttaattaaacgggttttttccacgcttctaaagggggtggcgcacccaaaaggtgttacccnnn

SEQ ID NO: 11008 - DNA, 2517 bp, Homo sapiens
  misc_feature 248, 1135, 1249, 1266, 1308, 1351: n = A,T,C or G
ctttgcaccggaacggaaaagaattaatcagggcgggaaccgggatccaaacctattagagtcgttatgggttggccaaccccaattagaagtcagtaaaaaaagccttctcttggaaatttgtagtgcaatgtcttattttgtaccattataagctgcattacaagtttgccccaccaatgccttcatttaattgtttcagttcaaggggaagttttggaagtttgttccttaacacagtcaaccgnccctgttcctgggacgtccggttgaccgcgcgtctgtgcaaaaaccattgtctgccgacggggcagagtttaatgacagcacccaggtgacagtgaaagaacgggtacactagcccagtgtggtggaccgtgtggccagcatgcctctgatcagctccacttgcgacatggtgtccgcagcctatgcctccaccaaggagagctacccgcacatcaagactgtctgcgacgcagcagagaagggagtgaggaccctcacggcggctgctgtcagcggggctcagccgatcctctccaagctggagccccagattgcatccgccacctggctccgcccaacagggggctcggacgagtcggaggagaaacctccccatcctgcagcagcccacgggagaagtgtcctggcggacaccaaggagccttgtgtcgtctaaggtgtcgggggcccaaagagatggtgtctagcgccaaggacacggtggccacccaattgtcgcagccggtggacgcgacccgcggtgctgtgcaagagcggcgtggacaagacaaagtccgtagtgaccggcggcgtccaatcggtcatgggctcccgcttgggccagatggtgctgagtggggtcgactcggtcctcggcgtcgtcggaagagtgggcggacaaccacctgccccttacggatgccgaactggcccgcatcgccacatccctggatggcttcgacgttgcgtccgtgcagcagcagcggcaggaacagagctacttcgtacgtctgggctccctgtcggagaagctgcggcagcacgcctatgaacactcgctgggcaagcttcgagccaccaagcagaaggcacaggatgctctgctgcagctgtcgcaggccctaancctgatggaaactgtcaagcaaagcgttgatcacaagctggtggaaacgccacgaaaaactgcaccacatgtggctcagctggaaacagaaacagctccacggccccgaaaaangagccgcccagccaaancaggtcgagtcccggcgctcccaagttccgggaacatgccanccactgccagccactgttcctcccgggggtcaacattcagggnccccccccaatttaaaggacaattgccacacggcccccgccacattgaagactccaagccccttttcctacatccctccttcccaaaaacgtcctccaacatccggcccaaaacctaaacttttctcaacccccccaaggccggaaaccttggggaatagttgcccaaaaaacctgttcttgctctggaaccttggccccgaatcccgaaaaaacccgaagaaaaaaattggggaaaaggaaaaaccccgggccctcccttaaaaactggtcctggaactcacccgggggccttacaaatttgttttctagcgacccctcccagctcttctgtgctgtccacttgggaagctaaggctctcaaaacgggcatcacccagttgacccatctctcagcctctctgagcttggaagaagcctgttctgagcctcaccctatcagtcagtagagagagatgtccagaaaaaatatctttcaggaaagttctcccctgcagaattttttttccttgttaaatatcaggaatataggccgggtgcggtggctcacacctgtaatcccagcactttgggaggctgaggcgggcggaacacctgaggtcaggtgttcgagaccagccaggccaacatggtgaaaccccgtctctactaaaaatacaaaaaaaaatgagccgggcatggtagcaggtgtctgttatcccagttaggaggctgaggcaagagaatctcttgaacctgagaggcggaggttgcagtgagccaagatcgcgccattgcactccagcctgggggacaagagtgagacttagtctcaaaaaaaaaaaaaaaagaaaaaaaaatcagggatatagttcatatcccacttctttgtttacaccgatgtccctgaatatcagcctgtagctaatggacttgggatttctggtctaagtgggcctcctggggatggggtggtacactgagcttctgagcctcattgtagagtagaaaggtactggggcctgtgtggtaagccttgttgaaatgctctggtattcagtattgccttaataaacttcacccacaactgcaaaaaaaaaaaaaaaagggcatattaatcttcttaggaaatagctccacaccttcctttaccttaacataagtattggcgtggtctgaaaacggttg

SEQ ID NO: 11009 - DNA, 274 bp, Homo sapiens
  misc_feature 273, 274: n = A,T,C or G
aaagatgctttaaaaatatattgttttagtccaaagatacccctggcacaagcgacaataatattacagggacattaaattaaggaaagaaccaactgatatgtgtctatgagagaagagcttcagggtgaggaactgggaacaaaggaggaagacactattagcaagcactggggccctcctttattgacgtgggggaaaagtctgagtcccccaatgtatattttctgaagcagaccttaaaaggaactgtgacggacatgtaatgtaaann

SEQ ID NO: 11010 - DNA, 4305 bp, Homo sapiens
  misc_feature 1, 2, 4278, 4279, 4280, 4281, 4282, 4283, 4284, 4285, 4286,4287, 4288, 4289, 4290, 4291, 4292, 4293, 4294, 4295, 4296,4297, 4298, 4299, 4300, 4301, 4302, 4303, 4304, 4305: n = A,T,C or G
nnagccagcgccgccgggtgcctcgagggcgcgaggccagcccgcctgcccagcccgggaccagcctccccgcgcagcctggcaggtctcctggaggcaaggcgaccttgcttgccctctattgcagaataacaaggggcttagccacaggagttgctggcaagtggaaagaagaacaaatgagtcaatcccgacgtgtcaatcccgacgatagagagctcggaggtgatccacaaatccaagcacccagagatcaattgggatccttggcagatggacatcagtgtcatttactaaccagcaggatggagacgacgcccttgaattctcagaagcagctatcagcgtgtgaagatggagaagattgtcaggaaaacggagttctacagaaggttgttcccaccccaggggacaaagtggagtccgggcaaatatccaatgggtactcagcagttccaagtcctggtgcgggagatgacacacggcactctatcccagcgaccaccaccaccctagtggctgagcttcatcaaggggaacgggagacctggggcaagaaggtggatttccttctctcagtgattggctatgctgtggacctgggcaatgtctggcgcttcccctacatatgttaccagaatggagggggggcattcctcctcccctacaccatcatggccatttttgggggaatcccgctcttttacatggagctcgcactgggacagtaccaccgaaatggatgcatttcaatatggaggaaaatctgcccgattttcaaagggattggttatgccatctgcatcattgccttttacattgcttcctactacaacaccatcatggcctgggcgctatactacctcatctcctccttcacggaccagctgccctggaccagctgcaagaactcctggaacactggcaactgcaccaattacttctccgaggacaacatcacctggaccctccattccacgtcccctgctgaagaattttacacgcgccacgtcctgcagatccaccggtctaaggggctccaggacctggggggcatcagctggcagctggccctctgcatcatgctgatcttcactgttatctacttcagcatctggaaaggcgtcaagacctctggcaaggtggtgtgggtgacagccaccttcccttatatcatcctttctgtcctgctggtgaggggtgccaccctccctggagcctggaggggtgttctcttctacttgaaacccaattggcagaaactcctggagacaggggtgtggatagatgcagccgctcagatcttcttctctcttggtccgggctttggggtcctgctggcttttgctagctacaacaagttcaacaacaactgctaccaagatgccctggtgaccagcgtggtgaactgcatgacgagcttcgtttcgggatttgtcatcttcacagtgctcggttacatggctgagatgaggaatgaagatgtgtctgaggtggccaaagacgcaggtcccagcctcctcttcatcacgtatgcagaagcgatagccaacatgccagcgtccactttctttgccatcatcttctttctgatgttaatcacgctgggcttggacagcacgtttgcaggcttggagggggtgatcacggctgtgctggatgagttcccacacgtctgggccaagcgccgggagcggttcgtgctcgccgtggtcatcacctgcttctttggatccctggtcaccctgacttttggaggggcctacgtggtgaagctgctggaggagtatgccacggggcccgcagtgctcactgtcgcgctgatcgaagcagtcgctgtgtcttggttctatggcatcactcagttctgcagggacgtgaaggaaatgctcggcttcagcccggggtggttctggaggatctgctgggtggccatcagccctctgtttctcctgttcatcatttgcagttttctgatgagcccgccacaactacgacttttccaatataattatccttactggagtatcatcttgggttactgcataggaacctcatctttcatttgcatccccacatatatagcttatcggttgatcatcactccagggacatttaaagagcgtattattaaaagtattaccccagaaacaccaacagaaattccttgtggggacatccgcttgaatgctgtgtaacacactcaccgagaggaaaaaggcttctccacaacctcctcctccagttctgatgaggcacgcctgccttctcccctccaagtgaatgagtttccagctaagcctgatgatggaagggccttctccacagggacacagtctggtgcccagactcaaggcctccagccacttatttccatggattcccctggacatattcccatggtagactgtgacacagctgagctggcctattttggacgtgtgaggatgtggatggaggtgatgaaaaccaccctatcatcagttaggattaggtttagaatcaagtctgtgaaagtctcctgtatcatttcttggtatgatcattggtatctgatatctgtttgcttctaaaggtttcactgttcatgaatacgtaaactgcgtaggagagaacagggatgctatctcgctagccatatattttctgagtagcatatataattttattgctggaatctactagaaccttctaatccatgtgctgctgtggcatcaggaaaggaagatgtaagaagctaaaatgaaaaatagtgtgtccatgcaagcttgtgagtctgtgtatattgttgtttcagtgtattcttatctctagtccaatattttgggcccattacaaatatatgaattccccaaatttttcttacagtaacaaattctaccaactcaattgtgtatggaggttattatttgaagggtacaatcactacaacatgctctgccacccactccttttccagtgacactacttgagccacacactttcctttacaggccagcctctggcgtttgctgcacctcattgccaccttcctgtctctctgtgctaaacattcaggacagtgttccacaggcagatctggcctatttcattagtcaccatggcttggctgcgaagcacgttggaaggtggatcttgtcacatgccccttcagtgttcacctggccctctggtttaagttctgtctgccttacgtgactgagtttgactgtccaggttgctttgctcggtgaagagaggagggtaaatcggattctcgtttagcactgggttatacagatctggcaccctaacctaaaccaaggcatcttcactccaagagcagttggagagtctgggttagccttacgtggacctcgccgctcgctggcggtcacgattgtgagccctccagataatttttaaggttgagtctaagtaaggctgcttgggaaatggtcagctaagtaaatcacctttcatttcacataaggcccttaatatagataagtaaatttggcctttggtgtctcgtgactctcagaggcgtaggtagaggagcaaattaatatttgcagcatgggaattccttatcagaattttgaggggaataaatcctcatcagagacaaaaggacttaatcatctggccacctatcacttcagttctctgtataaatgaaatttaattctaacaaccttataaaaagaaggtccagacagcagaggaaacatcctgtccaattctaggttttcctcccttggcctcctttccccagcattgtctaccctggcccacttcctgcattctccccatgccctgctatttctgattctttgcttctcctagcgagatactttccttatatgatagctgctgagaagtttcccagaactgctagaggaaaagaagtggggaatttaggaaatatccctcactgacctaactccattatcttcactctttccttcttcctgccacctcatgcccattctctttactgtctagcatgctgaaagaaggaagtgatctaaatgccagcgtgttcagtggtaaatattagttggtgcaaaagaaaaaccatgattacttttgcactaacctaatagctttgcaaattttaagaacttgctttatgaagatattcggatatggattctccccaccccacatacttagacattgttcaaatatactacttttaaaaaaacaccttttcaaacagaattagcgttttgccaagtctggtattaatggaattgtacaggagctttgaaagttttcaaactttattaaacnnnnnnnnnnnnnnnnnnnnnnnnnnnn

SEQ ID NO: 11011 - DNA, 5001 bp, Homo sapiens
ttttttttttttaaatttttttttttttttttttttttttttttttttttttttttttttttttttttttttttttttttttttttttttttttttttttttttttttttttttttttttttttttttttttgaatgtataggcacatttatttcaatcaagtcataatctgaacctaaaatgcaaagcaaaacattaacgtgcatttaatacgtatttcaagtctttgtaacagagaataaaaatcattacaaaattaaggtatgagacatcaagtcactaatgatagagttgattagacaatggcttccatgttccatctaacgacatggaacaatgtacatttgacaattcagccttaaagggttaagtagaataaactgcagccagctccttacactcaactgcctcagtaacaatgactcaaagaatagatattttccctatcaatgacaatatttcagtgctaacacttgcagtttaatattggataaaagctaaggagtggttcatcctgacagattataaaagataaaacttattggcttcaagaaggattaaacctgttagaattgggaccaatttttgtttatatactcaacagaaaaacaaatttctaattttaaatttctggcccacatactcaaaacaaatgacctatacctcatcaagctttcataaaaactgatggcattacacacaaaatccacctatttccctagcatgcccaatgaaacaaaaagaaggtacagaacacatgatgaaagtagaagagatatactcaggtttgtgctaaaatctaggccaaagaagcttcagatgcacacagagcaagaccagcaaagaatcttccacatatactctggttcataaaccatttgtttgggtttggggactttttattctaagtccagtagcctatacttcctaagaaatatgattaaaaacatacataacagtaaaaataataaaatagaattacttagctgaggtatttggatttatatttagaggatgacaaaatgatatttgacaaagtatatatctttacctcaaaaaggaagacatgttaatataatttattataaacttcaacccaatcagtcttaaatgtttttgactctatgactaagcgttaattatggacactgttaccctagaacaccacttgatagccctgcatgaattctgccaaaccaaagacatacctttttaaaataaaaataaagcaaccatttacacttactaagaaaaacaaaaatttacttcaaattgtagtataggcttttcaatcacaaaaagaaagaaaagaacagtgatctgacagtggtcacatcctgtgcaaaaaacttgatacaaaaatgatagcacatggtatctgagctgcttacattacaagaaaaaggaaatacagtagctgaaatatggcactcctgggaatcaacttctaaaccaaatagaatgcctttgaaatgattaaatttatttgtgtattagtaagaaagccccaccaccataaatagtacaatatttaaaaataaaaaaaaatatatctatctaagatagatagtgtatttgtactgttagacttctttaagtgcagaaggtggttcaggttttgcctttttaattaaataactgaccatatgctttataaagtttcactcaatcacaaaagccaatttaaatcaaggaatatgatatcaaagttgcataatttcatttgggactgccagcaggttaaagtcttaagtctttaacattaatgttcatttttagtcaatgaatagttaaaaagttctcaaatcttcatatcctcttgaacttgcccttctaaatgatcctcagactgcaattcctagtttgcaaataaaataatgcaatatgcatcatacttcaagaaaagatgatgatgtcgaactaacatgcttctggatcttttccctgctcctttcaaccttctttataatttctgccactatgcacactgatgaggtgagacccaaaagaaacaacagatccagtatgcttaggctctcagtctgaaaaaccttctgaagcggaggaaagtaaataactagtaattgtcccatgatggatccaagaactgcatagcaaaacattctattactgcagagtccaatctcaaacacagacttggtctgggatctggaacttagtgcattgaacatgtcaaaaaacacaaagcatgtgaaggtcattgttgtgtctcgaggtgtaatcacattgtctcgtagctcacgccagaagacaaacaaagtcccacaaacaatgattattgatgaaacaagtattttaagtatcaagtttttagtcaaaatgctgtctttccagttgcgaggaggtttacgaatgacatctttatccactggttctactccaaggctctgagctgggggtccatccataataatattgatccacaaaatctgcatggcattgagaggattaggaaagttcattaatgtagccaatgagattaaagttaatgctgctatactcgtgctcagctggaatctaacgaaatttttaatgttattataaatccctttaccctcttcgattgcagacattatggtttgaaaatcatcatccactaggatcatgtctgctgcctctttgcaaacatctgtaccagtctggcccatcgcaactccaatgtctgcagccttccgagcaactgcatcatttactccatctcctgtcatggctacaactgaaccgttcttctgtagcgacttaataattttcatcttgtgccttgggctagctctgtaaaatactgcaacctttggtactatttgtgaaagctgctgaacatccattgcatctatttcttctcctgagactgactgggaagttttggaatacaatcccagacgactggcgattgcaactgcagtctcctgtgaatctccagtaatcatttttattgatactcctgaggcaatgagtgttgtaacagcttctttcacaccagttctaggtggatcaatgattcccaccaagccaagaaatgtcagctgtcccagttcaggaccagaagccaaagcaagaactctgagtcccgctgagcccatgcgtgccttctcttgttggtacacatctctctgctgctgagtaagtgtcaaggtctgccctttgctctggtatgtagtacagtacttaattacttgttcgtaagcacctttcataaaacaaatctctggtctgtcctgctgtgttcggtgtacacacttaacagccatccacttttgctcagagctaaaagggtattcagcttttctgatgtagtcttgttgaagtccatcaagacccatcttcattgcaagagcaattaaggccccttctgttggcttccccattagagtattgtttctaattacagcatcattgcacacacagcccgcctcaacaattctgctaacagctgggttatagaatccatgaacaacatcaccatcaacaatcacttccccaaattgattatagccaactccagtaacctcagcatgcagaccatctgaagtaaatatgtgagtaacagtcatttcattcttcgtcagtgttccagttttatctgaacaaatcacattacagcagcccagagtttcaacaataggcagctttttcacaatggcccttttcttcaccattctcataacaccaagagctagcgtcactgtgaccacaatggggagaccttcaggaattgctgctacagccaaacttacactaatagtaaacatttccaggatatcttttcccagtaaccagccaaccaacatgatgattctcttctcttacctattataccaaaggagtaaaaggaaagttgttttcctaagaggtccatgctcttctgcagaggggtttttggtgcctcttctgcttgcatcattttaaaaacctccccaaattcagaattttctcctgttccaatgacaacaccctttgctttgccacatctgaccagtgttcccataaaggcaatgttacttctcgatgcaagatctccattagttgcagctggctgaggagctgtcaccttagaacaaggcgttgtctcacctgtcaagctggactcatcaatggaaagatccacagcctcaaacaagcgtaagtcagcaggaactctatccccaacagaaaggcaaactgtatcacctggaaccaagtctcgggcaagtgtatgctccaattttccttcacgcacacaatggcattctggtggcacaagtttactcaattcttcaagagatttttctgaacgatattcctgaacaaaggcaactgtaacaacgataagtattgccacagtgatactgacggcatcatcaaactgatgcattaaaacactgatgactgcagaagccagaagcagcataataaggggatttttaaactgagaaatatacttcttccacagtggctcatcttcactaatatcaaactcattccagccatgaaaggctcgcctatgactaacttcacatttgtttagaccattctgaagatcagcttggagaatgcttgcaacttcactgactggtaattcacttgctttttttgatgtcaatacaggaatcattgtctcattttcaccattaggtattttttgaaaacgtgcaacctgttcttcggctctttggtttctcagcgtcgataaatatctcctaattgcatggagaggatattttttgaaataagagaatctagatggaggcaacagactatccatagtgaggaaagcaagagggtccttgtctgcacctccttgtcagcaaccatatgaaattagaaacttagcaattcctcagatgcctaaagatttgtttgtagctcgaccacttccctcctacaaacaaagcaaatgttctccttgctgtttcctcttttgggtagagttcctggtgaaaccagacagccaagtatgaacactgtctagaagcgtccagaaatgcaatgcccacggacgcg

SEQ ID NO: 11012 - DNA, 3520 bp, Homo sapiens
  misc_feature 1, 2, 3, 4, 5, 6, 7, 8, 9, 10, 3519, 3520: n = A,T,C or G
nnnnnnnnnngtgctttgtgtgttttggcacggatcccggttttcttcccgcgccgccctttctgggtccaccgaggttttctcttcctagcctcccctgggtttcctgtgggccccccagtgggcccaccgcgggctcgccccggaagtggttgaacacgcttttttgctttttttttgtagcgatgcggtttcactatggtgtccaggctggtctgcaactcccgggctcaagcgatcctcccgccccgcctctcaaagtgctgggaaggtccttccaggcttaagcagcgataatggttttcaagttaaaaacaaaggtaaccaaggaaaaagttttctctgaataccgagataaattagggaaatcgccagagactgtggtgctgaggaaacactactgaattacaccacacagaccggagcgatgctggtccaaagggcaaccggacggcttaaaagcggggcgggggaacgcttagagcccgtagagggacacggaggcgctgggtgaagagtcagggatacgcaggcttcgaaaccccctcggccgctccacccagggggaaagtccagcgaaaggcggcagcagatcttagggagcaactcccggcgtcagagaggcggtactggcagccggttatggaagaatccggaaccaaggcactgggcgcggtgaggccgtgggcgcagagtccgagaatcaacagctgtcggctggcctccccgcgcccagagcgaaattaagggcatgcccccagcagctgactcagtcggcgtggcgcttcccccaacgtctgccgtgcccccgccgcgggaagtagtccccggccgcgccgactccaaaggaaaccgagggagggtgccccgagtcagcgcgtgggtcccggcagcggcgatcgcgcagccaatccctggaaaggagggcgtggctatatcggccccgtggatcccgccgcccacgcttgtggtgctgaggccgagggagtcgccattttggatggtgaaccctgaagtcggtgtctgctgcgttcacggcaggattcggttaggaggaacagcacagcatgctgggctctggatttaaagctgagcgcttaagagtgaatttgagattagtcataaatcgccttaaactattggagaaaaagaaaacggaactggcccagaaagcaaggaaggagattgctgactatctggctgctgggaaagatgaacgagctcggatccgtgtggagcacattatccgggaagactacctcgtggaggccatggagatcctggagctgtactgtgacctgctgctggctcggtttggccttatccagtctatgaaggaactagattctggtctggctgaatctgtgtctacattgatctgggctgctcctcgactccagtcagaagtggctgagttgaaaatagttgctgatcagctctgtgccaagtatagcaaggaatatggcaagctatgtaggaccaaccagattggaactgtgaatgacaggctaatgcacaagctgagtgtggaagccccacccaaaatcctggtggagagatacctgattgaaattgcaaagaattacaacgtaccctatgaacctgactctgtggtcatggcagaagctcctcctggggtagagacagatcttattgatgttggattcacagatgatgtgaagaaaggaggccctggaagaggagggagtggtggcttcacagcaccagttggtggacctgatggaacggtgccaatgcccatgcccatgccttcatctgcaaatacgcctttctcatatccactgccaaagggaccatcagatttcaatggactgccaatggggacttatcaggcctttcccaatattcatccacctcagataccagcaactcccccatcgtatgaatctgtagatgacattaatgctgataagaatatctcttctgcacagattgttggtcctggacccaagccagaagcctctgcaaagcttccttccagacctgcagataactatgacaactttgtcctaccagagttgccatctgtgccagacacactaccaactgcatctgctggtgccagcacctcagcatctgaagacattgactttgatgatctttcccggaggtttgaagagctgaaaaagaaaacataggtctcttaaaccaggcaactttcacgttttgggagttgagactgagcaatttctccttgtaacaaagaatctccatgaaattctgtttcatctgttaaccgtcactcagcacaacactccctctgggctctcttcctgctcctccagattctgctgctttccagttctctgttgatcctgagactaacaattggagactgaggccagagcaactggctcctggcagctgtgcttgtccgtttcctgtcagagtgatcccaggtttcctcctggcccgtcccatggtccctccacaggagtgtgagaggatgggggaagcactgtgggaagaccaccaaagatggctggacagtgggagagagcacgttgtgaagcatcccagcctcgtgttgaggttccagacttagaaacagacccctctgtacagggggattgtggtgagtgagaatcaaggccaccttgtgtgttttctcactctcgaatgcaagtgggagagggaaaatgactcgggacgccattgtaacggttcctggaagctgggccctctcattggcatatacagtactcctcgctgcagggcactgtcccaccgggatccagttgcaaagtttgtcttgacagttgaaggcctcgcttagttgtactggattctcagggagccctctgtggccttttgctttgcgtgctgtttcccttgtaccagagggcggcaccgtggaaattctgttttccctgtagcatattgtgttggattgcattactggcagagaaaggacaaggtgccattcaagtcctagggtgggcttccagctgccttaatagaagtactcaagtcttttgggtagtgagctggaaagcctacaggaaaagaggggtacctgttttcatttgaaaactttgattcatggaacctttaaaactaatctcagaaaaatttttggtgcccatgcagctgtagttgttcactgctttcctggatggatgggactcttatgtcataacttctgttactcctttggcccatagctaaggtcatccttccccacaggggtggctttgggattggatgatacagcttttgcttctgtgtagtatacctgtacatacttgtttcaggcagcctttctttaatgttttcagttggtttgtattctgtagctcagtagctgctaataaagttaaagatcctgaaaaaaaaaagacgggcgctaaatacccaagggccagtacctccttttgcaaggccaaggacgataaacagacgccggtaaccgaggacaggggcctggaccttggggtggcaccccaaagcgcaaagggtacctcttgtcacgaacaacacacccccagcatgcaagcnn

SEQ ID NO: 11013 - DNA, 2061 bp, Homo sapiens
  misc_feature 1, 2, 3, 1831, 1832, 1833, 1834, 1835, 1836, 1837, 1838,1839, 1840, 1841, 1842, 1843, 1844, 1845, 1846, 1847, 1848,1849, 1850, 1851, 1852, 1853, 1854, 1855, 1856, 1860, 2009,2039, 2040, 2041, 2042, 2043, 2044, 2045, 2046, 2047: n = A,T,C or G
  misc_feature 2048, 2049, 2050, 2051, 2052, 2053, 2054, 2055, 2056, 2057,2058, 2059, 2060, 2061: n = A,T,C or G
nnnctctctctctccctctctctctccctctctctctctccctgtgtcgcttaaacaacagtcctaacttttgtgtgttgcaaatataaaaggcaagccatgtgacagagggacagaagaacaaaagcatttggaagtaacaggacctctttctagctctcagaaaagtctgagaagaaaggagccctgcgttcccctaagctgtgcagcagatactgtgatgatggattgcaagtgcaaagagtaagacaaaactccagcacataaaggacaatgacaaccagaaagcttcagcccgatcctgccctttccttgaacgggactggatcctaggaggtgaagccatttccaattttttgtcctctgcctccctctgctgttcttctagagaagtttttccttacaacaatgagaaaacatgtactagctgcatccttttctatgctctccctgctggtgataatgggagatacagacagtaaaacggacagctcattcataatggactcggaccctcgacgctgcatgaggcaccactatgtggattctatcagtcacccattgtacaagtgtagctcaaagatggtgctcctggccaggtgcgaggggcactgcagccaggcgtcacgctccgagcctttggtgtcgttcagcactgtcctcaagcaacccttccgttcctcctgtcactgctgccggccccagacttccaagctgaaggcactgcggctgcgatgctcagggggcatgcgactcactgccacctaccggtacatcctctcctgtcactgcgaggaatgcaattcctgaggcccgctgctgtgtgtggcttctggatgggacaactgtagaggcagttcgaccagccagggaaagactggcaagaaaagagttaaggcaaaaaaggatgcaacaattctcccgggactctgcatattctagtaataaagactctacatgcttgttgacagagagagatactctgggaacttctttgcagttcccatctcctttctctggtacaatttcttttggttcattttcagattcaggcattttcccccttggctctcaatgctgtttgggtttccaacaattcagcattagtgggaaaaagtgggccctcatacacaagcgtgtcaggctgtcagtgtttggtgcacgctggggaagaatttactttggaaagtagaaaagcccagcttttcctgggacatcttctgttattgttgatgtttttttttaccttgtcattttggtctaaggttgccattgctgctaaaggttaccgatttcaaagtccagataccaagcatgtggatatgtttagctacgtttactcacagccagcgaactgacattaaaataactaacaaacagattcttttatgtgatgctggaactcttgacagctataattattattcagaaatgactttttgaaagtaaaagcagcataaagaatttgtcacaggaaggctgtctcagataaattatggtaaaattttgtaagggagcagacttttaaagacttgcacaaatacggatcctgcactgactctggaaaaggcatatatgtactagtggcatggagaatgcaccatactcatgcatgcaaattagacaaccaagtatgaatctatttgtgggtgtgctatagctttagccgtgtcacgggcatcattctctaatatccacttgtccatgtgaaacatgttgccaaaatggtggcctggcttgtcttctgaacgtttggttcaaatgtgttttggtcctggaggctcaaattttgagttattcccacgttttgaaataaaaagagtatatttgnnnnnnnnnnnnnnnnnnnnnnnnnngaanggggcggccgctgaatttttttttttttttttcgagatggagtctggctctgttgcccagggtggagtgcagtggcgcgatctcggctcactgcaagctccgcctccggggctcacaccattctcctgcttcagcctcctgagtaggantacaggcgcccgctgccacgcccggttaannnnnnnnnnnnnnnnnnnnnnn

SEQ ID NO: 11014 - DNA, 5030 bp, Homo sapiens
acccacgcgtccggtagggaggccgactgagcaggagtcgtccgcttatagtggaggctgctaggagccggtcagagggtgagtggggagcaggcgagcgagccacagcaggcaggagggagcgtcgcgcggcgcagaggagcgccggggcagggccgcggcggaaccacagccggagaggggcagcccgagccgggcgccgcagggtccccacccccacccggccggacagtgcccggtgttcccccgtgcggggggcggcggcggcggctgacgggaccgccgggaccgcgggggtgttgccacctccaccgaggagccggcgcggccgcgggctcctcagagccggggccccgggcccgtgacagacgggccgaggaagggagagaggcggcggcgacaccatgtcatctcccagtccgggcaagaggcggatggacacggacgtggtcaagctcatcgagagtaaacatgaggttacgatcctgggaggacttaatgaatttgtagtgaagttttatggaccacaaggaacaccatatgaaggcggagtatggaaagttagagtggacctacctgataaataccctttcaaatctccatctataggattcatgaataaaattttccatcccaacattgatgaagcgtcaggaactgtgtgtctagatgtaattaatcaaacttggacagctctctatgatcttaccaatatatttgagtccttcctgcctcagttattggcctatcctaaccccatagatcctctcaatggtgacgctgcagccatgtacctccaccgaccagaagaatacaagcagaaaattaaagagtacatccagaaatacgccacggaggaggcgctgaaagaacaggaagagggtaccggggacagctcatcggagagctctatgtctgacttttccgaagatgaggcccaggatatggagttgtagtagaaaaagcacctgcttttcagaaagactattatttcctaaccatgagaagcagactataatattcatatttaaacaaagcaattttttttattactaaacaaggtttttatgaataatagcattgatatatatatattatatatcaccctttagatcttgatttcttggtcatttctcaacctgaggtgcatagcatattcccacattccatttggtagcaatatgcggtctgaatgcatgcattcatgagtccatgtggccaagtcagcctgtgtgctactgaactgtcgaaggaaatagccgctctgataggtagatgtgagtaaaaagaacaggaaaaaattgcttcttttattggtttccaaagaaacaaaccaaaccaaccagctcttggatgtgaagataaaatagtgcttttttgaaatggagaggaaaaacttggggaggaagaggcctgctgtgggggcatcggagccagccatgtaagaatcagagctgctccttcctgtgaatcctaggtggccctatgtcttctgtggagttacagtataaagcagggagctaattaagagtattaaaacttaaaaccattttttgactctgattttaagtacatttttatatgtcagttgctgcccttcacactaccaggccctgcagccacagtgttctgttggagaaacttggggaagtgttttctgaaccagttctttttcttggggtagagcgtgaaatccagacctgtttttgaaaggacagcacaggaggagaaaagtgactgggacgatgcttcctctcatccaaaacacatgcagagtcacatcctcatcctagtgtttggcagtttgagaccgctaccctgaacttaagagctttaaatatgagggttgtgtttctgggggggttatttttttggtgtgtgtgtgtgtgtattgtgcttagaaaggttgcagatttcatcttcacctaccaagaggcggccgcctccttggacaagccgctcatggaccattagacttgagaagacgacccacgtggtgactgcaaagccctgggtacttgccttcatgttctggtttggttttccctttttctgctgctcttggcagcagcctggtcatcatctgcttgtgggagtgggaaatgggtattttagacccaacacaggttctaaatttaaaacaaataataattggaacaaataaaggttcttgtacccagagtgattctacatgggaaaaacaaaccagcttttttcagagagtgaccgaataggaagaagggattcagaaatatgatgtagtagaacatgccctgcaggaagaaaatgttttctctcctgcgtatgttaagaggaaatcagtttaaaatgcctgctaatcaaatgtcgactcagctaaccatatgtccaggttgctgcagagtttctttcaaatctgagtgttgcctgctgaactcggaggggagtttggagaaattttagacagcagctctgtgttctttttttgccgcagccaataagataatagcagaattagccaatcctaaaaccttctaaagacgatttttgagcatcccactgggattatttaatttttctttttgacgtgtgtttttagtttagaagtgctgtattccacaaggtttaagtcagtgaggttggaagataccctatcttttttattcaaaaagcacaatcaatcttttgtttgaaaatctatataaagtacaacttgcttttagcatgattattttcctaaataaaaagacaaagaatttacttactttatgttaattacgggcatgaagcaaaaggttttctttaaaaaaaaaaaaaagtgcagtgatgtagggctgtggttagttaaccgtactgagttatccatctagcatctgtggcttgctggaagggtagtattaactatttaacatgtaatggtgtacttcactcttacctagcacgctgtcttctcattgctttgggggagggagggtctctctgctggcactgtctaacttgcttacctgctgactttgcagtttgcttgtgctatgacatttattgtaggtgctatttagggtaggcttaaagtgctgggtggtgatttgagttcaaacaataaaaaattgtattttttcaatattgtataaacaatagtgttctaattaccttaaaaaaaaaataatgaccagttaagaattgcttttgatcttgtcaaaaaactgaatagaccccagtttcgggaaggtgtgtgagcagtgccatgactctgccccttacctaatcccacatctctctaatgataagacattggctcgcctctgaccagagccccagcaccagagagcggaagatgcagaattgtcaaatgacctgctgggggaggttgtaggagtttagcagatttgagtgtggctgcagagagagagagagtgtgtgtatgtgtgcacatgtgtgagagtgtgagcgagagtgtgtgtgtgtccatctaagtctgtgtgatgaaggtgggataaggctcctctgttagtgctggaagctcctgtaattgccgcatggatcccactgtgccctcttgttctgtgcaagtctgtcctgtctgggcactaaccttggtcccatgcatgtttatgttctgggtggggctttgcctctccactgggaaactgacttttgctgggttgaacagagtcccttatgctttttgtcctctccctgcgcctgggagaggtgggagtaggagcccaaacacacaggtacagaaagatctggaagaaggcctggcagtgaatccaaggactctgggcccccaacaatagatggtagcgtaagtctggagcagcggtgttttcaccaccaaatgcctttccaggctgcccttccaacactcaggagagcatccagatccctgggcagaggctctacattcttggctttagaggtggtggcagcggcagcaggtcagagccacttctggcggtttccctcccctttttagtgcccatagtttttggatcctcccttgagttttaccagcacaagccattctttgcccctgttcacataactgagctcaagctcttgccaaacaccaacaagcaagatggttgcaacctggcaacattgaatccaccacccttgggctccctctggaagccccagcaccggggggcttttgggcacagggtcagtggtagccatcttagacactgacatttggctttgtcgtcaatttcatcaccctccttgaggttactgtgcagtttcaaccagcattttatcctagtgaggtcattatcaggagttgccatatcatctctccagtacctaacatttctcatccacttcaaaagctgttctgactgccagctggctgatctaagctcctgaggaatgtctcctctcaaaggaatttttccctccaaaggccccctgaagtcctagttggcattggcctggcacatgctttatgttaggcctcccgttgggatggctgagaatcatgaaagacagatcctccgctagcctctgtgggtcaagtttctggacaccaagtctctgggaactagtgtttgattttaaatggcatgtggcccttccttgtttcagtgacttagaaaagtaaaagccatttaaaaaagttagcaagattttttatcgacttcccaactggggctttccagccttgtttgaatggaaatcatctattcttctggatttggggcgcaacgaactgcatttctttggacttctgaatccatgtttgtgctttctctggcccgtgaacacctcggcgattctgttagggatgggatgagtgggaggaagccctttgagaagggggagccggccctgtcatgcgcaggttttccactcatctgaggaagagccagggctctgaattatcgcctatttttcctcgccctgtctcctcccttccacctttctccttgcattgtgatgatctagtaggcacgtctgtcaacaggacacatgcctcctctgactataacctcttaatagttgtgtataatgaaaactgtaaacttttttaaataaacgtgtatata

SEQ ID NO: 11015 - DNA, 387 bp, Homo sapiens
ccgggcaggtacgagaagaagggggctggaacaaataagttacggctgattttactctgcaaaatatataaggggttttcaaattaataaccattcagggtccccaaacagcctaatctttgtcaattggtgccaaattatgcaaggtgctgccaattctggttgtctaacaaatcaagaccagtgtatgttactcctcggctgaagcctgattgattctggtcattatatgggctgatctcattttcacacatggaatcaatatgtgagccagatgttcatttacagagaagcacagaaacgactcatctacacgcaactttatcccggaccacagagcaccacagacccaaagtctctcgtcacccatacaaagcttcacacagt

SEQ ID NO: 11016 - DNA, 1795 bp, Homo sapiens
  misc_feature 1, 2, 56, 57, 58, 59, 60, 61, 62, 63, 64, 65, 66, 67, 68,69, 70, 71, 72, 73, 74, 75, 1794, 1795: n = A,T,C or G
nnctgtttcctgtgtgtaaaacgacggccagatgtcttcgccatacggtcttcccnnnnnnnnnnnnnnnnnnnntttttttttttttggtctgaaaggtaagtaccattttatttagtgttgtaggaaatgttgggttacttcttaaaaacgaaaccaaagaaattcaaaagtcccaaagaaagaaagcaggaaataataattctataatccaaaaacgttgggcgatccttcagttggaggaagagggcgtcagttaagtagctcacacagtagatatggagacaccatatggagatacggagttaagtttggtggatactaggaattaagttctccacctaaggcaattaatttttcagccttgagagataattagtagttctagaaaaagaaaaaaagttgactgggagaagggtgggagggaggatggtgcgtcatttaacattaaattgcctctctctacagtatgtggctgagcatcatggaccttcctccctctgccccgttgagctcccactgttagcaaaactgagaagcacatgcctgtgtcttcttcataccggcatgtgcacacacacctgtatctccttcatacaggcatatgcagagccctcaccaatcggggtccacagctgttcagtatggcaaagggcagacttactccttcatccactctgctgccttgatgaggtgaacacactggaataagatggagggcaggatacctgccaaagcctgaggaatgagatgatctgaaacaattgggcaaaggctggacatttcaaaaagctgacttccaactgcagtttatgggtatagaatttgatgcttccctcaagtcctgactgctctttctgaggcagccaggctaggccaagaaatgagctgctccagcttctccagagcacagcagcctcccagggcctgtcagcatctgcagcagctggaaggaggtcccagctcttctgagacataggccatttgtaggattctccagtgctccaattcactaatgtctcctaatggctcagaacaggctaaagcttctcccagataacccctcccccaaaactgagtcctcagggacagttgttaactgaatgacctccaggttatctactttgggaggtgcaggaatgctataaactgaattttttcccagcagcagcagaagccaggcacccttgagtcaattgtccttcattgtccagagctaccaagtggcatttcagagcacaggaatttactcctccacccagatgtccctctcatatggactgagtcacacaccccaggtcctagcagcagacatctccaaaccaacatccttgtgaacactgcagatctctacgccagctctccaatggaagaagaaccacatagagcacacctgccccccagggcacttggactatcacagtaaaaatacatttatatcaagtaaaaaacataatgcaggacaaatatatacatgtaccttttctttctttcttttttttgagacagagtctcgcccgttgcccaggctggagtgcaatgatgtgatctcagctcactgcaacctccacctccctggctcaagcgattcttgtgcctcagcctcccgagcagctgagattacagctgtctgccaccacacccagctaatttctgtattttttagtagagacggggttttgccatgttggccaggctggtctcgaactcctgacctcaatcaagtgattcacccgcctcagcctcccaaagtgctgggattacaggcgtgagccaccgcgtccagccatacann

SEQ ID NO: 11017 - DNA, 1481 bp, Homo sapiens
  misc_feature 1469, 1470, 1471, 1472, 1473, 1474, 1475, 1476, 1477, 1478,1479, 1480, 1481: n = A,T,C or G
ctatagggagtcgacccacgcgtccgcgctggcaagatggcgggaggggtgcgcccgctgaggggcctccgcgccttgtgtcgcgtgctgctcttcctctcgcagttctgcattctgtcgggcggtgagcaatcgcaggcgctggctcagtcaataaaggatccgggcccaacacgcacattcacagtagttcccagggcagcagaaagtactgaaatcccaccttatgtgatgaagtgtccgagcaatggtttgtgtagcaggcttcctgcagactgtatagactgcacaacaaatttctcctgtacctatgggaagcctgtcacttttgactgtgcagtgaaaccatctgttacctgtgttgatcaagacttcaaatcccaaaagaacttcatcattaacatgacttgcagattttgctggcagcttcctgaaacagattacgagtgtaccaactccaccagctgcatgacggtgtcctgtcctcggcagcgctaccctgccaactgcacggtgcgggaccacgtccactgcttgggtaaccgtacttttcccaaaatgctatattgcaattggactggaggctataagtggtctacggctctggctctaagcatcaccctcggtgggtttggagcagaccgtttctacctgggccagtggcgggaaggcctcggcaagctcttcagcttcggtggcctgggaatatggacgctgatagacgtcctgctcattggagttggctatgttggaccagcagatggctctttgtacatttagctgtggtgtgtgcttcagaaaggagcagggcttagaaaaagcccttttgtccgtaggagttgatgtggtgtgagtgatatatttctatgtttttaatgtacagcatctgtactttgtttgccttgataaaggtaagataaatgaaacgctgaactatgctaatctggaatttgtttttatttgcctgaaatatatttttttctgtgaaaaaattaaaacgtacttaagccaggagaatgaattatacagtgattgaaaatccatttaattcctatgacttttgttttgtattgcccaagtcaaactacatcacttgtatctccagcccaaatgtagtctgccttgaaaagtctttcagctgtgactgcaggaagtgggagtgtttttattgttagctaattgctgtgactgcaggaagtgggagtgtttctgttgttggctaattgaagttattaggctcagcttcagtcatgtgtaagttttgcagtgtaatacatatgtagtctggtctgtatatatgaaaatttgaattaaactgcagaatgtttatgtctagttatggtttaaattttcttagtagtatataaaaggtaagagtactgaaaaattaataaaattgcaagttaagaaaaaaaaaaaaaaaaaaaaaaaaaaaaaaaaaaaaaaaaaaaacccggggggacccccannnnnnnnnnnnn

SEQ ID NO: 11018 - DNA, 874 bp, Homo sapiens
  misc_feature 846, 847, 848, 849, 850, 851, 852, 853, 854, 855, 856, 857,858, 859, 860, 861, 862, 863, 864, 865, 866, 867, 868, 869,870, 871, 872, 873, 874: n = A,T,C or G
acgatttttaaaatctagcacatttaaaacactgttagttcaacttccttatttttggagaattttaggaatactcaatttacatatctgtataaatcaggacagagctcctttaagagactttataatctaatttatcaataccccccaaatacaggagaacattatacacaaaattagatataggcctttgttaattatagacacatacttgcaaagacacatagagagcttagtaaatagtttcagttctgcaatttgagccaaaaaccaggagatacagacatagccgacaccagctcggtcatggagtccctaacccaggagcactagaggaattaaagacacacacacagaaatatagagtgtggagtggtgaatcagggggctgacagccttcagagctgagagccaggaacagagatttacccacatatttattgacagcaagccagtgataagcatcgtttctatagattatagattaactaaaatgggaaacaaagggatgggctgaaacaaagggatgggctctggctagttatctgtagcaggagcatgtccttaaggcacagatgcctcatgctattgtttgtggttcaggaacgccttaagttattttctgccctgggtgggtcaggtgttccttgccctcattctaataaacccacaactttcagtgtggacatcatggccatcacgaacatgtcgcagtgctgcagagattttgtttatggccagatttgggggcctgttccccaacagacatagaaaatgctgaatagtccagatatcaaagatctgttttttccagtgaactaaaaattcttaacttattggagccannnnnnnnnnnnnnnnnnnnnnnnnnnnn

SEQ ID NO: 11019 - DNA, 418 bp, Homo sapiens
cccgggcaggtactgagtcaaggacgtctttaacgtcatggacggctcctttacccacgctttctagatcttcgactgcatcttttcctagttttccgagtccccccacagctttttttgctccgtctaggcctttttccagaaggctggatctctgcttcctcggctttggtgcctgtctggctaaccctgggtcttcacctgcattttccttttgagctgctgatgcttcatggcaagggttccccgatcctggggcagaggcggcctctggatcataggcacagaccagggctcctgccagagctgtcaggaagaggagagtcatgaacctcatgcttctgtgtgctggagtgggtatgccaccaaatcccctagatcttgggatctagggtccccgcgtacctcggccgctcta

SEQ ID NO: 11020 - DNA, 854 bp, Homo sapiens
  misc_feature 854: n = A,T,C or G
gcgtccgcccacgcgtccggtcatctataaaaatactcacattaagacagtagcaattccagccttgagctccgcggacgcgtgggtctgaatttgtgtacaaagactattgtagagactatccgggttagtttgcaagggaagccaatgatgagtaatttgaaagaaattcacctggtgagcaatgaggaccctactgttgctgcctttaaagctgcttcagaattcatcctagggaagagtgagctgggacaagaaaccaccccttctttcaatgcaatggtcgtgaacaacctgaccctccagattgtccagggccacattgaatggcagacggcagatgtaattgttaattctgtaaacccacatgatattacagttggacctgtggcaaagtcaattctacaacaagcaggagttgaaatgaaatcggaatttcttgccacaaaggctaaacagtttcaacggtcccagttggtactggtcacaaaaggatttaacttgttctgtaaatatatataccatgtactgtggcattcagaatttcctaaacctcagatattaaaacatgcaatgaaggagtgtttggaaaaatgcattgagcaaaatataacttccatttcctttcctgcccttgggactggaaacatggaaataaagaaggaaacagcagcagagatttttgtttgatgaagttttaacatttgccaaagaccatgtaaaacaccagttaactgtaaaatttgtgatctttccaacagatttggagatatataaggctttcagttctgaaatggcaaagaggtccaagatgctgagtttgaacaattacagtgtcccccagtcaaccagan

SEQ ID NO: 11021 - DNA, 722 bp, Homo sapiens
  misc_feature 601, 602, 722: n = A,T,C or G
agggagtcgacccacgcgtccacagtgagatctgtcactttctcctggatcatggagcagatgtcaattccaggaacaaaagtggaagaactgctctcatgctggcctgtgagattggcaactctaacgctgtggaagccttaattaaaaagggtgcagacctaaaccttgtagattctcttggatacaatgccttacattattccaaactctcagaaaatgcaggaattcaaagccttctattatcaaaaatctctcaggatgctgatttaaagaccccaacaaaaccaaagcagttgagtgatgtctcttccccaagatcaataacttcgactccactatcgggaaaggaatcggcattttttgctgaaccacccttcaaggctgagatcagttctatacgagaaaacaaagacagactaagtgacagtactacaggtgctgatagcttattggatataagttctgaagctgaccaacaagatcttctctctctattgcaagcaaaagttgcttcccttaccttacacaataaggagttacaagataaattacaggccaaatcacccaaggaggcggaagcagacctaagctttgactnngaccattccacccaaactgacttgggcccatccctgggaaaacctggtgaaacctcttccccagactccaaatcatctccatctgtcttaatacattctttaggtaaatccactactgan

SEQ ID NO: 11022 - DNA, 785 bp, Homo sapiens
  misc_feature 1, 2, 757, 758, 759, 760, 761, 762, 763, 764, 765, 766, 767,768, 769, 770, 771, 772, 773, 774, 775, 776, 777, 778, 779,780, 781, 782, 783, 784, 785: n = A,T,C or G
nnctaatttaaggctggacacagagtcagcaacacacaagacatcatcttgaaggaaggatggctttggccagaccaagaccgagacttggagacctgattgagatttctcgctttggctatgcacactgggccgtctacgtgggagatggctatgtggtccatctggctccggcaagtgaaattgctggagctggtgcggccagtgtcctgtctgccctgaccaacaaagccatagtgaagaaggaactgctgtctgtggtggctgggggagacaactacagggtcaataacaagcacgatgacagatacacaccactgccttccaacaaaatcgtcaagcgggcagaggagttggtggggcaggagttgccttattcgctgaccagtgacaactgcgagcacttcgtgaaccatctgcgctatggcgtctcccgcagtgaccaggtcactggtgcagtcacgacagtaggtgtggcagcaggcctgctggctgccgcaagccttgtggggatcctgctggccagaagcaagcgggaaaggcaataaatccaagaaattgtcccaacaaccaccaattcttacggaggaatattatttagccagcaggagtggagtttggtttactgattttactgttttgtgttcatgaatctttattttaatggagttaaaagcacaggaaaatgtatttggaaatgcagcttagtatgaattctattaaagacacaattgggctctgctaagaaaaaaaaaannnnnnnnnnnnnnnnnnnnnnnnnnnnn

SEQ ID NO: 11023 - DNA, 2766 bp, Homo sapiens
  misc_feature 1, 2739, 2740, 2741, 2742, 2743, 2744, 2745, 2746, 2747,2748, 2749, 2750, 2751, 2752, 2753, 2754, 2755, 2756, 2757,2758, 2759, 2760, 2761, 2762, 2763, 2764, 2765, 2766: n = A,T,C or G
naagctctcctgtttgacgaaagtatgtctcaggaaggtgcggtcccagctagcgcggttcccctggaagaattaagtagctggccagaggagctatgccgccgggaactgccgtccgtcctgccccgactcctctcattgtctcaacattctgaaagttggattgagcatattcactgtgaaattattcgatgacatgatgtatgaattaaccagtcaagccagaggactgtcaagccaaaatttggaaatccagaccactctaaggaatattttacaaacaatggtgcagctcttaggagctctcacaggatgtgttcagcatatctgtgccacacaggaatccatcattttggaaaatattcagagtctcccctcctcagtccttcatataattaaaagcacatttgtgcattgtaagtttcagaccttctccaggctcttttcaaggaggcctattctcttcaaaagcagttaatggaactgctggacatggtttgcatggaccctttagtagatgacaatgatgatattttgaatatggtaatagttattcattctttattggatatctgctctgttatttccagtatggaccatgcatttcatgccaatacttggaagtttataattaagcagagccttaagcaccagtccataataaaaagccagttgaaacacaaagatataattactagcttgtgtgaagacattcttttctccttccattcttgtttacagttagctgagcagatgacacagtcagatgcacaggataatgctgactacagattatttcagaaaacactcaaattgtgtcgtttttttgccaactcccttttgcactacgctaaggaatttcttcctttcctctctgattcttgctgtactttgcaccaactgtatcttcagatacacagcaagtttcctccaagcctttatgctaccaggatttctaaagcacaccaagaggaaatagcaggtgctttcctagtgacactggatccacttatcagtcagctgctcacatttcagcctttcatgcaggtggttttggacagtaaattagacctgccatgtgaactgcagtttccacaatgtcttcttctggttgttgtcatggataagctgccatctcagcctaaggaagtgcaaaccctgtggtgcacagacagccaggtctcagaaacgacaaccaggatatctctactcaaagccgttttctacagttttgagcagtgttctggtgaactctctctacctgttcatttacagggattaaagagtaaggggaaagctgaggtggctgtcaccttgtatcagcatgtttgtgttcatctgtgtacatttattacttcctttcatccctcactgtttgctgaactggatgctgctctgctgaatgctgtacttagtgctaatatgatcacctctttgttagctatggatgcatggtgcttccttgctcgatatgggactgctgaactgtgtgcacaccatgtcaccatagtggctcatctgataaagtcatgccctggagaatgttatcaactcatcaacctatcaatactgttgaagcgtctctttttcttcatggcaccaccccatcagctggagtttatccagaaattttccccaaaagaagcagaaaatctgcctctgtggcaacatatttccttccaggcgttacctcctgagcttagggaacaaactgtccatgaggtcaccacagtaggcactgcagaatgcaggaaatggctgagcaggagtcgtactttgggagaactagaatctctgaacacagtactgtctgctttgcttgcagtatgtaattctgctggtgaagctttggatacaggaaaacaaactgcaattatcgaagttgtgagtcagctttgggcttttttaaacattaaacaggtagcagatcaaccttatgttcaacagacattcagccttttacttccactgttgggatttttcattcaaactctagatcctaaactgatacttcaggcagtaactttgcagacctcgctacttaaattagagcttcctgactatgttcgtttggcaatgttggattttgtatcttctttaggaaaactttttatacctgaagctatccaggacagaattctgcccaacctgtcctgtatgtttgccttactgctagctgacaggagttggctgctagaacaacataccttggaggcgtttactcagttcgctgagggaacaaatcatgaagagatagttccacagtgtctcagttctgaagaaactaagaacaaagttgtatcctttctggagaagactgggtttgtagatgaaactgaagctgccaaagtggaacgtgtgaaacaggaaaaaggtattttctgggaaccctttgctaatgtgactgtagaagaagcaaagaggtcatctttacagccttatgcaaaaagagctcgtcaggagttcccctgggaagaagagtacaggtcagcgctgcatacaatagcaggggctttggaagcaactgagtcactactccaaaagggtcctgctccagcctggctttcaatggaaatggaggcgctccaagaaaggatggataagctaaaacgttacatacatactctagggtgaaacttatcactaggcagaactgggtttgatgctttgtcaactgaaaatacttatgtctgtacattttctaacagatataaaacaaattttgtaaagttaaaaaannnnnnnnnnnnnnnnnnnnnnnnnnnn

SEQ ID NO: 11024 - DNA, 624 bp, Homo sapiens
acgcgggattccaccaaagtgattctaaatccctaccacgtttttaaagttttcttttaagcttgttaagaaatagtaagagaaggggcttccttttcgatccgccatctgcggtggagccgccaccaaaatgcagatttccataaaaacccttacggggaagaccatcaccctcaaggttgaacccttggatatgatagaaaatgtaaaggccaagatccaggataaggaaggaattcctcctgatcagcaaagactgatctttgctggcaagcagctggaagatggatgtactgtctgactacaacattcaaaaggagcttactcttcatcttgtgttgagacttcgtggtggtgctaagaaaaggaaggagtcttaccccactcccaagaagaataagcgcaagagaaagaaggggaagctggctgtcctgaagtattagaaggtggatgagaatgacaaaatgagctgccttcgtcgagagtgcccttctgatgaatgtggtgctggagtgtttatggcaagtcactttgacagacattattgtggcaaatgttgtctgactactgcttcaacaaaccagaagacaagtaactgcgtatgagttaataaaagacatgaac

SEQ ID NO: 11025 - DNA, 402 bp, Homo sapiens
  misc_feature 401, 402: n = A,T,C or G
agaagacaagccgaggtgctggtgaccctgggggtctgagtggatgattggggctgctgcgctcagaggcctgcctccctgccttccaatgcatataaccccacaccccagccaatgaagacgagaggcagcgtgaacaaagtcatttagaaagcccccgaggaagtgtaaacaaaagagaaagcatgaatggagtgcctgagagacaagtgtgtcctgtacttttttcttttttttttttagtagattaatgaatgactcactttacttacttgaaatattaggaactgagttaaaggcaactccttacagatggagttcttgttgttataactggagtgcagtggttgtttacaggcgtgatcatagtggactgcagcctcaaagctctgggctgatgnn

SEQ ID NO: 11026 - DNA, 1371 bp, Homo sapiens
agacaaatgttcattgtgactcacagaattgatttcatgcctcactaatgggtctcacatataccatgaaaaatactgatatagagacattttgtgcctttgctgtgttggtaccttgagtatgtctgcttgatgatgaaagagactggctgatctgctagactgttgacttgtataagaacatcttgaagtggtgggaatttatcttagattttcattcctggatcatttttatggtctgatccagtgaggagccaatgaggttttccatggctaggtcaaatatcaggttggagttgatggtatatttttatagaactttcctggaatgcatccttgaccttccctcaattcatacggggggcaaaaccagactgtatttcccgcaacgaaccctggaatgcttcgctttagcggactccggtccactcccatcagaggatgcccttctttcgcctcacctccagcccagccgcagcgacccggccgggcccagcgctctccaacgccagcgccgcctctcgctcgccgagctccagccgaaggagaaggggggtaagtaaggaggtctctgtaccatggctcgtacaaagcagactgcccgcaaatcgaccggtggtaaagcacccaggaagcaactggctacaaaagccgctcgcaagagtgcgccctctactggaggggtgaagaaacctcatcgttacaggcctggtactgtggcgctccgtgaaattagacgttatcagaagtccactgaacttctgattcgcaaacttcccttccagcgtctggtgcgagaaattgctcaggactttaaaacagatctgcgcttccagagcgcagctatcggtgctttgcaggaggcaagtgaggcctatctggttggcctttttgaagacaccaacctgtgtgctatccatgccaaacgtgtaacaattatgccaaaagacatccagctagcacgccgcatacgtggagaacgtgcttaagaatccactatgatgggaaacatttcattctcaaaaaaaaaaaaaaaaatttctcttcttcctgttattggtagttctgaacgttagatattttttttccatggggtcaaaaggtacctaagtatatgattgcgagtggaaaaataggggacagaaatcaggtattggcagtttttccattttcatttgtgtgtgaatttttaatataaatgcggagacgtatcgagcggccgcccgggcaggtactacagacctccacatgttggacagtaggattcagcagagaatgagtcccacatcctcttttcatccataagccactcttcccaactactcttccgccttccattgtccctatgtctactttactgcttaatctgga

SEQ ID NO: 11027 - DNA, 557 bp, Homo sapiens
  misc_feature 550, 551, 552, 553, 554, 555, 556, 557: n = A,T,C or G
acatgctacaccacttctccagacttgacctctatcaaagggcatttgggtatggcccgagatgggagtaacctctcttttcagctgtgtcaaattcttacaccatgttcttttgttttttcctcataatacaaggccaagcacatctgcaaaaaagacattgctggaggaggtgcaaagagctggaaaccaagtctccagtcctgggaaaagcagtggtatggaaaagcaatggaaagagcattttgaaaatgccattccactgttttctggcctttatgatttctgctgagaaatccactgttagtctgatggggtctccttcatagcaccaatgacctgaagagccttgttgaaggaagactccatctgatgactcagagcaagtattttttagtgtgttattgttattagcagaaagagggccataaaatacatggggcaagatgaatatatcttaggcaaaagaagaaaatattcaaattcttatgttattttatctaattattttatctctttttgtgtgtgacttataatgtgtgtattgtannnnnnnn

SEQ ID NO: 11028 - DNA, 1277 bp, Homo sapiens
  misc_feature 174: n = A,T,C or G
actttttattccactctcttcttgcttgcgtggtttctagaaaagacagctgcagtttgcatctttattcctctataagtaaggtttatttttccctcctctggtttctttcaaagatttatttttttatccttggtttcctgcagtttagatatgatatgccttagatgtggnttttttttttttttttttttggccccttttatcctgtttgttgttctctgagcttcctgaatctgtggtttcgtgtcacatattaatttagaaaaatctcattcattattgctttgaatatttcttctattcctttctctctttcctctccttctggggttccactatgcatacttacatcttttatagttgtcccactgttcttggatattctgttccttttttattcagtctttttccctttgctttcatttttggaagtttctcttgaaatatactgaagctccagattctttcctcacccacatccagtctgctaatgaggcttcaacaccatgcttcatttttgttagtttcttgacttctagaatttttatttgattctttcttagactttccatttctctgcttatattactgatctgttcttgcaaattgtctattttttccattatcactcttaccatattagtcatagttgtttaaaattaccaatctgataattctaatatacctgccatatctgaatatagttctgtcagctagctctgtttcttgaaactttttgttgttttgggttttttgtttgcttgtttgttttagggtttctttttttcctcttacaatgtttttttaattttttgttagaaattagacatgatatactaggtaaaagggagtctgggctgggcacagtggcttccgctggtaattccagcaagttgagtggctgagatgggaggatggcttgaggataggagtttgagaacagcctgggcaacataacaagaccctgtctctacaaaaataaaaaaataaaaatattagccaggcatagtggtacacacttctggttccagctacaaagaggactgaggcaggaggatcacttgggtccagaagttcaaggctgcagtaagctatgatagtgccattgcattcctgcctgggggacaaagcaagatcctatcaattttttttcttcttttcttctttactttttaaaaattattatactttaaaaaagacaaaaaataatagacacagttaagaatgtgataaaaattaatgtttatatgctgttggtgggaatgtaaattagt

SEQ ID NO: 11029 - DNA, 1325 bp, Homo sapiens
  misc_feature 1, 2, 40, 1252, 1308, 1309, 1310, 1311, 1312, 1313, 1314,1315, 1316, 1317, 1318, 1319, 1320, 1321, 1322, 1323, 1324,1325: n = A,T,C or G
nncaatcttcagatgcagcagaatgtcttcagtatacagngagcagaatgggttccccaggtaaggccactttgtcccatctttaagcctgggaagttcatggtgcccatgccaatcctccttcttcagagttctctgttcagcgaaactcaccctgcttcccgggtatcagtcacagacatgaaggcctggcagcaaggagcgataggaaacaacaatgtgttcagtcaagctgtccagaaccagcccacgcctgcacagccaggagtatacaacaacatgagcatcaccgtttccatggcaggtggaaatacgaatgttcagaacatgaacccaatgatggcccagatgcagatgagctctttgcagatgccaggaatgaacactgtgtgccctgagcagataaatgatcccgcactgagacacacaggcctctactgcaaccagctctcatccactgaccttctcaaaacagaagcagatggaacccaggacaagaagacagaagagttcttctctgtggtgactacagactagaggaatgctctacaggtgcaacaggttcaggtgtttgctgacgtccagtgtacagtgaatctggtaggcggggacccttacctgaaccagcctggtccactgggaactcaaaagcccacgtcaggaccacagaccccccaggcccagcagaagagcctccttcagcagctactgactgaataaccacttttaaaggaatgtgaaatttaaataatagacatacagagatatacaaatatattatatatttttctgagatttttgatatctcaatctgcagccattcttcaggtcgtagcatttggagcaaaaaaaaaaaaaaaaaaaaaaaaaaaggagtttgcttttgtcgggagattgaaagatgtttttgtttctttctttgtaaaggccttggatattgaaaaaataccaaggcagaacagttggacaatctatttcttgagccaaatttaattattcttatttttgtaatcagtcattggcttcttatctggatgaaggcttttggaggagaaccaaaacgacaagttccaagaagaagatgaagctccgcctccgccgcttagtcccaaccctgcccaggaagaagggcccgtggggctttgcctgtgcccgtccaccaaaggctgtcatgtgtctcgaaatcagcagccctccccatcccaatcccagctactcgagaggctgaggggggagtatcgcttgaacttgngaggtggagaatgtgccactgcactccagcctgggtgacagagcgagactccgtcnnnnnnnnnnnnnnnnnn

SEQ ID NO: 11030 - DNA, 1728 bp, Homo sapiens
  misc_feature 1: n = A,T,C or G
nacgaggcctattctgaattggagagtatatatatatatatatatatatatatttttaataaactttattaaggtgaaataatttcaagtttacatatgagtaactgaaatatttgagtaaaaaaggcaaaagtttaaatttggaatgctgtatatattagagaatatggggaatcatggtgtgaccaactgtacaaggaagattcatatgaaggtcttaggggaaaaagataattctgaagggtgaaaaaaaaatctctcccatggagattcttcacattatatggtttgacataagggtttataaggttgtttgtccaactaatgaaaatgcgcttaataaaaaattctgaccttgggtaagaattcgctttttaccgcattgccgctttcatgtacatacatgagtgcatgcacctatcaatgtgttttcttcccaacacttattaaatataaaacaacctgattttgtgctcgtttctcgtttttcttgaggccctgaagcttccaagataaatataagactaaaatttgcttgttccttcacacctgatttctcctagaaccataaatacctcctatggggaactaagaaatcatgaatactgggattttcttattggattttttacttttgttttgtggggataacgagacagaagtgaaaggaaaactggtgccggtattactgttgaaattaatgtacagtgaatgtttttaaagtattaattttaaaaaaccatgttctctagaaacaagttttaaaaatctatatgaaagttttaaaatgttccagctaactaatggataagcataccagtaaagccaaagtaaaggttagtgcctttaaaactaacctgtgttagagttacatgaatctggctctaaagtatctattttgcatccatttatatatagatcttaaacagaaatactctaggttgccacaccacagttttaagaagttatgctgctgctgttactctcttctaggattctggtggtaaagtagagaaactcggacactatattaaccttactgaaacatgctttaaatcgtgtctaaaatctgatttgagcaagtcactgccgagcttctgagtctgcattgacactgctactgactcacctctccttccctggaataaggcttcagcttccctatgctgtgaagacaccatttgtaagcactttgaacataagcactgtgtgacagcgctggatatcatgcttgggggggggcctctccctgactcccatccccataataatgagttttgtttggaattgtaataagtaatgaactgcatggtttagaaaattataaatatttgatcagctgtcctctctgaaaaaaattgcacccctttttcttttttaaaattttgttgcatcttcgtagtaatgtaattgtattttatgcctgcttttttataaaaaaataaaataaaataaatggagacataagcattttcatacttctcctgtgaaatagtcccccctgctttgccgcgagcattcaagggacagctaacctttattgacaatctatattgcaaaagtcaggaaagaggttgtgagctgattggattaaagacctggcacttcagtaactcagcacgcttccacttcactcaacttaagagagttcattgacagtgttaggatgtgaaggctgggaaacacttattttgcttcaagagttccacttggctctcccaaataggt

SEQ ID NO: 11031 - DNA, 3024 bp, Homo sapiens
  misc_feature 1: n = A,T,C or G
ncgcgcggctccgatgggaagcatgacccgggtggcgggacaagacttgcttcccggccacgcgcgctcggccggccgtggggcggggcataggcgtgacgtggtgtcgcgtatcgagtctccgcccccttcccgcctccccgtatataagacttcgccgagcactctcactcgcacaagtggaccggggtgttgggtgctagtcggcaccagaggcaagggtgcgaggaccacggccggctcggacgtgtgaccgcgcctagggggtggcagcgggcagtgcggggcggcaaggcgaccatggagcttttgcggactatcacctaccagccagccgccagcaccaaaatgtgcgagcaggcgctgggcaagggttgcggagcggactcgaagaagaagcggccgccgcagccccccgaggaatcgcagccacctcagtcccaggcgcaagtgcccccggcggcccctcaccaccatcaccaccattcgcactcggggccggagatctcgcggattatcgtcgaccccacgactgggaagcgctactgccggggcaaagtgctgggaaagggtggctttgcaaaatgttacgagatgacagatttgacaaataacaaagtctacgccgcaaaaattattcctcacagcagagtagctaaacctcatcaaagggaaaagattgacaaagaaatagagcttcacagaattcttcatcataagcatgtagtgcagttttaccactacttcgaggacaaagaaaacatttacattctcttggaatactgcagtagaaggtcaatggctcatattttgaaagcaagaaaggtgttgacagagccagaagttcgatactacctcaggcagattgtgtctggactgaaataccttcatgaacaagaaatcttgcacagagatctcaaactagggaacttttttattaatgaagccatggaactaaaagttggggacttcggtctggcagccaggctagaacccttggaacacagaaggagaacgatatgtggtaccccaaattatctctctcctgaagtcctcaacaaacaaggacatggctgtgaatcagacatttgggccctgggctgtgtaatgtatacaatgttactagggaggcccccatttgaaactacaaatctcaaagaaacttataggtgcataagggaagcaaggtatacaatgccgtcctcattgctggctcctgccaagcacttaattgctagtatgttgtccaaaaacccagaggatcgtcccagtttggatgacatcattcgacatgacttttttttgcagggcttcactccggacagactgtcttctagctgttgtcatacagttccagatttccacttatcaagcccagctaagaatttctttaagaaagcagctgctgctctttttggtggcaaaaaagacaaagcaagatatattgacacacataatagagtgtctaaagaagatgaagacatctacaagcttaggcatgatttgaaaaagacttcaataactcagcaacccagcaaacacaggacagatgaggagctccagccacctaccaccacagttgccaggtctggaacacccgcagtagaaaacaagcagcagattggggatgctattcggatgatagtcagagggactcttggcagctgtagcagcagcagtgaatgccttgaagacagtaccatgggaagtgttgcagacacagtggcaagggttcttcggggatgtctggaaaacatgccggaagctgattgcattcccaaagagcagctgagcacatcatttcagtgggtcaccaaatgggttgattactctaacaaatatggctttgggtaccagctctcagaccacaccgtcggtgtccttttcaacaatggtgctcacatgagcctccttccagacaaaaaaacagttcactattacgcagagcttggccaatgctcagttttcccagcaacagatgctcctgagcaatttattagtcaagtgacggtgctgaaatacttttctcattacatggaggagaacctcatggatggtggagatctgcctagtgttactgatattcgaagacctcggctctacctccttcagtggctaaaatctgataaggccctaatgatgctctttaatgatggcacctttcaggtgaatttctaccatgatcatacaaaaatcatcatctgtagccaaaatgaagaataccttctcacctacatcaatgaggataggatatctacaactttcaggctgacaactctgctgatgtctggctgttcatcagaattaaaaaatcgaatggaatatgccctgaacatgctcttacaaagatgtaactgaaagacttttcgaatggaccctatgggactcctcttttccactgtgagatctacagggaagccaaaagaatgatctagagtatgttgaagaagatggacatgtggtggtacgaaaacaattcccctgtggcctgctggactgggtggaaccagaacaggctaaggcatacagttcttgactttggacaatccaagagtgaaccagaatgcagttttccttgagatacctgttttaaaaggtttttcagacaattttgcagaaaggtgcattgattcttaaattctctctgttgagagcatttcagccagaggactttggaactgtgaatatacttcctgaaggggagggagaagggaggaagctcccatgttgtttaaaggctgtaattggagcagcttttggctgcgtaactgtgaactatggccatatataattttttttcattaatttttgaagatacttgtggctggaaaagtgcattccttgttaataaactttttatttattacagcccaaagagcagtatttattatcaaaatgtctttttttttatgttgaccattttaaaccgttggcaataaagagtatgaaaacgcaaaaaaaaaaaaaaaaaaaaagagacgcccgtcgtgccgaattcttggcctcgagggccaaattccctat

SEQ ID NO: 11032 - DNA, 2434 bp, Homo sapiens
  misc_feature 2428, 2429, 2430, 2431, 2432, 2433, 2434: n = A,T,C or G
acgcggggagaggccacttccttccccaatccttccgtttcagctgggagaatgggacaagattcaggtgcccccaatggggagagggcgtggatgcggctggcttcctgctataaaaacacagagcagcctaccctctacctggttgatctggtagtgtcttctgctatggcgtgcaggcagagaggaggctcttggagtccctcaggctggttcaatgcaggctggagcacctacaggtcgatttctctcttcttcgcccttgtgacttcagggaactccatagatgtttctcagttggtaaatcctgcctttccaggcactgtcacttgcgatgaaagggaaataacagtggagttcccaagcagtcctggcaccaagaaatggcatgcatctgtggtggatcctcttggtctcgacatgccgaactgcacttacatcctggacccagaaaagctcaccctgagggctacctatgataactgtaccaggagagtgcatggtggacaccagatgaccatcagagtcatgaacaacagtgctgccttaagacacggagctgtcatgtatcagttcttctgtccagctatgcaagtagaagagacccaggggctttcagcatctacaatctgccagaaggatttcatgtctttttccttgccacgggtcttctctggcttggctgacgacagtaaggggaccaaagttcagatgggatggagcattgaggttggtgatggtgcaagagccaaaactctgaccctgccagaggccatgaaggaaggcttcagcctcttgattgacaaccacaggatgaccttccatgtgccattcaatgccactggagtgactcactatgtgcaaggtaacagtcatctctacatggtgtctctgaagcttacatttatatctcctggacagaaggtgatcttctcttcacaagctatttgtgcaccagatcctgtgacctgcaatgccacacacatgactctcaccataccagagtttcctgggaagcttaagtctgtgagctttgaaaaccagaacattgatgtgagccagctgcatgacaatggaattgatctagaagcaacaaatggcatgaaattgcatttcagcaaaactctgctcaaaacgaaattatctgaaaaatgcctactccatcagttctacttagcttcactcaagctgacctttctccttcggccagagacagtatccatggtgatctatcctgagtgtctctgtgagtcacccgtttctatagttacaggggagctgtgcacccaggatgggtttatggacgtcgaggtctacagctaccaaacacaaccagctcttgacctgggtactctgagggtgggaaactcatcctgccagcctgtctttgaggctcagtctcaggggctggtacggttccacatacccctgaatggatgtggaacgagatataagttcgaagatgataaagtcgtctatgaaaacgaaatacatgctctctggacggattttcctccaagcaaaatatctagagacagtgagttcagaatgacagtgaagtgttcttatagcaggaatgacatgctactaaacatcaacgttgaaagccttactcctccagtggcctcagtgaagttgggtccatttaccttgatcctgcaaagctacccagataattcctaccaacaaccttatggggaaaacgagtaccctctagtgagattcctccgccaaccaatttacatggaagtgagagtcctaaacagggatgaccccaacatcaagctggtcttagatgactgctgggcgacgtccaccatggatccagactctttcccccagtggaacgttgtcgtggatggctgtgcatatgacctggacaactaccagaccaccttccatccagtcggctcctctgtgacccatcctgatcactatcagaggtttgacatgaaggcttttgcctttgtatcagaagcccacgtgctctctagcctggtctacttccactgcagtgccttaatctgtaatcgactctcccctgactccccactgtgttctgtgacctgccctgtgtcctctaggcacaggcgagccacaggggccactgaagcagagaaaatgacagtcagcctcccaggacccattctcctgttgtcagatgactcctcattcagaggtgtcggctcatctgatctaaaagcaagtgggagcagtggggagaagagtaggagtgaaacaggggaggaggttggctcacgaggtgctatggacaccaaagggcacaagactgctggagatgttggttccaaagctgtggctgctgtggctgcctttgcaggtgtggtggcaactctaggcttcatctactacctgtacgagaaaaggactgtgtcaaatcactaaatgggcttctaaataaagcagnnnnnnn

SEQ ID NO: 11033 - DNA, 1235 bp, Homo sapiens
  misc_feature 1, 2, 1229, 1230, 1231, 1232, 1233, 1234, 1235: n = A,T,C or G
nncggggatttaagggtgttaccgtcgctccttttgcggtccccgtctgttcttgtcctctccttctccgcttttgcttgctccggcctgccttttctgtcttcgtcctttgtccatcgctgcagcttatttacatcgcctggtccgcgttcctttcttgggtttccttattccatcttgtggctgcatactacctattgtgtacccatcgactgtttgtcatgctacacacgtgatgccattaaggatacgctgactagtgcgtttccaccaatccccatcgtctgggattatagaatagctcttgacatgatacctagtgaagtccatgttgtaccttgtatcccctatgatgtcagcccctgatgttaacttatcactaaggcgtcttattaaggcctcaccactctaggaaatgaaccttagctgtacaaattcgggaatgaattgatccctttacaggtgtaatggaaaaaatggtttggtagatggaaaggactaatggcctctattctcacctcccttgtgatcataataggggtgctcattctcttagggtgctgtattataccctgtgtctgcggactagttcaaaagctcatagaaacagcccttaccaagacctcccacaactctcccccaccctattcagataaacgtttatttctaagcaaccaagaagagcagtgaagccagatcctgttagaaatatatgaagaggaaggactacaaaatcaaaaggggaaaattattagacaaaatgagttgctctacaaaggtccaacttcgttgtcctttgttctgtaacctttgttctgtaaactgcccttcccgcagaaactgtctttcccgccgaccaaaactgcccttcactatcactgtaatccatacccctactctatttgaaactgccaatcgggatcagcttacattgtgtggttcaaccaccagccaatgaggaaaaaacacagaagcaaaagctatgatgcattagggttaaaaaccccttcctttccctgtccaatgtgctcttgagactgctacaggcgcaagcagccaccttctgcagaagtaaaccttgccttgctgagaaatttttcttttgagtgctggtctctctctgtggcaccaagaacttatttctaacatggagtgatttccaagacagatggttcagtgaaaataaaaactgtgcaggcacgcgggtaccagaccgacaggcatatgannnnnnn

SEQ ID NO: 11034 - DNA, 762 bp, Homo sapiens
tttttttttgaagtattgaaaattctctttattatcatcacatgaaaagacagattaaaagagtcctaagcagaatatcaacataccaaaagtagcaatgaataaaaacaaagtattatcacaatcaagttcagtttatcggacaaatgcaaggttagattaacaagagtaaataatgtaatgcaattcaacacaagtaacaaatggtttcttaaatgatcatctcaatagatgcaaaataagtaatttttactttgtaaaattgaactttgattcacaatgaaactttgagacctagtattagaagagaattttattactacaattataatggtagctccagtgatttttgcaccttggtgttctcactttgtacacttctctttccctgaatatgacttgcctctggtgaacagaattttgcagatgtagttaagctctaaaatcagttagtgtttggctcatcagtagggaaattatcctgagtgagcctgatatacactgatatgacaggctattcttgctgacttgatgaagcaagcagccatgttgaggaaatccacatggctaagaactgtgaccagcctctaggaactgtaggcaacatttagggcctgagattacccagctaaaagtcaggagatagcttgggatttcagtcatactgtcataaaaacatacattttgccagcaaacttcatgaccttggaagcagactctttcccagtcaagattccaaatgaaaattcagcccagctgaca

SEQ ID NO: 11035 - DNA, 963 bp, Homo sapiens
cagataacaggataccgactgaccgtgggccttacccgaagaggccagcccaggcagtacaatgtgggtccctctgtctccaagtaccccctgaggaatctgcagcctgcatctgagtacaccgtatccctcgtggccataaagggcaaccaagagagccccaaagccactggagtctttaccacactgcagcctgggagctctattccaccttacaacaccgaggtgactgagtcccggcctggagtacaatgtcagtgtttacactgtcaaggatgacaaggaaagtgtccctatctctgataccatcatcccagctgttcctcctcccactgacctgcgattcaccaacattggtccagacaccatgcgtgtcacctgggctccacccccatccattgatttaaccaacttcctggtgcgttactcacctgtgaaaaatgaggaagatgttgcagagttgtcaatttctccttcagacaatgcagtggtcttaacaaatctcctgcctggtacagaatatgtagtgagtgtctccagtgtctacgaacaacatgagagcacacctcttagaggaagacagaaaacaggtcttgattccccaactggcattgacttttctgatattactgccaactcttttactgtgcactggattgctcctcgagccaccatcactggctacaggatccgccatcatcccgagcacttcagtgggagacctcgagaagatcgggtgccccactctcggaattccatcaccctcaccaacctcactccaggcacagagtatgtggtcagcatcgttgctcttaatggcagagaggaaagtcccttattgattggccaacaatcaacagtttctgatgttccgagggacctggaagttgttgctgcgacccccaccagcctactgatcagctgggatgctcctgctgtcacagtgagatattacaggatcac

SEQ ID NO: 11036 - DNA, 1595 bp, Homo sapiens
  misc_feature 1, 2, 3, 1593, 1594, 1595: n = A,T,C or G
nnncgttgtgttgtaggcgggtgacagggaggtctcaggttgggtgtatgagcacacagtcaggttggtttcacttctgtggggctacatacccgtggtacagaatggacgcgttagtgacgatcaagttattttttagagttccagttacacgggataatgcaccataaaatgaataggaactgtagccaaccttttgtccctacccgcagttgaccttggacgtaatacaactgggaaacagtccctcaagtctgggaaaggtcaagttgaaagtccttactgtacaagtccaaattttaaggaaaaatgagtcccgcagaatgagtttcctcatgcttcggccatgcgtggaccagtcagcttccgggtgtgactggagcagggcttgtcgtcttcttcagagtcactttgcaggggttggcgaagctgctcccatccacgtacagctcccagtctactgatgtttaaggatggtctcggtggttaggcccactagaataaactgagtccaatacctctacacagttatgtttaactgggctctctgataccgggaggaaggtggcggggtttagggtgttgcaaacttcaatggttatgcggggatgttcacagagcaagctttggtatctagcttagtctagcattcattagctaatggtgtcctttggtatttattaaaatcaccacagcatagggggactttatgtttaggttttgtctaagagttagcttatctgcttcttgtgctaacagggctattgctgccagggccctttggacatgggggccagcctttggaaaccccatctagttgttttgagagataggccactggccttggccagggccctacagtctgggttaaaactccaactgccattttttctctttctgacacatagagtgtaaagagttttgtcaggtcaggtagcctcagggctggggccgacatgagtttttctttttaactcatgaaaagctcattgctgttggttgtaatagatgtagtttatctaatctacatttttattgactgtcatctaccaaaatattgacttaaatcctgtagctatttgatttcaagctttaaattgatctggtattccttgcggggctccaattgcatctaaatagatgtgagagttgaaagacctataaggggcttctctcgctttatgatgtcttatttttttttttcctctggttgatgaaatgccagggtgaaagggatagccaaatggactaaagcacaagtgccactctagttattcagcagagtgcccagtaaaggtccaccacaataccaccacacatccactcggggatgaacaagggctgactgattgataagctcttgaaaattcttaagctcactgcatcccttcaggtctccaaggaatgctaaatctcctccctgccatgagagacaagaagtgaacttagtgttgggagacataagttggatggccctccggggctgaccccccagggacttaggattttgcagaaagagcttggcatgactttttcactccaggctggagaatcccggaaaagagctaccatgcagcccacccctgttcgacnnn

SEQ ID NO: 11037 - DNA, 548 bp, Homo sapiens
  misc_feature 228, 535, 536, 537, 538, 539, 540, 541, 542, 543, 544, 545,546, 547, 548: n = A,T,C or G
accgcggtggccggccgcccgggcaggtacgcgggaagaaatggaaattctcttgaagctggatttcccacttgctgcgggtgtgtgctttgcttaacatgttaaaacctgcaggcgtggtggctcatgcctgtaatcccaacacttcggaggctgaggcaggaggattgcttgagcccaggagttcaagaccactctgcacaacaaaaaaacccatctctaccaaanaaaaaaaaaagaaaaaaatagacgtccgcggggctgactgttaaggaaagagcacccacatctgctcctacttagctttttttctgtggttcttacacagtattcctttttttcttttcttgaaagagactcctcctttcttttcttttcttgaaagagttttaaacagataagatggcaaaagtgactgatctctactcccccagtttgaatggtaaatttgaatggtaaattcccatgaacatatatggaaatgtctttatcctactttctccaataaaggctgttcttagcttttcaaatgcannnnnnnnnnnnnn

SEQ ID NO: 11038 - DNA, 1186 bp, Homo sapiens
  misc_feature 1186: n = A,T,C or G
gcgtccgcagcctcgtgccgggagtcgccgcattgtggtccgcttctctgcactatgtcgggtggcctcctgaaggcgctgcgcagcgactcctacgtggagctgagccagtaccgggaccagcacttccggggtgacaatgaagaacaagaaaaattactgaagaaaagctatgcggaaaacgccatgcggtacataaatgggacgcgtctggatgaccgaatcattcgcacagactgggacgcaggctttaaggagggcaggcaatacggccgtgggcgatctgggggccaggttcgggatgagtatcggcaggactacgatgctgggagaggaggctatggaaaactggcacagaaccagtgagtggtgagagctctgtcagtgacaaacactcctttggcctgttgaatttgctgaagaacatcacctaaagtctgcacacgagcccatttttaccaagatttgatcagtgtctttactgagctggaagcctctgaaagttattaaaggacagaatccaaaagaatgcctttaattcttgtctgagaatcttggccatgtgtcagattatcagaacaattttgttaccaggtcagaaattgtgttctttgacaacagattggatctgtaatgttgattagtctttagccataaccactacacttttagaaagacagaaaaatgtaagaatttgtttttaccataatgagtcttaagtaggttcatgatctacattggggcctgggattatttttttaattttaagtttgcatgagatagcctaataaatggaggtggggccaggcatggtggctcacacgtgtaatcccaacactttgggaggctgaggaggaaggatagcttgaggccaggagtttgagactagactgggcaacatagcaagaccccgtctctacaaagcaaaacgaaaaacaacaaatggagttgtgctatgttgtattgctttgcacaaaattaggaacaggtgtttgacaattgaatttgtttctgtgaattctaacttctaaggggtagaggaggcctctggtagtggaagagatcacgagagggtcaggcgaaatggagggcaaggtaacagtgaaagagttcatagaacggtagcaaataggggagtgaagataaaagggagcattggggaagggagaggcctactgagggttan

SEQ ID NO: 11039 - DNA, 11657 bp, Homo sapiens
  misc_feature 1, 2, 3, 4, 11656, 11657: n = A,T,C or G
nnnnccgccaggtgctcctggagtgcagtgcctatcgccggggcgtgtgggggccacaccgagcaccagcttctccgacgccgggaagccgctgtcgccgccgctacctctccctgttgccgccgcctcagatctcttcatgccgctgtaagctcggaggccaaggatgcggagtaggcttcccccagcgcttgccgccctgggcgcggccctactcctgtcttccattgaggcagaagttgacccaccttcagacttgaattttaaaattatagatgaaaatactgttcatatgtcatgggcagaaccagttgatccaattgtgggttacagaataacggtggaccctacaacggatgggcctactaaagaatttaccctttcagctagtaccactgaaactttattgtcagaacttgtacctgaaacagagtatgtggtgacaataacttcatatgatgaagtagaagaaagtgtaccagttataggacaactaacaattcaaacaggtagttcgacaaagccagtggagaagaaacctggaaaaaccgagatacaaaaatgctctgtcagtgcctggactgatttggttttcctcgtggatggctcttggagtgtgggaagaaataatttcaagtacattttagacttcattgctgctcttgtgtctgcttttgacattggggaagagaagacaagagttggagttgttcaatacagctctgacaccaggactgaatttaacttaaatcagtactaccaaagggatgaacttcttgctgcaataaaaaaaattccatataaaggtggcaacacaatgacaggggatgccattgattatttagttaaaaatactttcacggaatctgctggggcaagagttggctttcctaaagtggcaattattattacggatggaaaatcccaggatgaagtggaaattccagcaagagagcttcgtaatgttggagttgaagttttctccttgggcattaaagctgcagatgcaaaagaactcaaacaaattgcctccacaccttcactgaaccatgttttcaatgtggccaactttgatgcaattgtggatattcagaatgagatcatctcccaggtgtgctcaggtgttgatgaacaacttggtgaattggttagtggagaagaagttgttgagcctccttcaaatttgattgccatggaagtctcttcaaaatatgttaagctaaattggaatccatctcctagtccagtgactggctacaaagtcatcctcacaccaatgactgcaggaagccgacagcacgctctgagtgtggggcctcagacaaccacgctcagtgttcgcgacctctcagcagacacagaataccagatcagtgtttccgccatgaagggaatgacatccagtgaacccatttcaataatggagaagactcagccaatgaaagttcaagtggaatgctcacgtggtgtggatataaaagccgatattgtgtttttggttgatggctcctatagcattgggattgcaaactttgttaaagttagagcctttttggaagttcttgtaaaaagttttgaaatttcaccaaatagggtccagattagtcttgtgcaatacagccgggatcctcatactgagttcactttgaaaaaattcaccaaagttgaagatataattgaagcaataaacaccttcccttacagaggaggatctacaaatactggcaaagcaatgacttatgtcagagagaaaatatttgtgcctagcaagggatcaagaagcaatgtgccaaaggtcatgattcttatcacggatgggaaatcatcagatgctttcagagatcctgcgataaaactgaggaattcagatgttgaaatctttgcagttggtgtgaaggatgccgttcgctcagaattggaagctattgcctctcctcctgcagagacccatgtgttcacagtggaagattttgatgcttttcagaggatatcttttgaactcacacagtctatctgccttagaattgagcaagaattggcagctataaagaagaaagcttacgtccctccaaaggatcttagtttttcagaagtgacttcttatggtttcaaaaccaactggtctccagctggagaaaatgttttttcatatcacatcacctacaaggaagcggctggggatgatgaggtcactgtggtggagccagcatcgagcaccagtgttgttctcagcagcctgaagccagagaccttgtatttggtcaatgtgactgcggagtatgaggatggcttcagcattcccttagctggagaggagaccaccgaagaagtaaaaggagcacctcgaaacctaaaggtgacagatgagactacagatagtttcaaaattacttggactcaagctccagggagagttttaagatgtcgaattatatatagaccagttgctggtggagagagcagagaagttaccaccccacccaatcagaggaggagaacactggagaacttgattccagacacgaaatatgaagtatctgtaattcctgaatacttctcaggacctggtactccattaactggaaatgcagccactgaagaagttagagggaatccaagagacttaagagtttctgaccctacgacgtctactatgaaattatcttggagtggggcaccaggaaaagtgaaacagtatctcgtcacatataccccagtggcagggggtgaaactcaagaggtcactgtgaggggagatacaaccaatacggtgctgcagggattgaaggaagggacacaatacgccttatctgtgacagcactgtatgcgtctggggctggcgacgccctctttggtgaaggaacaacacttgaagaacgtggttctcctcaagatttagttactaaagacatcactgacacatcaattggggcttattggacatctgctccaggaatggttcgcggttacagggtctcatggaaatcactttatgatgatgttgacactggagagaaaaatctgcctgaagatgcaattcatacgatgatagaaaatctgcagccagagaccaaatacagaatttcagtatttgccacttacagcagtggagaaggagaacctttgactggagatgccacaactgaattatctcaagattccaaaaccctgaaagtagatgaagaaacagaaaacacaatgagagttacatggaaaccagcaccagggaaagtcgtcaactaccgtgttgtctatcgccctcatgggagagggaagcaaatggttgctaaggtgccccccacagtcacttcgacagtgttaaagcgacttcagccacagaccacatatgacatcacagttcttcctatttacaagatgggagaaggaaagcttaggcaaggatcaggaacaacagcttctcggtttaagtctcctagaaacctcaaaacatctgacccaaccatgtcaagcttccgagtgacttgggagcctgcccctggggaagtgaagggttataaagtcacattccaccctacgggggatgacagaagactgggggagttagtggttggaccctatgacaacacagttgttttggaggaacttagggctggtaccacctataaagtaaatgtttttggaatgtttgatggaggagaaagctcaccacttgttggacaagaaatgacaaccctttccgacacaactgttatgccaattttatcttctgggatggagtgtctcaccagagctgaggcagacattgtgttgctggtggatggatcatggagcatcggccgggcaaattttagaaccgtgaggagtttcatttctcgtattgtggaagtctttgacattggccccaaaagagtacaaattgctcttgctcagtatagtggggatcccagaacagagtggcagttaaatgcacacagagacaagaagagcttgttgcaagctgtggcaaacttgccgtacaaaggaggcaatactctcacaggcatggctttgaatttcattcgccaacagaacttcaggacccaagctggcatgagacctcgagctcgaaaaattggtgtgctcattactgatggaaaatcacaagacgatgttgaagcaccttcaaagaaactcaaggatgagggagtggagctgtttgctattggtattaaaaatgctgatgaagtcgaattaaagatgattgcaactgatcctgatgatacccatgactacaatgtggcagattttgagtcactctccaggatagtggatgatctcaccattaatttgtgtaacagtgtcaaaggtccaggtgatttggaagcaccttctaacttagttatttctgagcgaacccatcgttcttttagagtgagctggacaccaccttctgacagtgtggatcgatataaggtggaatactatccagtttctggagggaaacgtcaagaattttatgtgagtcgaatggaaactagcacagtgctgaaagatctgaaacctgaaactgaatatgttgtcaatgtgtattctgtggtagaagatgaatatagtgagcctctgaaggggacagaaaaaaccttgccagtgcctgtagtcagcctgaatatttatgatgttggccctaccaccatgcatgtgcagtggcagcctgtgggaggagctactggctacatcttgtcatacaaacctgttaaggacacagagccaacaagacccaaagaggtgcgtttggggccaacagtgaatgacatgcagctgactgaccttgttcccaacacggagtatgcagtcacagtccaggctgtcctgcacgacctcactagtgaacctgtcactgttcgggaagtcaccttgcctttacccagacctcaggatctgaaactcagagatgtgactcacagcactatgaatgtcttttgggaacctgtgcctggaaaagtgcgtaaatatattgttcgatacaaaacaccagaagaggatgtcaaagaggtagaggtggacagatcagagaccagcacttccctcaaagacctcttctcacagaccttgtacacagtcagcgtttctgcagtacatgacgagggggagtctcctccagtgactgctcaagaaactacccgacccgtgccagccccaacaaacttaaagattactgaagtaacatcagagggtttcagagggacttgggatcatggagcttcagatgtgtctctctacagaataacttggggaccttttggaagctcagataagatggagaccatcttaaatggagatgaaaacactttggtgttcgaaaacctgaaccccaacaccatctatgaagtttccattactgccatctatgctgatgagtcagaaagtgatgacctgattggcagtgagcgcactctgcctatcttaacaacacaagctcccaaaagtgggccacgaaaccttcaagtgtacaatgcaacatctaacagcctgactgttaagtgggatcctgctagtggtcgtgtgcagaaatataggatcacttatcagccttccacaggggaaggcaatgagcaaacgaccacaataggaggacggcagaacagtgtggtcctgcagaaactgaagccagacactccttacactatcaccgtatcctctctgtatcctgatggtgaaggaggtcggatgacgggaagaggcaagaccaaacctctaaacactgtaaggaacctgagagtgtatgacccttctaccagcactctgaatgtccgctgggaccatgcagagggaaatcctcgtcagtacaagctcttctatgcaccagcagcaggtggtccagaggaactggtaccaatccccgggaataccaattatgccattcttaggaatctgcagccagatacctcatacactgtgactgtagttcccgtttatactgaaggtgatgggggacgcacatcagatactggaaggacattgatgagaggactggcaagaaatgtccaagtatacaatcctacacctaacaggctcggtgttcgctgggaccctgcaccaggacctgtgctgcaatatcgcgttgtgtattctcctgtggatggcacaagaccctcagaatctatagtagtgccaggaaacacgcgcatggtgcatctggagcggctgattccggacacactctattccgtgaaccttgtggctctgtactcggatggagagggaaatcccagccctgcccagggccgaacgctaccacgcagtggaccaaggaacctgagagtctttggtgaaacaaccaatagcctctcggtagcctgggatcatgctgatgggccagttcagcagtacaggatcatctattctcccactgttggtgatccaattgatgaatataccacagtcccaggcagaagaaacaatgtaatactgcagcccctgcaacctgacactccatataaaattactgttattgctgtttatgaagatggagatggtggccatctaacaggaaatggaagaactgtgggactccttcctcctcagaacatacacatctctgacgaatggtatacaagattcagggtgtcctgggatccttcaccttctccagttcttggatataaaatagtatataagccagtgggttccaatgagcccatggaagcctttgttggagaaatgacatcatataccttacacaatctcaatcccagcaccacctacgatgtgaatgtttatgctcaatatgattctggactcagtgtccccttgacagatcaaggcactacattatatttaaatgtaacagatctgaaaacttaccagattgggtgggatacattctgtgtcaaatggtcacctcaccgggcagccacctcctacaggctaaaactaagccctgcagatggaaccaggggacaagaaattacagtgcgtggatcagaaaccagtcactgcttcactggcctttcaccagacactgattatggtgtcactgtttttgtgcagacaccaaatctcgagggaccaggagtctctgttaaagaacataccactgtgaaaccaacagaagcccctacagagccacccacacctcctccccctcccaccattccaccagcccgggatgtatgcaaaggggccaaggcagatattgtgttcttgactgatgcctcctggagcattggggacgataattttaacaaagttgtaaaattcatcttcaatactgtgggaggctttgatgaaatcagtcctgctgggattcaggtttcatttgtgcaatacagcgatgaggtcaagtctgagttcaagctgaacacgtacaatgacaaggccctagcccttggggccctccagaatattaggtacagaggaggaaacacaagaacaggcaaggccctcacgtttatcaaggagaaagtcttgacttgggagagcggcatgaggaagaatgtccctaaggtgttggttgtggtcacggacggtcggtcccaggatgaggtcaagaaggcggctttggtcatccagcagtcagggttcagtgtctttgtagttggtgtggctgatgtcgactacaatgagcttgccaacattgccagcaaaccaagtgaacggcacgtgttcattgtggacgactttgaatcttttgagaagatcgaagacaatcttattacatttgtttgtgaaactgccacttcaagttgtcctctcatttatttggatggctacacctcaccaggttttaaaatgcttgaagcatacaacctgacagaaaagaattttgcttctgtacaaggagtatctttggagtcagggtctttccccagctactcagcatacaggattcagaagaatgcgtttgtgaatcagcctacagcagacctacacccaaatggactccctccttcatacacgattatattattattcagacttctcccagaaactcccagtgacccttttgcaatttggcaaatcacagacagagactacaaaccacaagttggagtgattgcagatccttctagcaagacgttatcattctttaacaaggatacaagaggcgaggtgcaaactgttacatttgacacagaagaagtaaagacattattttatggaagttttcacaaggttcatattgtagtgacctcaaaaagtgttaagatttacattgactgctatgaaattatagaaaaagacatcaaggaagctggaaatataacaactgatggttatgaaattcttggaaaactccttaaaggggaaaggaaatcagccgcattccaaatccagagttttgacattgtctgcagtccagtgtggaccagtagagacagatgctgtgatattccctctaggagagatgagggaaaatgccctgcttttccaaattcttgcacatgtacacaggacagcgttggacctccaggacctccaggccctgcaggaggacctggtgctaaaggtcccagaggtgaaagaggtatcagtggggcaattgggccccctggtcctcgtggagacataggtcctccaggcccccagggtcctccaggccctcagggacccaatggactctctattccgggagagcaaggtcgccaagggatgaaaggtgatgctggagagccaggacttccaggccgaacaggaaccccaggattacctggcccaccaggaccaatgggacctccaggagacagaggcttcactggaaaagacggtgcaatgggacccaggggcccaccagggccgccgggaagcccaggctccccaggagtcacaggaccaagtgggaagccaggaaaacctggagatcatggcagaccaggtccatctgggttgaaaggagaaaaaggtgataggggagacattgcttcccagaacatgatgcgagcagttgcaagacaagtctgtgaacaattgataagtggtcagatgaacagattcaatcagatgctgaatcagattccaaatgattaccagtccagtcgcaaccagccaggcccgccgggtccaccgggacctcctggtagcgcaggagccagaggagaacctgggcctggggggcggccaggcttcccgggcacaccagggatgcagggaccccctggggaacgaggtttgccaggagagaaaggtgaaaggggtactggatcttcaggacctcgggggctgcctggccccccaggtccacaaggagaatccagaacaggtccaccagggtccacaggttcaagaggtccccctggcccccctggccgtcctggaaactcaggtatccgaggacccccaggtcctcctggatactgtgattcttctcagtgtgccagcatcccatacaacgggcaaagctatccaggttccggctaacacattttctaagtcgccagtgctgcttacagtttgaatacatgaaaatcctgtttctgagatgtttgcgcacgtgcttattaggaaatgagtctgtatggaaatctcaccacagataatggttaacgaaccgggtcgacatcacaaaggagggtggagactctttttactaacttgaatgagacaaaagcagtggtgtcagtttataatcctgatgcatttcagtaataatgtagaaaaacattattttaaaaaagttccaacacacagccatgaggagcctcagttttgaaagaggtgcataataaaactactaaccagaggagtctatgccattttaagaaaaacaattaacctggttaaagagaaatgtcttatgtaaataataaactaattgtggcttgtaaatgatttgtatgtgatcctgtcgactaaaatcacttaacaattctacaataagcttctgcatcaaagcctgccgcttgctctatgccggaataacaccaaatggaatctcctcatctcttgcttgttagcgatgtgtctgattcagggcatctgtctttttgttacttttttgtccgtgtcctctcatttgggttttgtaactgcaattttcaaaccaaagtttaaaatcaccttttcttcctgttttgctgtagtcactggtgttcctcacccaccagctgtaactcagtttgtgtgaggtacagccacagaagatgtcatgtactgtatattacctggtgatagttgcttttcaccccccgagttcagtttctaggagccaatgaaacttcccctcacctcctcatctttccaagttgttctttgaattgaggagtttgaaggcataaacagttacttggggatttgcgaaaatcctacttagttactgcgtttacagttctttggcccagtctctgacccttcccaagtatttgtgcaatgattgtgtttactgctggatttttgaaggtttttttttttaagaaagtgccatttcattatttgattatcaccaaattatctggaaataattgggacattgtaacttatctatttatagttatgagattaagactggagtgccatcaccgcgggtgatgatttagcttttgctgtgtgtgtgtgtgtgtgtgtgccttccaaatcatgccataattgtaatgttgaatcggacagagccttacgtgcccgagggcggggcctacctgcctgagcgcgagcccttcatcgtgccggtggagcccgagcggacagcggaatacgaggactacggcgcagacgagcctgcagaggagcctcctgagccccaccggcgctggcggcgcgccctgccccacggacccgggcagtgaaccagagatcacgcgccgcgccgcgaggcttgggggaggtgttgaaattctcatttacaggtcagatagagcagtgtacgtcttttctgaggtgtttcttccagcgttgctcatccaggagtaccctttctgattgtagagaaccttgtttctgcaggaagcctagctccaagcacgcagtctgtagacatttttgcctttgcccttgaaatgcttgcaaaatactttgttaacaaaagctgcaaagagagaacatgccgtgtgcctttagttagcacagcgggcagcctcagtgaaactcttaggttaagcagttaagtcctggaacccagagctgctgtgtatttcgagcgggcagtttatcttttgctatacttattttcaattcaattacaccacgattcaaataattcccctcctaaaaccaaaaaggagggaaacgtcaactccattgcaattacttatcttcctcttctatctctgttatacgccggggcatagaatgctcgtatacatctctttaacaaccacaaaccttaagccatgtagatgaagttagtgcatcaacgggatacagttccatattgccttaaacctccttgttttagacacactaacatttataccaaattgcagattattctgcagagagggaattgcatgtttgtgttgtatatttagtatgaacttttttcagaatataatatttcttagttatcaaaagtagttggaaaacatttgcaagactatgaacatagaattgctgcttttatattttaactgcagattgtgaatttcactgccttatattatttatttctgaaacaaaagaggcatttttcaataaaactactgaaaatttgaaaaaaaaaaaaaaaaaaaaaaaaaaaaaatgactagtcttgagaaaaaaaccttccacaccttccccttgaann

SEQ ID NO: 11040 - DNA, 2096 bp, Homo sapiens
ttttttttttttttttttttttttttttttttttttttttttttttttttttttttttttttttttttttttttttttttttttttttttttttttctaagtcattactttttattttgaaagatttgtgaaactcttcacatcatggtgagagtttgtatgattaataagaagcagctttttcatgaaatgcttggaggtgaacgagttctcagcctgtgagatccgaccatcccattaactttgaagtttctcttgattaatagaagaaaaaaggggagggtgaagaaaaggaggaacatgctaaaaaccttatgacaatcatccaaatgtgaggaaagaacaaccgattcaccaactccactttttctattttacaactttctacatctcactcttgattttgggccttcctggctgaaacagcctgggcagtccctagagcccctgagaagcgcctggaggcaggagaccaccccgtggagctgctggcccgggacttcgagaagaactataacatgtacatcttccctgtacactggcagttcggccagctggaccagcaccccattgacgggtacctctcccacaccgagctggctccactgcgtgctcccctcatccccatggagcattgcaccacccgctttttcgagacctgtgacctggacaatgacaagtacatcgccctggatgagtgggccggctgcttcggcatcaagcagaaggatatcgacaaggatcttgtgatctaaatccactccttccacagtaccggattctctctttaaccctccccttcgtgtttcccccaatgtttaaaatgtttggatggtttgttgttctgcctggagacaaggtgctaacatagatttaagtgaatacattaacggtgctaaaaatgaaaattctaacccaagacatgacattcttagctgtaacttaactattaaggccttttccacacgcattaatagtcccatttttctcttgccatttgtagctttgcccattgtcttattggcacatgggtggacacggatctgctgggctctgccttaaacacacattgcagcttcaacttttctctttagtgttctgtttgaaactaatacttaccgagtcagactttgtgttcatttcatttcagggtcttggctgcctgtgggcttccccaggtggcctggaggtgggcaaagggaagtaacagacacacgatgttgtcaaggatggttttgggactagaggctcagtggtgggagagatccctgcagaacccaccaaccagaacgtggtttgcctgaggctgtaactgagagaaagattctggggctgtcttatgaaaatatagacattctcacataagcccagttcatcaccatttcctcctttacctttcagtgcagtttcttttcacattaggctgttggttcaaacttttgggagcacggactgtcagttctctgggaagtggtcagcgcatcctgcagggcttctcctcctctgtcttttggagaaccagggctcttctcaggggctctagggactgccaggctgtttcagccaggaaggccaaaatcaagagtgagatgtagaaagttgtaaaatagaaaaagtggagttggtgaatcggttgttctttcctcacatttggatgattgtcataaggtttttagcatgttcctccttttcttcaccctcccctttttttcttctattaatcaagagaaacttcaaagttaatgggatggtcggatctcacaggctgagaactcgttcacctccaagcatttcatgaaaaagctgcttcttattaatcatacaaactctcaccatgatgtgaagagtttcacaaatctttcaaaataaaaagtaatgacttagaaactgccttcctgggtgatttgcatgtgtcttagtcttagtcaccttattatcctgacacaaaaacacataagcatacatgtctacacatgactacacaaatgcaaacctttgcaaacacattattatgcttttgcacacacacacctgtacacacacaccggcatgtttatacacagggagtgtatggttcctgtaagcactaagttagc

SEQ ID NO: 11041 - DNA, 2415 bp, Homo sapiens
ctcattttcaatcagaggcccatcatgccttgaagagatgaaagaaggcattgcctggattctcttctgatgaaatttcattagcaagttttccagctaattggcagtctaaaacttgctcataaataaaacatgtatttactaaatatcagaaatactaggtttcctcggataagtttagcattacagaagatgtttattaatgcctgttatttgaaacattaatctgcttgcaatttatttaaggtattttgtagatatctaatatctaataagcatctaattaatgcatatcaaagctaagattttgcctttaggaaagttttctttcctaataaaatagtttatttgacaactattctttttattaggatcattcatatatttgctaagcaaagagtaaatttattttccttaagattcaatttgaatatactaagaatattaaagcaagttagataaattacccaatatatttgtcaatttgaaatttgatagacattagttgtttaattcaatgggcagttttgagctgcagtttatacacacatgcataacagagtcacctttcaattatccatgttaataggaaagtggttatagattttagtacacacattaaaatatggatactcttctcttttgataaatctcatttcaaataaaaaaaccagtctcataattatgtatctgtatctattacatcattgaatttagtaaataatgtttaatatgtataaggaaaaacaatgttattgacatgaagattatactcacatatttggcttgaaaatatctataaaaataatttctgttgcaaagtaagaaatgttcttcagaatgttattaatccctgtgttaaaagagaaattggaagatgctcactttagctcctaaaagccatggtatgtactgtgaatgcaaagattctgaaactaaataaaaagaaagatagtaaaagactaatgtgctataaaggctaagggaaaataaaaacccatatattaattttcccggccatcttaattttcagacccttccaagtaagtccaacgaaagccatgaccacatggatgatatggatgatgaagatgatgatgaccatgtggacagccaggactccattgactcgaacgactctgatgatgtagatgacactgatgattctcaccagtctgatgagtctcaccattctgatgaatctgatgaactggtcactgattttcccacggacctgccagcaaccgaagttttcactccagttgtccccacagtagacacatatgatggccgaggtgatagtgtggtttatggactgaggtcaaaatctaagaagtttcgcagacctgacatccagtaccctgatgctacagacgaggacatcacctcacacatggaaagcgaggagttgaatggtgcatacaaggccatccccgttgcccaggacctgaacgcgccttctgattgggacagccgtgggaaggacagttatgaaacgagtcagctggatgaccagagtgctgaaacccacagccacaagcagtccagattatataagcggaaagccaatgatgagagcaatgagcattccgatgtgattgatagtcaggaactttccaaagtcagccgtgaattccacagccatgaatttcacagccatgaagatatgctggttgtagaccccaaaagtaaggaagaagataaacacctgaaatttcgtatttctcatgaattagatagtgcatcttctgaggtcaattaaaaggagaaaaaatacaatttctcactttgcatttagtcaaaagaaaaaatgctttatagcaaaatgaaagagaacatgaaatgcttctttctcagtttattggttgaatgtgtatctatttgagtctggaaataactgatgtgtttgataattagtttagttgtggcttcatgggaaactccctgtaaactaaaagcttcagggttatgtctatgttcattctatagaagaaatgcaaactatcactgtattttaatattgttattctctcatgaatagaaatttatgtagaagcaaacaaaatacttttacccacttaaaaagagaatataaccattttatgtcactataatctttgggtttttaagttagtgtatattcgtggtgattaatcttttgtggtgtgaataactcttttatcttgaatgcgaaaaaacaaaacaaaagaaacagaaattggcgggcggctggggcgagaaaaagttttctaaacctttttgtgggcgcgggggcagtggtataggaacttggccataggtgtgccaagaaacatcgggctgaatgggtggggtttccacaaaaaaaggcggggacgggggttttgaaactccaagggggttggggctataggggtcaaagggcaggtgtatagc

SEQ ID NO: 11042 - DNA, 1703 bp, Homo sapiens
  misc_feature 1, 2, 1702, 1703: n = A,T,C or G
nnacccacgcgtccggctgaacaggggcactgaggtgtcggccggcggggcagtggcccggagcggggggcgggggcgttgatcatgtttccctttgggccccatagccctggaggggacggatcggccggagccggggctgaggagccgacgccccacgaggggcaggcagcagccaccgggccgccctcgccactacatcccggggctgatgcgacccatccccctccacccgcccgaagccctcgccgccccggcgccccatcgctgtccccggccccgcgctccggagagctagggctgcctggagctccggagtcctcaactgcctccgccccgggagagccgtcacctccctcccctccgtgccggcggcccgggccagactgcagggccaagagccggggccgacacggcctcggcgcgggcctgggcggccctggcgctaggctgttcgggtggctgaaagagcgcagcctgggccgcgggctgttcgtggacccggcgcgggacaattttcgcaccatgactagcctctacggttccatccaccccgcggactcggtgtacctcagcacccgcacccacggcgccgtcttcaacctcgagtactcgcccgacgggtcagtgctgacagttgcttgtgaacaaactgaagttctgctttttgaccctatatcttcaaagcacataaaaacactttctgaagctcatgaagactgtgtaaataatatcagatttcttgataaccggctgtttgctacctgctctgatgacactacaatagcactatgggatctgagaaaattgaacaccaaagtatgcactttacatggtcacactagctgggtgaagaacatcgaatatgatactaatacaagactcttagtaacatcaggatttgatggaaatgtcattatttgggacactaacaggtatacagaagatgggtgtccacataagaaattctttcacacacgttttctcatgcgaatgaggttaacaccagattgttccaaaatgttgatttcaacgtcctctggatatctcttaattttgcatgaccttgacttaactaagtctttagaagtaggcagctatcccattttaagagcaagaagaactacttcaagttcagatttgaccacttcatcaagttcatctggtcctagagtttctggctcaccttgtcatcatagtgattctaattcttctgagaaacacatgtcacgagcctctcaaagagaaggagtttcaccacgaaatagtcttgaagtcgtaacccctgaagttcttggtgagagtgaccacggaaactgcatcacgtccttacagctgcacccaaaaggctgggccactcttcttcggtgctcaagcaacagtgatgatgaggagtgtacttgtgtctatgaattccaagaaggagctccagtgcgacctgtctcacctcgctgttctctacgactgactcattacattgaagaagccaatgtaggcaggggttacatcaaagaactttgcttcagccccgatggacgaatgatttcttccccacatggctatgggattcgcttgttgggatttgacaaacagtgcagtgaacttgttgactgcttgcccaaagaagccagtcccctgcgggtgatccgttctctgtactctcataatgatgtggtactgccaacaaagttctctccaacann

SEQ ID NO: 11043 - DNA, 1667 bp, Homo sapiens
  misc_feature 1, 1665, 1666, 1667: n = A,T,C or G
nacgaacgtcgaggtcggtacccagcatgggagcaacactcatggcctctcagccttgcaaaggcagccacttaaagtcggtgtcctgtgtggggcaccaagctgagctgcagacacccagtaggcgcgaggcaaatgcgtcccattttaagaggcttgtatttatgagctctttgcttcctccctcccactaactttaaagaattgctctccatctcctttggcaaagttcctttgccctttgtcttatttttgtgaaaccctccaaggtatttccagtccatttgcatccaatctggcatctttacggagagcggtctcatatgctattgttgttaacgtggactagtatttatgtgttgagaacactggctgtttgtcaggaaaagtgtgccaaaacaaagagtacggccggccctggaaatgcatcagcaaaacccatttcccccgtgcactcattctgagcttccttccttcatttctgtcattactgctgagaactggactgtgcccagctgacctttcccttccttgccctcatcttgctgccagggtctgcaggtttgccaccgtcccggccccagtctgaaacatgggattatttcagaattggaggtggcagcttcagaaaaaaatccttctcgtgtgttgactgctgagatccaggaactgggaaatcaacccccagtttgtagattgctctctttggaaattctgtggcccaacctcgtggctgttttctggaattccttctatcggggcagacagtgctgtgcctttcttgacttcaggatgttccaaggatgctgctggatctgtgtgtgtgtgtgtgtgtgtgtgtgtgtgtgtgtgtgtgcgtgtgtgtgcgcctgaccctgatttctgcaacctccagatttctttcttgacccttcaaagtggaacagtccagtgccaaaaattttagagtgtgagaaggtcacagaaatcctctagttggtgcctccacagtcttcattttacagaggaactcagggctaatggagttaatgcaactagatcagggttgtgggtctgtgttctttctaccgtcagcacctgtgtggtcaattctggacacttcccagagaagtctttgagtagagaatcctactcaaatttcactgtatattttaagcattcctctcctttccctttgcctcccctgttgctttttcttcccctgatttctcctctggtcatctcctctcccttctgcgtgtaagccatgggaaagggatgagggaaggacagttatgaattaaacacaggtccctcttccaacatcaaatgaacatgggcttcctgggacagaaggccttcaaaggagagattgcaaagcaaggcaagcgttctgtcctcattgccccatccccatgagaccagacctgaatgagcagctggggggcaccatgctaaggaatgcttcacatcattcagcttagccccagagcgtttccaatcgagacaatgacgtctacttaaccgggcaagaaaaaaaaggggcgcgaagacccggggccagaaccgcaccgctgtgcaagggcaaggggtaaacggccgcgctacacgaggaacggtgcttgcgacctcggggggacccagcagcgacaacgtggcgccgcgctgacacacaaaccatcgacnnn

SEQ ID NO: 11044 - DNA, 990 bp, Homo sapiens
  misc_feature 1, 2, 3, 4, 5, 990: n = A,T,C or G
nnnnnatattaagtaactttttgaatctttagttttggtataaattataattttattatttaaaaatttctttatatagagtgatataaaaaaaaatattttaagtaggttttaatcaaattccagttaaattgattagatattaaaaaatggttgtttcttttattgtaaaaatatttcatacaggaaatttttgttgtatatcgaatttgtatttgggtaaaaaggccgccgggcaggtacttgttgctttggtgtagtgaaatgaatgccttgatgaaaattgcattgcaccatttttgaaagagagaatactccaaacgtgtcacttcttgtttcttgcaagcaactgtgatcctgagctgtgcacacttctggttgggattatttctggtttctacttcctgtttgaagatgtggcatggagagtgtaagttgaagagatgagtgcggggctcatctatccctggaattgtctttcccacaatccctgacacagaatatgagccatacaggaattctgaagaaatgggtctcttgccacctcccagtaaaagattattttttaaaaaaaaaaggtaaatctaaacttgtgctttatcttgatatgaaaatacagacagcaatagaaaaatttaaaaattaactgggcatggtggtgcatacctgtaatatcagctacttgggaaactgaagtaagaggatcacttgaacccgggagtttgaggctacagtgacctgtcactgcagtccaggctgggcaagagagcaagaccctgtatgaatatatatattaactgtcctttgattggtcccttgcccgggcgggccggcttaacccttcgttaattaacttgtttgacctatattttagtggatgtcatgattaattattttcataagaatacgatctgcagtcttttatcatatattaatgatatatctaatagtaatagtttacgtaatgactttaatttagtcattgataan

SEQ ID NO: 11045 - DNA, 608 bp, Homo sapiens
acgcgggcatgatcaaagagcaacatctgagtgtgtcctgagtgaagttctgtaaagataagaagcaggacttgccaccgcattgcaagagaaagtttaccagcatcaattaattaaaatagaaggcagccaatcggcattgggcacaagggaatgatgcttgtattggagcatgatgaagagatgtcagctttgtctcagcaccaacatcactattaacacttgctatctgtcaccaatcagcaatctgttcctgatgtaatcgagagttccaaagcacagctcaattcttccacctctctgagaagagtggtgtgtaggccttctgacagtgggagaaagttgcactctttgggactcagtttcttctcaaaactcattcagaaatcatcacgtgtcactgttagctaggtccaggatgtttgaataagaattgtggttatattatagtaaattgtgtaaaaaatcagttagttatgggtaataggtatggcagttaccatgtgccaagaatcttataaagttttttacatttagtaattcatttaagtctcacagtaaccctacaaggtatattttccttattttaaagaggacaaaactgaggt

SEQ ID NO: 11046 - DNA, 2093 bp, Homo sapiens
gagatcttggatgttccttccacagttcaaaagacccctttcgtcacccaccctgggtatgacactggaaatggtattcagcttcctggcacttcgtggtcagcaacccagtgttgggcaacaaatgatctttgaggaacatggttttaggcggaccacaccgcccacaacggccacccccataaggcataggccaagaccatacccgccgaatgtaggtgaggaaatccaaattggtcacatccccagggaagatgtagactatcacctgtacccacacggtccgggactcaatccaaatgcctctacaggacaagaagctctctctcagacaaccatctcatgggccccattccaggacacttctgagtacatcatttcatgtcatcctgttggcactgatgaagaacccttacagttcagggttcctggaacttctaccagtgccactctgacaggcctcaccagaggtgccacctacaacatcatagtggaggcactgaaagaccagcagaggcataaggttcgggaagaggttgttaccgtgggcaactctgtcaacgaaggcttgaaccaacctacggatgactcgtgctttgacccctacacagtttcccattatgccgttggagatgagtgggaacgaatgtctgaatcaggctttaaactgttgtgccagtgcttaggctttggaagtggtcatttcagatgtgattcatctagtgagtagttgctttgtccatccacttccatgtttgtctcctcaagttccatgcatgcactcatgtgccaaggaagcatgtttggaagacacaggttcttccaaacatgaagcaaacaagagaatactgtttgactcgaagtaatattttgcatcatagaaaaatgatgggaaattttacttgttggacattgcttcatttcaagggttgtatgccaatacaactattaattacacataagattatggtgctaatttgatttttgaaattttctgtgaaaacaaattgataaagacttttggaaccaggtctatttaagagtattagagacacacaaaaacctcaaatctcttttaatcttcagtgttgaatgagatcagaggtgaacatttagactcaaaaacagcctccttcaacataaaccaaacatgcacatatcatagtacccatgcacacacttttgcatcacacacatagtccaggtagcttgaacgttgctagaaatatgaaagaaaaaacagataatctgcttttagatcattaaaaatcaacttgaattgataaatgtttgattttcaaattctaatacgttttaattttcaaattttttaagttaaaatgtgcctaggaaatatctattatgctttgagattaggattagaatttataaacctttcatttattctttgtgtttaggagatgtgatgattattgacaattggttcatttttataggtgttgaccgttatgcctataaataagcctcctatagacatacagaaatcatatcctgtggaattagaatataagacttggtaaaagagattttcaaagtattttacttaacttgtatacttgaaatcatttaatccagactgaagttgtaaaagccagccagtgttttcaatatagacttccatgtttgaccatctgaaaatgaaaaacactaaaaacatcacatgctgtttaggagctggaaattttaatatttgacttcaagtagatggtttttaactcctgaaatcgaactacgtttaagtttgtatgtttattacctgtttgagcacttaggtgcaattgtgggagcggggatgtcaagttcatttatgtgactctttggctcaacttacataatctttgttttgatatcacagttgtctaattattttactttgtagcttaaggcaggctgaattgttgataaaatggaaaaagtagtatattgttatataagcttctgaggtgtgttttgttgtataagccctggaggttaaaaagtcatcccttatgtatagtagttaaaggcataaaactgtgacttttagatattccacagaaccagacttatttgatgtggataataaccaatga

SEQ ID NO: 11047 - DNA, 698 bp, Homo sapiens
  misc_feature 670, 671, 672, 673, 674, 675, 676, 677, 678, 679, 680, 681,682, 683, 684, 685, 686, 687, 688, 689, 690, 691, 692, 693,694, 695, 696, 697, 698: n = A,T,C or G
acgcgggttatttcatttactagcattttaggatccagaagaattccaccagattgcatgagttagattgggaaatgggagtgggagataatattgggaggtatctattttaagtcaggggctttactagccgatttagttctcacaataaccatgtggagaagctgtgacatttttaatttacaacctttctggggctcagacataaagttacctatccaaggttgcagttgggtagtggtgggaccaggatggacaactcattggccctgcctcaaaagccatacctcttctcctgctatgcagaatctgtttctcctgaatctctgtgatgctggtgggaattgtttgcatagaggaaggacaataaccctgccatcgtgagttaatgtccgggctggtcacagtggttcatgcctgtaatcccaacactttgggagtccaaggcaggcatatcatttgaggtcaggagtttaagaccagcctggctaacatagtgagaccctgtttctactaaaaatacaaaaataagccaggtgtggtggtgcatgactgtaatcccaactactcagcaggagaagcacttgaacccaggagacggaggcggcagtgagccaagattgtgccactgcactccagcctgggcgacagagtgaaactacatctcagnnnnnnnnnnnnnnnnnnnnnnnnnnnnn
